United States Patent Application Publication US 2024/0301379 A1 - sequence listing, part 5

SEQ ID NO: 6196 - protein, 1010 aa, unidentified
  REGION 1..1010: note = Description of Unknown: Cas Enzyme sequence
LAHLDCNRKTRLGLDIGTNSIGWWLYELDGERIVAVLDGGVRIISSTLNSGRDPVSGASLAVDRRAARSMRRRRDRYLRRRAALMRKLAEAGLMPPDPAMAKALEALDPFALRAKGLDHPLSLHELGRALFHLNQRRGFKSNRKTDRGDNESGKIKEATARLDQAMMARNARTYGEFLHLRRAEAPDPRHTPAVRTRLTLALRGGAETEEAGYDFYPDRRHLEEEFEKLWSAQQQHHPETLTEDLHDALFETIFYQRPLKEPEVGLCRFTEERRLPKAHPLTQRRVLYETVNALQITADGRESRPLSPEQRDRAITLLDNKKHTKSLGAMSLKLAALAKALKLAPGERFTLETANRDAIACDPVRASLSHPDRFGARWSTLDADAQWEVVRRIRAVESDAEYGALVAWLSETHGLAPDKARATANAPLPEGYARLGETATRRILAALEAEVITYDKAVAACGWDHADGRTGEVLDELPYYGEILDKEVIPGSFDRSKHDPVVQAADYYGRITNPTVHIGLNQLRRLVNRIIAVWGKPEQIVVELARELKQSERQKKETQKRIKDHTEAAIKRSVKLKELGQADSGANRMRLRLWEELGEDPMVRNCPYTGKRISCAMIFDGSCDTDHILPYARTLDDSFANRTLCLREANREKRDQTPWECWGGTHRWPPIEANLKNLSDAKRWRFAPDAMARFEENTGFLDRALVDTQYLSRIARRYLDALYDGADGKNHVWVVPGRMTEMLRRHWGLNSLLPDHNRGAVKAKNRTDHRHHAIDAAVVAATDRSLIQRIQKAAGEDEADGSDAEDVARSIPEPWKDFRDDIGSQLEKIVVSHRADHGRIDLKARKAGRDSTAGRLHNDTAYKPVDEGSVVSRVPLLSVKPGDIEVTHRGKNVRDRDLQKALARATRGKEGKAFEQALRDFAAKEGPYQGIRRVRLVESLQVSARVAVKDKTGKTYKAYKADSNHCFEVWRNPDGKVKSRVVTTFEAHLANFDARRHPAAKRLLRLYKRD

SEQ ID NO: 6197 - protein, 928 aa, unidentified
  REGION 1..928: note = Description of Unknown: Cas Enzyme sequence
MNTKLPREAGENYILGIDLGSNSIGIALIETTYGKIIHTTARVFPAGMDGSEKDWEQGRESSNAAKRRTMRGQRRQTDRRRRRLRKLANLLRTFGWLPSGSDLEFQAAINQWDREHAEKYDVHGNLPYYLRAKALDEELSLMELGRALYHLAQRRGFQSNRKAGPAKDEKPGEVQKGIDEISQAMQADGSRTLGEYFSRLDPAVRRIRSRWTDRKMYRQEFEAIWRTQEKFHVGELSEERRSLIEAAIFFQRPLKSADHLVGWCELIPNQRRAPARNLAYQRFRYLSAFNNLRLYSPEHQERPIDFAEQAKILEELEISEKLTFAAIKKLLGVKQGYYFSIEEGGEKATPGNATAARIYAAVPAFWRGLSEPNKAELVEDLGERFEADEQLQTHLRTRWGLSEEEAGKLAKVNMPAGYGSLSEAAALRVLPGLQKGLPYSTLRKELFGETDRQPVQALLPPVVNAVREVRNPAVLRSLTELRKTVNAFLREFGKPDEVHVELARDLRRSKRERLEMADGNRKNEQKRNEAKESLKGCGMTDPKREDIEKYLMWMECGRVCPYSGEWISYNALFVSPQFEVEHIIPYSRSLDNSFVNKTLCRIVTNRLKGKRTPFEAFGHTDDWPAMVERVKRMNNRAKLARFTMEEQDTEKLLEDFSARQLTDTKYASRLAAKYLGCLYGGKSDEQGRQRVFTCAGAVTAILRRIWDMNRVLNDVPDKSRDDHRHHAVDAVAIALSSMKFVKAISDAAAQSQSRRPIRSAMLADPWEGFREELREAILERTEVSYRPVRKLAGALHEETYYSLAKKDGDKTSVHVRKAIAGLTAKELADVVDPAVKRAIVAKLAEPGMTLKKMEEAGHFRRQPSHGGSGGVGRRGEAQTVAWRSCFTLGSKFAKEREATGCESQSWRNNSVLLFFERRRFGAIRGNPR

SEQ ID NO: 6198 - protein, 1099 aa, unidentified
  REGION 1..1099: note = Description of Unknown: Cas Enzyme sequence
MTDYILGLDLGPNSIGWALVSANFEDGEPIEVGLLDTSGAGHSPLGVRIFEEGVANYGTTKEMSLSQERRTKRSIRRLLARRRARKEHLRRFLQGVGLLPVDTSALAEVVATDPYRLRAEGLHRALAPFEFGRALFHLAQRRGFKSNRKSGRANAADERKTLKEMSELSEAIRASGAHTLGEYLYRESLRGMQRDSQEELPAVYRGQVRLRARFVRQDEFSQWPRRARRDHYIDEFHKLLSAQRTLTGTPILTPEQEKRVFDSIFYQRPFEVTEERRAQAPPCANLHRAPHLKPCPLEPGERRARKSDWIAQRFRILKEVNNLRIMDEGWKERALQADERRCLVDLLSEQKEVKFGKMRRELRLSESSCFNLERGGREKIDGNQLDAALASAVGKKRWRDFGDGERIMLRDKIENTEDEEDLKSALAAMDIPEAGIEKLLSLTPGDSYMAFSRKALARIIRHMELGRSEFEAIALEYPEKGEAKTWAELPSLVAPGVPPEIASITNPVVRRALVEVRKVVNALIRVHGRPRRIVVELAREMHAGAHERSERASEMREREKQRDDARNRASEILGGARAGREEVSRYLMWKQQGTFCLYTGRPIPQTTLFSNEVEVDHILPRWASLDDSRANKVLCFATANGAKGQRTPAEWLGVDSKQYRLILALAEEQCRDQGLPWGVLSRLRMVSVDSEGFVARQLNDTRYISRLVAKYLGLLFSPEDRAGQKAILTTRGSLTAELRYQWGLNDVLDPILDAHAKPLPDHEESGARRKKLRVDHRHHAIDAFVVALSSRSRLRRYQRWWQQFASEQARLNHDRPRFLAAWDRLREDVKRASSEILVSHRVTRKIAGALHKDTFYGSVRNSSGQIIEGVYVTRKPLEALTLDIISDNGGRTGIVDTQVRNAIVARLKNMGWREGESLPKDWWRQEIQLRSGVPVRRVRVRVAIGDPVELANRFAASAGNHHLAFEPMTAGETRLLARVRTMSDVASSVRRGGERLFQPDTRHPNKEFPVARTLARNEVVSLVSPDSNEQYYAVVQKVSGPRRPSTGMDVTLRDIRDGRPASSGNRDPLKRFKSSSALLEWSARKVQIDLLGRVYPAGD

SEQ ID NO: 6199 - protein, 1080 aa, unidentified
  REGION 1..1080: note = Description of Unknown: Cas Enzyme sequence
VKYRLGLDVGTASVGLVAYELDDSGRPVSVPYHSVRIFDEPLLPAKQGGVGELKRAARRETRQQMRLHQRRARRLRRLAYQAHLLGIDSEAVAHRRKPHILEVRAQAATQKVDLEDLLRIFLHLSKRRGYAGTFRARKGGKMGEVQTGISDLRKAMDEAGCKTLGEYLLHRHRQGQHLRLKADDKKLYANREMIRNEFDCIWTTQEKEHKQLCGVHEGRPLRKIFEEAIFYQRPIRILSAGNCSLETSLPRSPMVQPAFQEFRIEKQIADLRWAKKGRRHPKPLEEPEKQVIRRLLADRERVKFEQIYKALEKAGIPPAPGEYLNLSNGDREDLRGNGTNVCMKKLGLEQEWRNLTDGHRITALNLLADMGAPDVFSTRDWHKKIARGRKRADGKPEYRCIPREVANFINGMAEMEKFDWLSKMGFEAGRSSYSIKALRRLTDAMREKNLDETDAIGLLYPQSTARREELLGELPPHEQTGNIVVDVSLRQVRREVNAAIRKLGGPPDSVIIELSREMPLGVKRRGEIVDKINKNRNARKKAALEIKEHTGNAASKSAIERYLLWTEQDQKWCPYCTEPINIFVALDGSKTNREHIFPRSLTRIGKRRGSLVLAHRSCNDEKGAQTPREKWGNDPERWKVIEARAKQFGKKKKIGKMRQLLSRESGESVLDDEELEAFSDRQFHETSWISKSCAQWMKAICSDVAVSRGFLTAYLRRKWGLDTVIPEVRIEEKLPIFDRDNQEITREDFESHRAYWEERGGTENSSKTSRRIEKRIDHRHHLIDALVIGLTSRSLYQKMARAYKMEAERAASSAKRRNIPLRAEPPILHIRQLALDLVRDCNLTHKRDRWLGGPLFTEQPLAVVEIDGQDWFVQKKTLTEIAEGGVETAIRKKIERIVSQSTREVVLKAFEERIGLGKSPKEALSEPILDPYYGQPIRRVRVRDTEKADKAILVEHHGKLQNKSFEKYMKTKGYAYLELDARQGRVRLVTLYEAMKSGRSETLTGVRFFKGDTVLDTRDKKRYVVRQILGKEDGTLILTLHTETREVKNMVKNTGKKLVSGKQLSKLTLISDGRPPHSSD

SEQ ID NO: 6200 - protein, 271 aa, unidentified
  REGION 1..271: note = Description of Unknown: Cas Enzyme sequence
MPKQQQLISPIAIDLGAKNTGVYFAHYPAGSSLDRIEKEGKVYQLDSQGYTYLMANRTAARHQRRGYDRRQMAKRLFKLIWCKYFGLEWNKDVQQAVGFLLNRRGFSFLTPEYSADVLAQFPDKAFGLLPDELKKDENIKQNEADDTHDFDSAVQDWARDKDELEEKCLAMQSEIYLHKLYDACLKGEEYKEPRNTGNSLRDIDSKVYDKLVALGVRGLEYAEEGNYTYKREEEKGGKTQTVENTATYKHQGDKYNLQAYVKYANQNQHIK

SEQ ID NO: 6201 - protein, 1394 aa, unidentified
  REGION 1..1394: note = Description of Unknown: Cas Enzyme sequence
MDKANFGGSENPDIKTHLHHLAFALHKVHGELQSGGRHRSKYFEEVKNVLESQKWKEKEKDQKTLSYLDRFCKKLQTGDFAELQVDGLSNLIGHISNLELKPLRKYFNHERHKSGDYWDESRLSEKFENWILREWRINPEKDKLKIDGATYAHKKLRSQWKGKSGTIVDFWLNTDPNLTIPPYQDNNNRRPPKCQSLLLNVGFLNRKCKYKYKYKDWLKWLSELKKIESVHNYLGNYEEQLKGLKSGKGRCYFSGERKGKLRADSGRRSMAELDARVLQFIFDRVKAEDGLNLNEIYSHAKKIKQDKHKQDDRSVKAVELAKAELEKAIKESRLPQELKVAPDYSRDDLFSEGSFFHLICKYYKLRQRARDGRIFIHPRYGRGYQNTGRFDDKNHLLTYCNHKPRQKRYQMLGDLAGVLQVSPHNMERVAGKHAGRTMDDRLFNWLCGINGLRANCERAAKEQKERRGRLKLDIQTVFGLIHHRKQSESPSLKEVKQILKSSRINDAQSLHGFCERAKQVCSVLTESLYGDSKQQEWKKELDKNPATAVYLLAQINNIAFKERNGNANTCAVCSMDNATRMQMVSAANGKDTVAKAQRLPAIPTRLIDGAVMRMARIVGGAIARDKWKKIETELATDKRVCVPIITESNQFEFEPSKDELVKSQRTKPRTGKALERGGELKIAASKDERIRAAGKDVCPYTGDGIPKGAGDKDHIIPRSSRWGTLNDESNLVWASERGNKEFKKDREFSLADLNGEYKRAVFGEKSDAQIKNWIIKQIGDSSGEDFEFGKYRSFVNLTPEQQTAFRHALFLVGDPLREKVINAIDNKNRAFVNGTQRYFAEVLANEIYKLAKNKGKEHLLSFDYFGVEAKPNSTGDSIYDLRKMYEACHKQIAEYAKSKDSKQQAYSHLIDAQLAFVIIADAHRGEGGIKLQIDDSVGKEPYSKKTGEIDGGLLGAIRVSNDDFELEPLGRRKAYEVETHHRELLNNGNKKAVNISYRIHRANLIAEKFMPLIRLESGEFRKGFSARNSVEYKSSDFEIIKGFLHASKANQNIWLVKRKEALTFLMDAGRNGLDKKRQKIAKLLDDLVYQTTKKPVSVVLTAKPQEKDKEKAKYKKSPETVGEAMERWDTFIKHEEFKKGGVVLPVFGEWKKLKAELENAVPEQSLQVFLQSSKMFTDKHGSNIRNHNKTRKVYSLPVIATIGSIRLKRKSWNRLSIIQTAADESISKYGLDSKQRPHTVLSRNSIPVKHYSGIPEKLRPEPRGWKQIPEENIAKHNSNSDIPRILSGKVKYQDARRCRVILKIGDIQKLSLPQDKKNWKGKLFRYGNVEDLEEKIGNEKGDNHHCLSSEWQWFSAPFKLPENRNEVTMKNVGGVYEIEYTVQKTAEIQRWLLL

SEQ ID NO: 6202 - protein, 1786 aa, unidentified
  REGION 1..1786: note = Description of Unknown: Cas Enzyme sequence
MNQKSDRKSEKKNIISPIAIDLGAQNTGVFTTHYEAGSKLEDIKNKEGKVYTLDKDNYTYLMVNRTANRHQKRGYDRRQMAKRLFKLIWCEHFKFEWNGDIQQTLSFLLNRRGFTFLDGDYNKEILSEFPKEAFNRLPEKIQEKLREYKNKNDDTYDMDRAVDLANKGTKQEEELNLDEVKKQLDEVIGKVKNNLFLYQTQKKLYEYCSKRKNNEKIPIENTKKQHLSQLSKWILEKWIKQGIQGLPAVPSENTVNMVDYLNQKKPEISEKILKSLNQKKLGIKELETEEKELKKSVWNWNPEKFNLEKANFDPPEQDNEKLNNKYIKTHLHHLAFAIDKIYNELNSGARHRRKYFNEIKDVLEEPNHTHGYLKRFCKKLKSGNFKNLTAKNLCNLIGHISNLELKPLRKYFNDKKHKEKDYWDEQRLAYLFGRWIISEWRVGEKDKEKIDDNYDFNYKNLKQKWKSYKKDNKNVIDFFLETDPQFTIPPYQDSNNRKPPKCQSLILNVNYLNKKYSNWKDWLNQLQEIESVNKYLQDDEQKLNYKQKLKNLKSSKGKPYFSEEEALSKDSGKRSMQELDARILQFIFDRVKAKDSLNLNTIYSYAKKIRQDKHNDSIKVESADQTSKSPEELLKDAIKKSQLPEELKNDPDDNTDDLFKEGTFLHLVCKYYKFRTRAKEGRIYIHPKYHYVKGRGYENTGQFDDKNHLLTYCNHKPRQKRYQMLEDLSSVLQVSPDHLKKYIEKEILLNNSSDNLNEKQKLEKQIDQYLSNIKGLKTKCKKAAQEQKNRRGSLKSDINKVFYLIDYRKENKNPSKIQIQKILKKSNINDAHKLYNFCEKAKTLIKDLYKDLYDDSQKNELEKDLNRNPATAVYLLAQINNIVFKERNGNAKTCVVCNQDNAYRMQMVLDKKAKGITAKAQRLPAISTRIIDGAVMRIARIKGKAIVKEKWSKVKEELEKGYKVHIPIIMESNQFEFEPSRETLVTKQRASRHRKSKALTFDKAREKESKIFESTIDRIKEASKGICPYTGKAISDESGEGEIDHIIPRTSEYGTLNDEANLIWASKLGNQHKTNQPLCLSNLSKKYKTRLFPNQNDDQIKDWILDTIWDKEKEDFKFGKYLSFINLNPDEQKAFRHALFLKECRKAVIDAINNRNRAFVNGTQRYFAQVLANQFYKKLLDLNNKRKNEKPIDKNSLSFDYFEIPAFDVKGDRENLENKKDKCKNPIYPELQEHKKLHHKTNKNEQKEDKNAKPQTPYSHIIDAQLAFAIAVSKHKNNGSLKLVCDNISLSNENKTSDENKTSEIEDIFNEIKIPKTQDQEQKLVRQLPFEHKKWTHRPLFNENAVAMHFLKLIQISCGNDTLYLKGFLDLNELKTCLENNDWKTSFKDKKYPYATILKEELSETPQANQKSKKNQKKKKGKTNENDSVIKMYKETFVYNNQKSSTNDNLIKTYKINNKVFKIYLYKLDKTKVIEFLFEHYNIFNSNHNLNESQINTLKQLKKLWYFTQKKNVIDKDKLYSPSDEKFKCNQIINPHLRNEWKKIKEFKKEQLEKYFLYKKTGKKHKHPHQRKRKIFSLPITIKTGILIKKKNWKREDVFYFRLQKQISKTIFHKDKSNRLSNVYRRNNMIILHTFNKLSFNDFQKLLQPIDKNNAIDPNEWHEISVPEEFKDYIEKIKIRRTEETKTLFKFSFKDKKMSVKLLWEFCKKYPLRGIALRGIDSLDDFEKYLKDSKKAKEIYEKVTQEPYLEHSVIKPFKDWIILKKLMNNKLVKNNEKNNIKIYIEN

SEQ ID NO: 6203 - protein, 1440 aa, unidentified
  REGION 1..1440: note = Description of Unknown: Cas Enzyme sequence
MTKNILGLDLGTNSIGWALIQQDFENKEGKILGMGSRIIPMSQDILGKFGEGNSISQTAERTGYRGVRRLRERHLLRRERLHRVLHLLGFLPKHYDNQIDFTKRFGKFINQAEPKLSFDSEFLFKDSFHEMLADFKQNQPEFLKDKNGEDCLVPYDWTIYYLRKKALTQEIEKEELAWLILNFNQKRGYYQLRGEEEEENPNKLVEFHSLRIVDVVPDAETNKKGETWYSLHLENGWIYRRSSKISLDDWKDKTRDFIVTTDLNNDGSEKLDKEGLVKRSFRAPSADDWTLLKKKTEQDINQSNKTVGTYIYDNLLLNPKQKIKGKLVRTIERKFYKQELEQILKTQKQFHTELQSENLLQDCVRELYRNNEQHQQMLEAKDFVHLFLNDIIFYQRPLRSQKSSISNCTLEFRKSKNENGEAVIHPLKVIAKSNPYYQEFRLLQWLQNLAIYTKDDDKNVTNEFLNSTEDWEDLLTWLHSKKEIKQDALIKFLIEKKGLKGKALTIEVAKYRWNYVQDKDYPGNETRYLIQSRLDKVENAPKDFLTFENEMALWHIIYSVNDKIEYEKALKSFATKKGLDETTFVEAFKKFPPFKSDYGSFSEKAIKKLLPLMRFGTQWNWDNIDQNSKERIEKILTGEYDENIKDRVRELIEKKDIKQENDFQNLQLSLAQYVVYGRHSEADIARKWNSVDDLKQYLDDFKQHSLRNPIVEQVITETLRVVKDIWQQFGKGAKDFFSEIHIELGREMKNTADERKRITTMVTDNENTNLRIKALLAEMALDKEVDNVRPYSPMQQEILKIYEEGVLNAEENIDDDILKISKTAQPSATDLKRYKLWLEQKYRSPYTGQMIPLNKLFTPEYEIEHIIPQSRYFDDSMSNKVICEAAVNKLKDNQIGLAFIKNHHGEMVDCGMGKQVKILEVSDYEDFVKQNYNKNRGKRNKLLLEDIPEKMIERQLNDTRYISKYITQVLSNIVRDNKAGSKDDGINSKNIVPGNGKITTRLKQDWGLNDVWNDLVLPRFERMNTLTNSKDFTSKNTHGKTIPTVPIELSKGFSKKRIDHRHHAMDALVIACATRDHVNLLNNESSKSDTKRYDLNRKLRKYEKVTYKDPKTGERIEREVPKDFIKPWATFTEDSRASLENIVISFKQNLRVINKATNYYEKIENGKKVKVEQKGINWAVRKALHKETVSGQVHLDRIKVAKGKILTATRKTLDASFNEKTIESITDTGIQKILLNYLKSKDNKPEVAFSPEGIEELNKNIRLYNDGKAHQPILKVRVFEQGSKFALGETGNKTTKFVEAAKGTNLFFGVYTDKSGKRSYETIPLNIVIERQKQELQAVPETNEKGQQLLFTLSPNDLVYVPGEGVFDENNIKVDRIYKVVSFSTYQCFFVRNDVSTSVVNKVEYSALNKMEKSIDNIMIKENCVKLNVDRLGNISKALK

SEQ ID NO: 6204 - protein, 1105 aa, unidentified
  REGION 1..1105: note = Description of Unknown: Cas Enzyme sequence
MAKILGLDLGTNSIGWALIEDNQNKILGLGTRIFPMGVENLGDGEGEISKNASRTGARGVRRQFFRRRLRKQILLKALSENKMCPLEASDFQEWKRNKRFPIEKLATWFALNPYELRQKALIEKLSLEEIGRIFYHGTIFKGNPKEGKIGITETQKNIEDKTLGAYLFEIYPKENQPFQDGLERIRNRYTTRKMYVDEFELIWNKQAQFHAELTNELKTLFGGRKLDGYKEDGILFHQRPLRSQKHLVGNCSFEPRKTKCPISAIPFEQFRVWQWVNTVEYNGKKISQEEKEKIVEFLFANEKPEFKKIRKVIGKESAEFKFNYKDDDKIVGTHTISNLSNKKYFGKKWFEFTEKEQEDIWHVLYFFDSKSNLKEYAIKNWNFTEEQAESISKFNVKDGYASLSRKAISNILPFLKLGFTYDVAVVLGGIKNVFGSDWEKLSDEKRNFFYDNVYEIVRSKNKGGFIEIIKDILRNDYNISDNQLRKLYHHSATIDATELLEKLPVGKDADKDIQAIRNPIVITALFELRKLVNELIDEHGKIDEIKVEMARDLKISKSQRNKIRKEQKRLERENDRVKARLLEERQRITHDNILLYKLWEECKHTCPYTGKPISVTQLFSGEVQIEHIHPWSRSLNDSFSNKTLCYADENRKKGNKTPFEFYGSDEANWSAIKERALKLFSDTKEYPNAYQKFKRFVQQKFDDDFSTRQLNDTRYISKEAKNYLSKICNKVTVSPGQATSNLRHKWGLNQILNDDNEKTREDHRHHAIDALVMACTKVSYVQELSKWNRYNRGYDVKDFPMPWLSFWKDAEKAVNQILVSHKKVSNDITVRTHTTEKNGKKHTNLGVAARGQLHKETVYGKRTFNGEEAFHVRKPIESLETAKQIAKVVDESIRLLILKRVNELGGFVKDKVPANTFFIVDENGVKQPQIFLPNQNGAPVPILKVRVKENIGGAEKLKTNVNQWVNPRNNHHVLIYKDEKGNLKEEVVTFWTVVERKRTGQSVYQLPIDGKEMVTTLHINDMFLLGLSEDEINWENPDYKVLKEHLYRVQKFTSGDYYFRKALTSSIQNPEEKQQINSFGFGKNGWSTHNPIKVKISVSGKIIPF

SEQ ID NO: 6205 - protein, 979 aa, unidentified
  REGION 1..979: note = Description of Unknown: Cas Enzyme sequence
LEKYSGGDMSQILGLDLGSNSIGWALIDNEKQKIIDTGVRIFQEGVNRNTSGSEVSKNAERRDARGARKRNARFQMRRDSLKKSLQKCGMYPSTHELIKDFFKIDPYDIRKRGLDEQLTLLEFGRALYHINGRRGFLSNRKTASKEDGTIYKGDAEKAGINEIKDVLQSQQYRTIGEYLASISNPHEKRRRNRYTLRVWYQDEFEQLWNKQQQYYPSILTEQEKKHFNHIIFFQRRLRSQKHTVGYCTFEKNKKCSPKSSPIFQYFRILEQVNRLRISTDDRINDALNTDERQILIAKLNETENIDFKKMKKLLQLPESTTINLDTEKILGNNTYYQIKRIFGKNRFEQMSDDYKYNIWHTLHFAYDNQWLEEYGRTKWQLDNEGMNNLLKAELETKANDGYARLSRKAMLKMIPFLEKGMRYDEAAKQAGYHHSQVDTNIEQLDFLPEPPNIRNPFVQQALFQLKKVVNTIIQFYGKPDIIRVELARELKLPKDRRSKIQIENKSRQREAERIRDYLSQNLGFTNPKRDDVIKYLLWEECNKVDPYSGDHIGLSDLFSPKYEIEHIIPYSRSLDDSYMNKTLCRYDLNKEKGNRTPFEAFGHKPEYNQILNRVKQFQGKAQINKLKKFSLQDIDVELSDDFFSRQLNDTAYISREARAFLQKICARVQIAKGGATAQLRTLWGMNSILSLDVIEKNRDDHRHHAVDALVIANITPFMLHRLSSYYKYNAKKFVTDKKFPLPWEDFRQQAVTSVNNILVSFHCRNRVRGKLHEETNYGRIIDPTSGEQVYVVRKSLSALSAKNIGNIVNEETRQLLLNRLHEFGVDTSKKKFEIPKEALNEPIIHPGTGHPIKSVRVKIPTINMIALYGDDRKLYVESGNNHHIEIFVSADGAKRVGYVVSLFEVVQRKKQGRPVVDKNAKDNLFPNFLMSLSTNEMFLVDLNNDDINWENLNYAILSANLYRVQKMDVNKIIVLRHHT

SEQ ID NO: 6206 - protein, 1504 aa, unidentified
  REGION 1..1504: note = Description of Unknown: Cas Enzyme sequence
MKKILGLDLGTNSIGWAVVNSVTEGQGKKMSIELSGSRIIPMDAAILADFDKGVTKSQTFERTMLRGRRRLRERSLLRRERLHKVLKILGYLPEHYVNEIDFDNHSGKFRPDVEPKLQWRKNEVGHWVFLFQDSFQAMLADFSLYQPELVAGGKKVPNDWTIYYLRKKALTEKISKEELAWILLNFNQNRGYYQLRGEDEEEPSNKLNEYYALQVVRVEATGEKKGKEIWYNVYLENGWIYRRTSAVPLKWEGMVKEFIVTTDLNEDGTPKLLKDGEVKRSFRMPKEDDWTLIKKKTEADITKSNKTIGAYIYDTLLRNPNQKIKGQLIRAVDRKYYKEELQAILLKQISFHPELQNRDMFKKCAEVLYPNNEVHRRNIEDRGFCYLFINDILFYQRPLKTKKTLIDNCPYEENQYIDKETGEIKRAPIKCIAKSHPLFQEFRLWQFIDNIRIYKREKEVNGKLQTDVDVTDDFLKIEADYVALFEWLNDREKVDQKTFLANPVFNIKKVIEQYRWNYVEEKSYPCNETRFLILSLLEKSGISGSFLSEEGREEALWHILYSVEDKQELVKALTTFATKHNLPDSFIEVFRKCPPFKKEYGAYSARAIKKLLSLMRKGKYWNQEAIDGKTVERIEKIISGKLDESIGKLGREKCANFSALNDFKGLPLWLACYVVYNKHSEAKEITKWESPEDIDVYLKNFRQHSLRNPIVEQIVLETLRTVRDIWREVGQLDEIHVELGRSMKNSSEGRKHIFEQMRANENANLRVKALLAEFINPEFEVENVRPYAPSQQELLRIYEDGVLNSVKELPDDIADFLKKFDVMTPPPRSEFLRYKLWLDQRYRSPYTGNIIPLGKLFTPAYEVDHIMPQSRCFDDSFSNKVICESVVNKLKNNLLGYEFIKKHQGEILLGHIPVFSVEAYEAFIKEHYAKSNDKKRKLLMDEIPEKFIERQLNDSRYISRLVKRLLSNIVREKDEDGRYEQEDMSKNMVVCTGAIVERLKRDWGMNDVWNQIVYSRFERLNHLTDSCQFGGWENKGGKRVFQTTMPLSLQKGFDKKRIDHRHHAMDAIVIACVTREHVRYLSKELANEKSKVSQLDLQRLLCDKKKTNNNINYIWSVEKPWGTFTQDARKSLEHIIVSFKQNLRIINKSSNIYQCFDEHGAKTLKKQVHGDNLVIRKPMHKDTVFGSVNLQRIKEVRLSVALDVPSMIVDKKMKEKILELISYKYNKRGIEEYFKENISLWKDLNLSKVAVYYFTDNTAEPLVAVRKELDDSFHMKKIKEAVTDTGIQKILLNHLANNNDNPALAFSPAGISEMNKKLTVLNNGKPHQPIYRVRVSEPKGNKFNIGSVGNKGSKYVEAAKGTNLFFAIYQTSSGGRTYETIPLNVVIERQKMRWAPVPESNAKGDRLLFALSPNDLVYVPTVEECESGDMPVEIDGKRVYKMVSSSGSQCFFIPHTIANPIVPTLELGANNKAEKSWDGEMIKSICVPIKVDRIGNVMAFHSLF

SEQ ID NO: 6207 - protein, 1579 aa, unidentified
  REGION 1..1579: note = Description of Unknown: Cas Enzyme sequence
MKDWYLGFDIGTNSVGWCATDTEYNILTKGKKLQCGARLFKDAQDASKRRGFRSGRRRMDRRKVRIDLLQELFDSEIAKIDPSFFIRLNESAIQIDDRDNIDSQTRDLYDNTFKRRGEKQVKVKSAIQIDDRDNIDSQTRDLYDNTFKKRGKKQVKVKYPLFLDKDFTDEDYFKKFPTIYHLKQHLLQNDTKDPRLLYLACVHTIKYRGHFLAAEFNTKRGKEGYSQILEQINDSLKENCWCNNTKDESCIVFETQDIDKFIADTIKGKELSEPKQNDEIRQRLNPNDEIRQRLNPKGDKILKALIDAMQGGKIRLSKVFKEQASQDGLNGKTQLQQAESAELKEFEFGSEKYDECLAYAETILTDKQLGLISLLKQFHDIVRLNRIMAGADCISQAMVNIYDAHKADLELLKGFVKKYCDKYEYDKMFRSNTEKRDKDFIHASYVNYIGTNMTGNKKTISHFVSCVNKKDQTSDPMTATHKDFLKYTEALLERVASKSEDAKNSKEYQELKKKIGLGDLCKVLNTVDNSYIPHQLNEAELKEMLKRQSDNFEFLSNEDEFGIVADKIVKLLTFRIPYYVGPLSDRHKDTTNRNQRGNEFGNGKFAWIEKNAGFENTRVLPWNFEKVVNLASSGEQFIARMTSKCTYLRSEDVIPGTSLLYQDYRVLQDLNNLKINGNRISQDLKEFLYNGICQTESSLSKKKIKDYLLKHGKIAPSDTVGKEDANDAKFDSSLSSHIKFKNILGDNYDKAMAEQIIKWHTVFGNEKKPVIDRIKQEYSNVLTQDDIDKLGKLNFKAWAAFSQKFLEGVTATDKTTGEMGLSIIACLRNTTLNLMEILNSDRYEPKFLDAVKAYNGDKGEFKFDYDSLVKDLYCSPTVKRSIWQSLLIAKELQKINGTAPKKVFIEVTRVEDKQKKGKKTTSRREQIAELLKSAAKTGLDLTQMQQEFDKKTTDTEFRSDRLYLYFTQLGKCMYTGEKINLADLNNNNLYDIDHIYPQSLLKDDSLSNRVLVTRQANAEKGDRYPLPESLRAKMTSWWDRLLNAGGKGKEGLISRKKYDRLIGSKRLTDEQLAGFVNRQLVSTNQAVKETINALDAIFNQGCDNDNKNTKMVFSKAGNVSEFRAKFDLIKCRQVNNLHHGHDAYLNIVVGNVWDSVYSKYWQNNNTFNENRALDKLFTKDKEGIWQKSYIQKIKDYVLNYADKYLDKFVVTKKPYQVKGEFYDQTIYPKGNKNGIPLKDKLDTLKYGCYTSDITAFNCAIEYDGKTTQEFEFNADFVAKFKNSKGKLDKQAFALELVKDKGINVTDAPVLKKIDENTGKCKIEHDCRHIGVFGVPIRYVAKYKNDDGKLNRQVLANQIAKDLGIEDKRPLIKIESIKMFSVLEIDGTRYHMRSKDLQCSVVAEWYPSSEIVKIIKEIVKYQALVSEKQISNEDIKKHSETDGEIIFATREKNPHNQESKSLTKDKNLKAFDAIIKQIKKPFYQKYSFANKVAKGEIDRAKFEQLKTAEQANQIIELLNMITMNGTLTNASKIGGAANEVCKYVVGDSVTSPISTKHKKVFVVNQSVTGLFENKIAVVDN

SEQ ID NO: 6208 - protein, 1117 aa, unidentified
  REGION 1..1117: note = Description of Unknown: Cas Enzyme sequence
MRYRLGLDLGTNSIGWAALGLDENNAPVKLIDAGVRIFSDSRQPPKNGVPGEPLAVERRQARGIRRNLRRRKARRKTLFRILQRDGLFPANIGEARLQKKLEPYRLRVKALDNKLEPFELGRALFHLGVRRGFKSNRKDAPEEALPDATEAPGLFAVEEAVEQESHTETNKKEPTQGENCLALKAAIAGSGLRTLGEFLLARANAAPGGQKDLRFVPGRYLWYPLRELYETEFDAIRKAQEPFYQNVAWDEIRQAIFFQRPLRRQERGQCQFAAVCPLEKECPGKKAEHSCERTFKAMPSSIRIRILQEVYNMAFRDEWGKPLTLMDEQRKIIINILDASAKDVSFDALRKKLKVPYRFNLETDIRGSLKGNPTGAKLRGKKYFGKIWDTLPLAEQDNIVEMLIEEDDETKIIAELAKYNLTDEQRQAISRYVPSGGTTSLCKDLSERLVAEMEQQGCGYYDGCKALGIDHSEEKVEKYDTLEYYGKVLTGSTMGGDASKYGEDEPEKRYGKIGNPTVHVAFNQIRKVVNALIAEYGKPYQTVIETGRELKASREDRERMLKKQAENTKRNVITNKNITEITENSAVPLRYPNRTDRLKYRLWDELGAEGLPSRCLYCGKTISDAELFTDDIEVEHILPFSRTLLDSESNLTVAHKSCNAFKRERSPYEAFASNPAGYNWAEICERVANLKSRSKRKRFDSDAMKDFDEEKDGGKGFIARQLTDNAYLSRLARRYLKTVCDDVWVTSGGMTKLLRDKWEIDSILKRKISKAEIAHFGLDEKQIGDYKKNRYDHRHHALDAIVIGLVDRAMVQKIATMCGRSLKHRIEVPEMPFGKNRVESKTIIVDKLKTLVVSFKPDHGVEGKLSKETALGKIKIRNEKTGKFEDVFVNRVPITSLKEKNIDDIVDAKIRKELREFAQARSGEKFEKVLEDFLKPREKWPCGIRRVRYKAHGQNPIEIGQNKKTPFPRYYEQHGYYCAIIWQLPPDKSGKTKFEAQYVLRLHHPFGIDKSGKPILHKPHPAAKKVCVLCKDDYIEFTENGVTKKAIIKELLASGRIGIQPVFATSSISDWIIATSEQMLEKGWHITKKGTYAPRINVLFEQYAARKITVSPIGRIR

SEQ ID NO: 6209 - protein, 1106 aa, unidentified
  REGION 1..1106: note = Description of Unknown: Cas Enzyme sequence
VDYRLGLDLGTNSIGWSILGLDEKAEPKNLIDAGVRIFSDGRNQISKISLNVERREARRKRRVIYRRKLRRRKLFRILQNEGLLPLEKKDADAVKVYDPYELRVMALDYKIKPYGLGRALFHLGVRRGFKSNRIIDNEENKKTGEEEEKKDVKRIPPSEMALTFKEAIKQNGLRTLGEFLFEQNKKDVVTGRRKGLRFVEGRFLLYPLRELYELEFYAIKKAQIKYYPDIAWDKIYDVIFDQRGLPRQLRGKCEFMDRCPFIKECPGKRADHSCERTFKEMPSSIRFRILKDVYNMEFIDELGVSVPLTEEQRKTIISILDRISTNIKFNTLRKKLKVKYHFNLERNNKEDLKGNSIGVKFRDENYFGGIWDTLTLADQDEIVEKLIEGEKEDEIVTYLRKFNLTNEQKWLIARYVPNRGTTSFCKEMTEHLVEVMERKRVGYYAACLKLGIEPSKEKVKKYDKLEYYGKVLTSSTVGGEPEKHGEDKPEKRYGKISNPTVHVAFNQIAVVVNELITKYGKPEEVVIEVEHDLKASFEERKRIQEKQVKNAKNNERIKKIITEITGIVPPGQKDIQKYKLWEELGGDESSRRCIYCGKVIRREELFEGNIEIDHILPVSRTMLNSEINLTIAHKSCNNIKNGRVPYEAFAQNPKGYNWAEISSRVVLLKDKNKRKMFDMDAIKEFESDETEGGGFNVNHLTDNTYIARLASRYMKSICDNVWVVKGRMIKILRDTWDLNSLLKRKVSKKDIEEFVLGEEWDEKKREEKIERKIEELRINNYDQRHHALNAIVIGLTNRAMVQRIATMSARSMEDKIKVPDMPFSRDDEESKKIITEKLKTLIVSYKPDHGIEGKLAQETALAKIKTEIDGTKMVKEIYVRRFFITSIKKENIDDIVDKKIKKRLKKFIGWHPEEDYKNLLIKFSNKTGIRRIRCKTYAQKTIKIPEPHKDNANYIRYYNPDDYLCAIIWRLPAEKSGKFKYTGSYILRVEESKVKNPVLVRPCRDAKKVCVLYKGDCIELLRDGVYRKAYIKKFAPAVNGIAVVSIYVSGNADDWKLVTTDEMIEKGWDNKSSTITSDVLFGKYAARKITVSKIGKIRNTKYPQDN

SEQ ID NO: 6210 - protein, 1236 aa, unidentified
  REGION 1..1236: note = Description of Unknown: Cas Enzyme sequence
KILGLDLGSASIGWALIELEGNSVKIIALGSRVIPYEGTEGKDFVKGTGESRNALRTKNRTARKGYDRYQQRREILVDILAKNGMLPDDKLKHLPKMQLWELRSKAVSDNITKQELGRLLLWLNQKRGYKSSRSNANLDKIDKEYVAKIKDRYEEIKELGLTIGQYFYQELKRDEYFRVKENVFPREAYIEEFETICNRQKRYLTETLISHIRDKIIYYQRPLKSQKGLVSVCEFEGFWTKGKGNKEYFVGPKVAPKSSPIYQIAKLWENINNIKLNTRTGEDVNLTLEQKQAVFNYLDNHEKLTATDLFDILGKNKRDYIVNKQIEKNIQGNITKSAILKCLENNEDYHKWLKLDLNIVETDEQGYLYKKTGEVFNEKPVKYIDRTVEKEPLYHLWHTIYSINDTKECCTVLQNKFGFDNETAGKLANIDFRKLGFGNKSVKAIRKILPYMMEGDVYSSAMSYAGFNHSNSLTNEENLRRKLSDRLKPIEKNSLRQPIVEKILNQMINVVNAIIDTYGRIDETRIELARELKQSKEERKETDKRINKRQRENEAIAERLAEYGLRATRNNVIKWRLYEEIDNQEKKLNATCIYCGQPISLTDAINGTEVEIEHIIPRCKLFTNSQSNLTLVHRRCNSTKGDATAYDFMKGKTAQEFEAYIERVNSLYTNKIINKTKWRNLLMTESKIPDDFIDRQLRESQYIARKAREILQTICSNVWCTTGIVTAELRRLWGWDDVTMNLQLAKYRELGLTEIVERKSENGKCNHTKEVIKGWTKRDDHRHHAVDALTIACTKQGYIQRFNTLNASKTRDDMQKEVKLCSEKYNEKLSLLEKYIISQRPLSVSEVETAVSKILVSFKSGKKVAVKGTRKIGKTGNKKVIQRDIIIPRGALSEQFIYGKIKTIEKKKSLKYIFENPQLIFKPRIKRLVEERLTQFSDDAKKALDSLKKAPIYLDNDKTHILEYATCFKDEYVKKYDVDVNFHGTKDVIDWKIKSILQHRLDKFGGKPQEAFRDVQKGDKILKWYEDEGLEHPIHSVRCSTGLSVVVPVKKDGNGNAIGYVKPGNNHHIAIYTDSNGSKNEHVCTFWHAVERKKFGVPIVIKDTNELWDKILQKPEGSYPQNFLEQLPHANWKLLSSLQQNEMFVLNLTKEELTNAMQQKNNSLISNHLYVVWSLSKSDYWLRHHLETKNTELKKEAKAKEGKRYYRCQSTGAFFRLNPIKVKINHIGQIVSVGEY

SEQ ID NO: 6211 - protein, 1123 aa, unidentified
  REGION 1..1123: note = Description of Unknown: Cas Enzyme sequence
MKYRLGLDLGTNSIGWALISLSAKNEPCELVDTGTRIFSDGREPKTGEPLALARRTARSIRRNLRRRKARRKALFRLLQRDGLFPANIGEARLQKALDPYRLRVKALDEKLAPFELGRALFHLGVRRGFKSNRKDAPEEALPEESSADLFGADEADGTDSAAAESPDAAEEMRGKPKEPTQGEKCLALKAAIAESGLRTLGEFLFAKANDAPGGQKALRFVAGRYRWYPLRELYEAEFDAIRAAQEPDYPDIAWDDIRQAIFDQRPLRKQERGQCQFTAGCPFAEGCPGKTAPAQCEGKFTPCERTFKAMPSAIRFRILQETANLTLYDERGTAAQPLDDAQRKIVIAALDASAKDVSFDALRKKLKLPQTCSFNLEKDARSSLKGNPTGTKLRGAKCFGKLWDTLPLAEQDGIVGMLIECEDEAAILAALAKYDLTDEQKKAIARYIPAGGTTSLCKELTQRLVAKMAEKNCGYVAALDALGIKHSEERVDKYDTLPYYGEVLTGAVMGADAKADKDKYPEKYYGKIANPTVHIALRQTEKVVNTLISVYGKPAQVVIELSRDLKASREDKARMLKKQAENTKRNAIINKNIKEITEKSAMPIRYPNRTDRLKYRLWEELGKDGMTRRCLYCGKNISASELFTDNIEIEHILPSSRTLLDAESNKTVAHKRCNAFKGDRSPYEAFASNPPGYNWEDICERAGSLSASKRRRFSADAMKDFEEQTDGGKGFIARQLTDNAYLSKIARRYIKAVCDDVWVTSGRMTAHLRGKWELDSILKRKIGQTEIAHFKLDEKQIGEYKKNRYDHRHHALDAIVIGLVDRAMVQKIATMHSRAQEERIEVEMPFGRNRAESKAIIADKLKSLVVSFKPDHGVQGKLSKETALGKIKMRNEKTGELEEVYVNRTPLAGLKEKNIDDIVDAKIRKALREFVQAHSGEKFEKVLEQFSQETGIRRVRCKTFAQKPIVIPEAHHDNPAYTRYYNPEDYLCAVVWQLPPDKSGKCKFEAQYVRRTEIDKSGNPILARPHPAAKKICVLFKDDYVEFTESGVTKKARIGGFSATNNGIDIRPIYATDDAKNWIVATPDVMREKGWKPQKGHNFISVNVLFGQYAARKITVSPIGRVR

SEQ ID NO: 6212 - protein, 991 aa, unidentified
  REGION 1..991: note = Description of Unknown: Cas Enzyme sequence
QAKKIIAQTIVEVGKTKEKLNIVNGLVQKYFGDCETLHAKGVDDTIKSLAYQETLDKLQSHFGKEIWSKKSETEQNQLKEDILRLYLRFLNGEQSKEEKASAKAVKEPEIDYYKLPRLDEAIKENLKKVFKLSDVTLKYLYHPSDIDMYPVSKTEKDVEIGGYKSTVKLLESPQPPSKGWKNPMAMRTLHELRHLLNYLLKIGKIDKETKVVVEMARELNDANKRKAIEAWQKDKEKENQEYALAISELYQITTPSEDDFNRFKSAVEQLVEKEKSTEFLKKYTDFIDTFLIKKNKKSKEQQEENKDEIEENNSTDFLMYLIITRDEFTKLLLDQPVGTGKILNVAKDFKNKRNAIKEMLTKYRLWKEQKFQCFYTGQIIPFTELFSPNYQIEHTIPRSVSFDSELKNLTVCDATYNNQVKNNKFPSECPNYNVSAKCQTVKGRILCPPIIASVDRMIKPKVDELTKRIENLKAVAKQIQSWETDKKNANIRLRHYLQFELDYWEKKLLTFTVKKDEWKDKWKNSQLVDTQIISKYARAYLKTVFEKVDVQKGTTTDTFKKIYQIKGDDQKDRSKHSHHAVDAAILTLIPGSARREAILQEYYKAEENHQKFHTKPYLNYQTSHLLDIEKNVIINHIPHDKTLTETKKKDKKGGNVVNLRDKKTGKFILDDDNKPIPKIMSGDTIRGRINEESFLGAINPPIYIANKAKKENGKWITRADINGKQEIWIVKRIPIVSINFEKDIIIDEKLKEHLQKQIKNGISTSELKDLNNKPIRHIRCRVKTGRGFQSREKTIELKRHSHQSDKEYKQNVLSKIADNFLCLLYQSEGKPVKRQVRIISLFHFRDLGFNTIADIWNKKDRYNNNWNSCKTDNCEIPLYKIIKQGTRTLFYDKEKAELKKLSASNLHKRLFVVYKFNEVLTGNKYYYYTYFKNRIEARPNPDIDKECEDKFSPKKYQSGLCLTPENMTCLFEGIDFEMNLDGTITFNRSEL

SEQ ID NO: 6213 - protein, 1092 aa, unidentified
  REGION 1..1092: note = Description of Unknown: Cas Enzyme sequence
MSKRLIQVDSASSPDLRWRLSLDMGTNSIGWAALDISDPGRPAILDMGVRIFSDGREPQKGTPLNEGRRDARMMRRQRDRRIRRKQAMLAFLIANGLMPPEVEKRREAALLDPYQLRSEALERDLQPFEVGRIMMQFALRRGFKSNRKEKAEGDTEREGMLGGIRVLESALKGLTLGQWLYRREQQGNPVRFVARMERNKAIYPFYPSREMYEAEFEAIRKRQEPRYQDLNWDRLHRLIFCQRPLKRPERGKCTFYPDEDRGYRAFPSAQRFRILQELHNLAYYNEENRQVEIPWERKLHLFQALDTQKSLTFDRVRKILGPGYTGSFNLEDKRRDKLNGNETSVEFRKAEYFGPGWDNLDLKTQDEIVEELILEEDEGKLTEYLGRFGLSEAQIKKLSGYHFPVGTVSLSSKFMIDCSKRMREEGLPYAEAVVQMGLHHSNKEQRPIEKSLPYYGKVLTSLVTGARGESTSGSMEERYGHIANPTVHIALNQVRKLVNTLLLRFGNPSEVILELARELKLSREQKKEISQEQTRNQKENERIRGELAGLGRLQPAHDDIRKYKLWEELGTDRTTRCCPYCGRNINDSDLLHGDIEIEHIIPYSRSLLGSMDNLTVAHRRCNQEKGNRSPFEAFGNDAERWEKIENAIAKLPPNKRRKFSPDAMKRFNEKEGGFLAKQLTDTAYLSRAAKDYLAAICDRNAIWVSPGRLTATLRGLWSFNTLLNRYHDTWFKNRSDHRHHAIDALVIGLCDRSLVNEAARVNSGRGYVDMAAPPCPIARKDLEERLKGMVVSYKPDHGREGKLYAETAMAKHSYIEEIAPDDLGEGEVGRVIPRSIQVDIAALVNAEGFRKTKQIIKGKYKFLRVFRDKWVTRAPLESLSERDIPNVADPLIRAKLQEFIAEQGGTVSPEILAEFGRVHKVYTIRYFPKDQVPVPIGSCNNKAYMPGDFYRVDIWRVPLKKKPRYEGVFISRPEAALQALHGGEAVLLRKPHPAAKLVLQLCKNDTIELAGKGSRELCRIAGFSTTNNKIDIQPLYASNTIAAWMKDTHTSLTSTFWPYDGKKQYYKSINLLFTEYDIRLVKISVDGRLFYR

SEQ ID NO: 6214 - protein, 1061 aa, unidentified
  REGION 1..1061: note = Description of Unknown: Cas Enzyme sequence
FYSLYSKLNLNAILKEYNYISDYMIAEYEIKSINSKALQNEYREDKNKRSEIKKQLKIRNIDNAKFPYQLHFSELKIILEVVSKFYPNIDKDKIINLFRDRIPYFIGPLRRNNGQLWKLVKKDSNKFLTLENYRQIVDFEKTNQNFILNMTSKCSILTDQKALPKNSLLYTRYLVLNFINGLNKGLLSDKEKEDVFNLFKNKKSIKITDIKEVLNINKNDKLVGLDDDNVKNGAVDYYYTYIDFKNIIGYFNDDPLANTIEYQFVEECILNLTVLENFNDGIETLKRKYDQLNLSNEQYKSIAALKYQGWGKFSKKFLEYENFEDEYGERSSIIERLYCYKNNVGKNLTLNEILYQKVNNTNQTLEEFLKLSNVPQKIDIQTLVDDQYASPKLKKALLETYKLVKELVDIIGMEPEKIFIESTRTVGKKNERTPSRKDEINKMMKEIQQKDEYYQLIKKLKDELENRFNINSTLGKKQFLYFTQLGKDLYDNNKNTNTIDIEKLDTDYEIDHILPYSKSFDDSLNNMVLTKKENNQKKGNHNLHAILKPNDETRAFWKYLLDKGFISERKYYNLNFHNEITDGETLGFLGRQLTATSQAAKASYTILKSIYKNTDVYLNKAEWVSGLRNIIEVYKSRTLNNYHHAQDAYLNILIGDLHDKYFTREYTIAKYKPEAQSQFIRELSIRETEDIHDEKLRILKYILRKACKEKEIDNQSFYSYIKKQIHRDNFIISRKSSINNGDFFDSTLVKYKEVKNVEKIDGIQVKFIKNNKRYGAYKGMTCAFIFLYSSTDSKNKETISFCPLPLHYYSSQYLQLKKEDQRADKLKQIEIEFLKKFKPNESNYKIILPIVKPKTILKINDVEFLYSAAALNDNRITLSNYNELIFSSVEMNNYIHDIEQKIYEKHNNTIINKKILESQDEEFAITKTRKLTKNKNKEVFEQLVHILESNKYCCNDKNSKYLTWYNSIREINFDDKTCIQQAYIILELIALLKENNQTRKFSLKNSEEEGNDSCTFSSIRIPYDNLQKNIINLTLIKKSITGLYDNRIKILENKKIVCSEQ

SEQ ID NO: 6215 - protein, 1658 aa, unidentified
  REGION 1..1658: note = Description of Unknown: Cas Enzyme sequence
MSKQQLISPVAIDLGAKNTGAYFAHYPAGSALDQVDKDGKVYQLDSTGYTYLMANRTAARHQRRGYDRRQMAKRLFKLLWCKHFNLAWNERVQQAIGFLLNRRGFSFLAEEYEAEVLAQFPREAFDELPDNLKIQPSDNGDYDFAAALTEWVNEGEAKVESMYESINEDPKRVRARLFTISQTEKLRDYCSHRKAGNQIPKEKRATLSRLSKWVLEAWASDGVQGLPATPAENTVDLVAYLNSQSAATAEKILRSLPGENDLAQEKNELDKSNWQFKTEKFKLDEADFGDAENPDVKTHLHHLAFALHKVHGELQSGGRHRSKYFEEVRNVLEKKDHSHDYLKGFCGNLQSGRFHGLTVDRLSNLLGHISNLELKPLRKYFNDKRHKGGDYWDESRITRLVERWMLREWRVGEKDKDKADGGRWSYLELKNRWNKHSGSIVDFWLETPPEYTIPPYQDNNNRRPPRCQSLLLNVDFLNRKYADWREWLGELKEVESVRRHLDDYEAQLESLESGKGKRYFSDQRAGKSLTDSGRRSMAELSARVLQFIFDRVKAEDGLNLNEIYSHAKKIRQDRHKRDDESVKAVKQAKENLAAAIEDSALPQGLTAAPDYGRDDLFPAGGFLHLICKYYKLRQRARDGRIFIHPAYRYTEESGYKNTGRFDDKDHLLTYCNHKPRQKRYQMLGDLAGVLQVSPHELERIAGEHARETTDETTDDQLFNWLRSVNGLRANCERAAKEQKERRGRLKLDIRAVFGLIHYRKQAESPSKKEVKSILRASKVTDAQKLHDFCERAKQVCCALTESLYSDSEQSAWQNELDNNPATAVYLLAQINNIAFKERTGNANTCAVCSADNAHRMQMVAAADGKDTVARAQRLPAIPTRLIDGAVMRMARIVGGAIARDKWEKVAAELAAGKHVCVPIITESNQFEFEPSKDELVKSQRTKPRKGKPLARGGEDKIAASKDERIRAAGYGVCPYTGEGVPEGAGDKDHIIPRSSAWGTLNDEANLIWASERGNQEVKKDREFSLANLNDRYKSAVFGEKSDAQIKDWIVEQLGDGAGEDFKFGKYRSFVNLNPEQQTAFRHALFLKGDPLRDKVINTIDNKNRAFVNGTQRYFAEVLANTLHKLAKAMGKERLLSFDYFGVEAKPNSAGDSIYDLRKLHEEFDGQIAQYAKSGDSKQQAYSHLIDAQLAFVIVADAHRGEGGLKLRIDDGVGKEPYNEQTGEVGDGILAAVRVSDDDFEVKSLSRRKAYEVETHHRELLGSGNKNAVHISYQIHRSNLIAEKFMPLIRLENGEVRKGFSVKNSVDYKGEDFEMLEGLLCASEANQNVWLVKKSDALNFLMDAGRNGVDAAGLKVAKLLDDLVYQTIKKPVSSVLTPPRSKEPQTVSDALENWDECIKEKEFKKGGVLLPVFGEWNKLKAELENADPEQPLQAFLRSSAMFVDLHGSNIRSHNKRRKVYSLPVKANYGNIRLQRRAWSGQNVIQTAAEESIAKYGIDSKQWLHTVLSRNSIPAKHYAGIPETLRPAPREWKEIPAESIVAHNGSGDVEILAGKVKHQDAGRCRVMLQVDDLQKLSLPQDKMNWKGKVFRHKSVATLEERVENEKGDNHHCLSSEWRWFSAPFKLPESRNDVTVKSIGGVYDVEFTVQKTAEIKRWLLS

SEQ ID NO: 6216 - protein, 1127 aa, unidentified
  REGION 1..1127: note = Description of Unknown: Cas Enzyme sequence
MKNSTNFSFDVGMTSLGVAVNEDGEIVFGDVLLMHPEAGAVKEQSERRRLFRTRESHKAREAALESLWRSTGREPLRRKRFERTKDANGKKRFVKTAADERLEREFPRKGDDTVYASSLLRVMLLEGKPLADWQIYKALHAAIQRRGYDSHVPWKTRADEREKSAKDENPEEQVGRFDKALRNMTSDARYHLPAYYDAWKMGLWDAQTKQVAHVRQPKRSAKKKKDRARGYNPSRELVTREVCRLLEQAAEQIPQLKERLTEDKRNHLLYGKPHNTGDLRYPSFSKVDGILGQKYPRFENRIVSDCALINRLHVCKSEKPLAIEVGFLLRLVNWRYEKKGVGEKKTAHSLSGQKIFDIFHGCESAWKKKSRKYAPAEYAKCFKLTPSKVAKMADELGGSVKEGHAEIPASEHTGRSRFSQPALHLMKSLILSDKTPKGFGDEMSRLVDAMEKENPGAKFGYQIFPDVPYKYFREDFEFLDKMGDSRDAIYVPDISLAERYEGKDGDVDSAVQKVINTCNWPELRHRLGVFDRELEILTAKFGKPDAVHLEFVREDFLSKKRKNEYTARAEAGKRARQTAVDELKQRNMAAGNKNILRYRLYEEQNKQCVYTGAPIDIGMLESYEIDHIFPREDGGPDAYYNKVLTSRETNNQQKGKRLPCECDFINWSAFGTRVKGLPLLGKNKKKLLLASTRDEAEELVEKYTGLSGTAHIARLARDIACLRYGWQPGASGEEQRVFVFSGGLTSKVAKKYGLYEALGDGSMKYQKDRTDHRHHALDAMVISYLRQWTRDKNKTEFFRFPKGIDADYFRLALSKVYPHYITRVKPAIAEQPKSRRKMNKKEFKNLSKDPDERGQWYTNKSESGKGTAQHGYIFYKDAKGKVCAKTVHAFRSPYAAMKEVEKKSDEILGLLHPGKSVFLPGETQVTGTKLGGNARLKFGEYEIVRLQKDTVIRSVEPRLEQPEGDGSTSNRYRIARTKLAKIAVCNELMRGDSFDLNEFSVSREQNLTGNYRVDNSARDLANCVIVNTDTGEMTEAHLFKLVQHLDKAREDDALEKGDVIAIGSAHATYIREAKADDLPRQKLPSGHYLIKGFRNNGYSTELVAQDGTVYRLQSNQLDRFAIDRPES

SEQ ID NO: 6217 - protein, 1066 aa, unidentified
  REGION 1..1066: note = Description of Unknown: Cas Enzyme sequence
MAKKILGIDLGTNSLGWAVLEVNKAGTDEHMQLLDKGVVLFDEGVIIEKGSEKSKAAERTGYRMARRKNFRRKLRKYETLKVLSRHKMVPLSLDEVVAWRKSYFKNYPDNPSFRDWLRTDDKMHKNPYYLRAKAVNEKLAPMELGRVFYHLAQRRGFLSNRLERGTENETGKVKQSIAEISKRIEASGAKSLGEYFWQLYQKDRNLPENKIRDHYLGRKEHYEKEFELICQVQDLPEDLCRALRRAIFFQRPLKSQKELVGKCVFEPRKPRIPASHPLFEEFRMWTFLNNIKVKFQTGADSEEGFRFLTDEEKQKLIRILESAPSKKAITFDKLAKALIPDGFPKKTTKMAYYKDPEASTAHMVFNYPMDFSVSTSPVRALFRKYIGDDWEDRIFEYEVIRPNGIKEHRTADYEDIWHVMFSFDDEEKLQAYFTEKLGFDEETAKHFVNFVLPDGYASLSHKAISLILPFLKQGFTYDKAVLLAKIPDIIGRDVWEVPENREKIMAKLEEIFSRNTYEQKLHSAINSVLYDITKNKIYGSEAQESMLRSALIEKFGQRRYKELDENEGLFAAAWQLLQERLKADKIEERFIKQKTIEEKMKEYLLETFFRYSDLLKSYEQERDEYKKKALAEQLKNIRRAVDSLYHPSMVNIYPRPPLSKDGKRYLASPIIDSIKNPVMMRSMHMLRKLVNELIRKDIVDADTTVHIELARDLNDANRRYAIRQWQKKREEENKKYADEIRKVFQEQGITREPSADDIRRYRLWKEQGEISIYTGESIPLYDLFDGTKYDFEHTVPRSVSYDNSLANLTIAESFVNRRIKRNKLPSQLNYNDEEVSVTFDEIKKRLEPWQQKIRELRSRIEKNKSATRRATTKEQRDNLIRKRRLDELELDYWQRKVNNFLVEDVDSGFKAAQLNDTRIVTRYARAYLNSVFRTVHTVHGGMVAAFRRLWGFQEEDAKKDRGNHIHHAIDAVFIAAMTRDLYNRLAEALRKQEEGLKNEAKDLIQSMKPWPTFTEDMKRLHETTLIYHDFRDILPKHTRKKWRKRGIIQYHPPQKELPDYLRELID

SEQ ID NO: 6218 - protein, 1450 aa, unidentified
  REGION 1..1450: note = Description of Unknown: Cas Enzyme sequence
MRKNILGLDLGTNSIGWAVIEQDFNNKEGKIKGLGSRVIPMSQDILGKFESGQTVSQTAERTQYRGVRRLYQRENLRRDRLHRVLNILNFLPQHYQQNIDFEKRKGQFTKETKLDYKKNDNGKYKFIFKKSFLEMVEDFKKDGHTEKLPYDWTLYYLRQKALKQPISKEELAWILLNFNQKRGYYQLRGEEEEEKEGKEKTFEILQVAEVKETDEKTKDGKQLYEIYFSNGWKYDKLTTKPEDWIGKSKEFIVTHTTKKDGDVKRTFKQVDSEKDWIAIKKKTENDIEKSGKYVSEYIYDHLLKDPKQKIRGKLIKTIERKFYKKELSEILEKQKEFHPELTDQNLLEKSLVELYPHNEGHRNQLKNKDLKHLLMEDIIFYQRPLKSQKSLISECPYEKIEFPKKEKDPETGEMKPVTAKKGVKVISKSHPLFQEFRLWQFLHNLKIHQRELKEMDRIRIDVDITDKLLSDEQDWENLYNYLKDKKEISQKDIINFLVKQQKIDKMEKNNFRWNYPEDKKYPAMPTRAGFLSRLKKVKDVNPQTFLTPQREEQLWHMVYSIQDKMEFKKALETFADKNNIDKESFVSAFEKHPPYDSQYGAYSKKAIKKLLPLMRLGSYWDASAVTPEAKERVASVKERLEAIDYDPKRLEEISDDEIPRAVAKSFLKMKGQNMLKGLQTHQATYATYGRHSELGDIQHWQTPQDIENYLKQFKQHSLRNPIVEQIVMETLRTVKDIWQYYGNGKPGFFDEIHVELARELKNPADVRKRLSQKNAENERTNQRIKALLKELTQEGAQPQSPSHLEILKIYEQDVVNNSKDNLPKYIEDIQKNNNPSKTDIERYKLWLEQKYISPYTGKPIPLSKLFSTDYQIEHIIPQSRYFDNSMSNKVISESAVNLDKSNKTAYEYIKEKGGSIIDGHKLLDLKAYEAHCQKYFKHNKRKLKNLLSEDIPEAFLERQINDTRYISKVIKGLLSNIVREEGENAETAKKLIPVTGSITSKLKHDWGLHDKWNEIILPRFKRLNELTKTTDFTYLNQNGIEVPKIPDYITGKVNKKRIDHRHHALDALVIAATTRNHINYLNALNNNKVKHNLQPQLLIQNEHGHYTKTFQMPWANFPVETYKALTNTVASFKQNLRVINKATNKYWKWVKQEDGSFKKQLVKQTKGEHWAIRKPLHKETVYGKLGNIKTPKKKIATAVKTDLSAISNQKHVDKIVDKQIREVIIPNHLKNYTDIDGKIDFTAAFSPEGVDELNKNLTQLNNGKKHQPIYKVKMYEIGQRFPLSENPESPKSKKYVEAAKGTNLFFNVYWDEKKQKRNFETIPLKEVIEHQKQVAHLPKEERTAAPVNPALGELLFTLSPNDLVYVPEENEEINNIDFANLSPKQKKRVYKMVSSTGNRAFFIPSNVAQSIYNKKEFSVLNKVELTDNKISIKDKAIKLKTDRLGNLSRY

SEQ ID NO: 6219 - protein, 1112 aa, unidentified
  REGION 1..1112: note = Description of Unknown: Cas Enzyme sequence
MKRILAVDLGITSFGYAILEKTGVENQYSCLDNSVVMRDSPYNERGESSQHERSSQRSLRRLIEKRKKRIRCVAKKFEEFGLLSYSDAMAINDPDNNPIKNRWELRAVEAWKRPLTAEELFAVFAHMAKHRGYKSIATDDLLHELELELGLVEKNVDDEKKADEKRQIYAALGRLEQLKEAYKSETIAQVIHRAVQEGKFRSYRNHDDYEKMIRREDIEEEIEKIIAIQRDLGGLSLSDEKAGELIDELQICITDQEMPTIDPNLFGKCTFYPDEFAAPKYSYLYDLFRLYKKLADLRIDHYEVTAEDRKRVIQWVEERIAKGKNLKKLTHKDIRKILGLADHQKIFGQEDERTVKKGSKEPRTFVPFFFISDLAKYKSLFSSILCRENGYILMKEIAEIIQQAKTPQESYEKIKNLLEKEGIDVSDKTKEIVELFKNKKPGTLELSHRYILEALPHFLEGMNEKEVQEYLGVGNKEDYSSYPKSLSYLHLREGNLFEKEENPINNHAVKSLASWALGLIADLSWRFGPFDEIVIESARDTLPEKIRKEIEKAMKSREKDLDEIIKKYKEQFPTIDKRLARKIQLWESQMQLDLYTGKTINLTHLLDGSADIEHIVPRTLGGLSTGYNTIVALKDSNAQKGNRLPGDWLAGDTDYRNRVEMLFEKGLIDWKKRKNLLAESLDEIYTETFDTKGLRATSYLEALVAQVLKRFYPFPDPDARRHGAAVRMIPGKTTSKARNLLQIKSKSRETNWHHAEDAMILAVISRGWQNRLHRMLRDNYGKSEEELKKLWEDLIPHVEGLSIADYVREAYERFMSKGEESLFYRDMYGGIRSVSYWVNKKPLSASSHKDTVYSARHELPTLRKNILEMFASLDVVKNRHKLRAEEFMKLYDEKIRQKLWLYHIGNHNDESFRAVEHRASQIAETLTKYQLMDAQNDKEIDERFQQELKELISSPIEVDGKLLRKMRFVYDKLNAIKIDRGLVETDKDKNMLGIVITSGEKGKLSIERMDVNNAAALRQNSSGMLVYLNEMIFLFNKKGLIHYGCLRSYVESSKKIALFNPRFPANPKAQPPKFSTGSKIKQVSVGSATGVIKVHLDFDGRAARKVMRFLAL

SEQ ID NO: 6220 - protein, 1014 aa, unidentified
  REGION 1..1014: note = Description of Unknown: Cas Enzyme sequence
MDKKILSLDLGITSFGYAVLKQEDNNSYSCLDNSVIMRDAPYDKDGKSKQTSRREQASQRSLGEKRKQRIREVAKTFDTFGVLSYDECMQVQQENKIIDKWKLRAEDALQRVLTPQELFAIMAHMAKHRGYKSIATEDLLYELGLELGLIEEQEEEEDNNADEKRQVYAALGRLKRLKETYKADTIAQVIHKAVKEGKFRSYRNHDDYEKMVRREDIEHEIEMIIKRQCELGAFSFNGEKCLQFIESLHEAITDQVMPENDESLFGQCSYYTEEKAAPRYSYLYDLYRLYKTLADLKIDHYELTQEDREKIVGFVVQKIAKGKNLKQVYYKDIRKILGLSDEQKLYGKDDKVIIKGKSSERTLIKFFFLSEIGKFPTLMQKILSRREALSIFAQLAETVRFHKTPKPTLAGLHELLESYGLEVEDREILALIKGKSAGTLSISHRFIMDALPHFSEGKDESTVKEILGISTFEDYSAYPKSLKYLHLGRDNLFEKTQNNINNHAVKSLASWALQNIADLSWRYGSFNEIIIESARDALPQSIKDAIDKSMREREKEINKIMESYIKEFPSIDRKMARKIKLLESQKFIDIYSGDVINISDLFEGRADIEHVVPRSLGGLSTDYNLIIAHRDTNMQKSNRLPMDWLDGDTEYVKRVEMLFAEHKINWKKRKNLLATSLDEIYVEVQDTKALRATSYLESLVSEVLKMHYPFPNEEHRKNGVAVRNIPGKTTSKTRSWLGIKSKSRDTNFHHAEDALILATLTRGWQNRLHRMLKENYGKSKEELKELWKKYTPHIEGMAIDDYIKESYERFMSKGEESIWYRDMFGSIRSVSYWVSKKPLSASSHKDTVYSSRHRDPNDPDKVVPTVRKSILGAFSGLDVLKKRHKWNKEEFLKVYDKEIRQKLWLHRLGNTNDPVYRAIEERANAIGDLIETYIYKDPQHDKEVDEVYQEEIRLLLQKPIIAAEKPVYKTAFVDDTFSPIEIERGNGNKVLVRTDDNFLAVMFEKGEKEKLNIG

SEQ ID NO: 6221 - protein, 1273 aa, unidentified
  REGION 1..1273: note = Description of Unknown: Cas Enzyme sequence
PYDWTLYFLRKKALKEKISKEELAWGLLKFNQKRGYYQLRGEEEGQEDGKIKTFEVLKVEKVVDSGETIKGKGDKLYDIYFTNGWKYDKQTTKPELWEGKTKEFIVTTTIKKDGEPKRTYKTVDSEKDWVAIKAKTEQELEKYIGDDYENKSVGTFIYEKLLENPHQKIRGKLIKTIERKYYKKELQAILDMQMKHHPELQDIELYKASVRELYPRNEAHQSALLLQKDTFKHLFVDDIIFYQRPLKSQKGNIGGCQYEKRPQKDKEGNLLVDDNGKPILKQVKVASKSNPLFQEFRLWQWLHNLKIYANEKQVDGKLKVDVDVTAELLPTEKDWVDLFDFLTTKKEIDLAGFLKYFSDKKLIEKQKKDNFTHRWNYPEDKKYPVYETRSSILSRLKKVEGLKNPNEFLTKEIERHLWHIIYSVSDALEFEKALGSFADKYQLNRKSFVENFKKIPPYKSDYASYSEKAIKKLLPLMRMGKYWKENDIPQPVKDRIQSIMERVEALNLPENPTRKQINEAFEKYQVTDDDIPRQIVKSFIPFVKTNPLKGLNTYQAGYAVYGRHSESGDLQYWKTPQDIDNYLFNFKQHSLRNPIVEQVVLETLRTVRDIWNYYGKGKEKFFDEIHLELGRELKNPAEKRKKISQKNAENERANQRIRALLNEMTGEGAKPYSPSHQEILKIYENDVVTSMELPEDIEKIRKNNKPSAKDIQKYKLWLEQKYVSPYTGKPISLSDLFTEKYQIEHIIPQSRYFDNSMNNKVICESAVNELKSNQTAYEFIKDKGGTRIDLGNGKTVDIFSFEKYQTHCNQYFKKNKQKLKNLLTDEIPEGFINRQMNDSRYISKLVKSLLSNIVREEGEQEPTVKGLLPVTGAITSKLKQDWGLNDKWNELILPRFKRLNELTQTQDFTYLNEQGVEVPTVPDELRPGFSKKRIDHRHHALDAIVIASCTRKHIQYINSLNNEKEKYDLQASLMLKNKEGDYTKHFRLPWQSFPVDVKNVLQKTIVSFKKNTRVLTKTNNKYWKYTQQKDGSYKKELVKQSGDNRAIRKPLHKETVFGKLKWKAPTGKIYAATRVSLVGFKEKQISSITDKGIQKILINHLKQDKYQNQTDEKGKKVAPEILAFSPEGIEDLNKNIQALNGDKPHHPIYKVRKYEQSSKFPVSENPNSPKNKKYVEAAKGTNLFFNIYLNKKGERVYETVPLNEVITHQKWRADLPKEEQESIPMVPIKNVIKGKEVEFLFSLSPNDLVYVPTDEEIENPDLVDFENLNEQQI

SEQ ID NO: 6222 - protein, 1266 aa, unidentified
  REGION 1..1266: note = Description of Unknown: Cas Enzyme sequence
MKLSISLDMGAKNNGVFIVKTDGNKIVDKKAFTVVVDNKFINFSKKSRRENRHRVRNYQRRKLAKKFLWEFLDKSSFSSSQIELINGLLNNRGYTFLSTSSEFEELQDESVEFINEYLQQLKNLKTKEDFEAFVSEFSLEELEKIINEITTKIDSELKKKKDEFYNNYKTYFPTIKKDLKSIKELFNDILKEIKTGSKPRIKYLQEIEEEIKEFDFIENKREFFNLIGNISNLQLRVLRKFFDGAKRKKDNYELLKDYFKLFHWNYNDKEKEQRNRLFKELENYSSLKEFLKNCDPTLTIPPYEDMNNRNTYKCNSLLINPKYITNSLKESIDILSKQKEFEVLELENLDYNQKLQRIFDISYKIINKHIHPRNVFKFELENSNISYYKSLLKDNFNEFSSFAKKFYNLEQKATNGIHTDGLLIKCNKNTPSKNNFKHILLKPLYEYDFTNEEVEEFYKKIKETKGLQTHLKRVTDVAKDYQNSFYHYIEACYESSKCLNDKRVKDIVKSLDSDLKSFQKIFNELQIKTYLNKIEKIEKENLKRVLNIFKQTFEILFKDINGFSKTCKNCTIENNFRSSGDIAVAKRLLSDVAKPIDGIMDFMLDRIAFEIVEQIDTIEENVDIILEQNRFLFEDNLASIKGKKPKKREAKDILNLNICPYTGESITPNNGEYDHILPQSKELFNSKANLIYCSSSGNRKKSNKRYYLENLNNKHLKEVFKTDSLDEIKKFIKENIKKIDENKFTNFSNLPLKEQIALRYALFLNEDTKEFKKAYNLIKKDRLKTITNGTQKRLARLIYQKLTKKFNKEFDCNVEVKDNLLISATRKELSYNKTTGEINEIWKDKKQDTHSHTIDAMVAFYLANANLKGSSYKTPTYSFNDIYLKNSGIINVVKRQTFINAKDISSYKLFQDTIYSENYHHISKSDKNIDTLIKYSLLYQNIKNKKHFIKSSDKLQEDIVYKIDTDKTSKLLFKLFENKNKNALKELKFLDKLRFNTTRVDIIKIFFDEKQTKLLEFEKIKNIPKNSLKTFKALYKLLSSNDIFDKIDDKQVLNIDKLYKLLENFFKLQHRKRGKKRHIFSLPILGQNAKYRVRRGDTIQVLGSENIATKTYIVNNQLKAIPYFSKNVLPLKIDDILKCLESENAKFIYEVDIDVKDIEELEYLQYKLTEASRLTLIIKFNKDKIDFDFNKIKAFDGAKDDYFKEFIQNFINSQKLKPYIGSIRDNLKGKATLLDNSDNAIVLQYKADITKDKKELILKNYETHNN

SEQ ID NO: 6223 - protein, 925 aa, unidentified
  REGION 1..925: note = Description of Unknown: Cas Enzyme sequence
MATTNCTNSYVLGLDIGTNSIGWSLVDPDNKKIIAVGSRIFSAGSTGDIDSGKDESNAKKRREARHQRRLLWRRRRRKKKLFALLQENGLLPPGERRTELMRQQIIAALDSQIKNELKQQGHKRVDHLVPYLLRKIGLEQQLPLFSFGRALYHLGQRRGFRSNQKQESDKEIGDVKKGIAELRHQIQAAGCRTLGQYFATLNPEDTRIRQRYTHRSMYEEEFTELWKVQAQFYPSVLDENLKKEIHHVLFFQRKLKNQKFLVGHCELEPTARRIAKADMLYQRFRYLQKVNDLTALNEKTGEIYELSDEQRHKILDHLENKGDLTFEKGLPKLLGLPKETLFNLAAIEKKLIGNKTAKQLRKIFGKKWQSLTIEEKNQVVQDVQSYEKKDALKKRARQHWGLSVNKANELANLTLEPGYGQFSRRAITILLPLLEQGISLQRAIKELYPDRLKVPVTQYLPPVNNVVLDINNPVVLRSLSQLRLIVNSIIKKYGKPEIIRIELARSLKVGKKTRQERTTINKRNRKEREAARSVIILDKELGFGDHPPHWAIEKYLLAKECNWECPYTGKPVGGLINLLAPESSFQVEHIIPRSRSMDNTFLNKTLCHHEFNIHVKGNKTPYELLHGNPNEYEKVLQRVRHFNGSCRNAKLRRFTMTPEEVEEQYENFCERQLRDTAYASRLAARYLSVLFGGRVDKDGKLRVQVSGGQLTSLLRSAWDLNRILGAPHKSRNSHRHHAIDALVTACAHPGIVQQVSKAFQKNSRGRIDYSAISPPWPGFNEQAHRKILSFHVSHAVDAPVNGPFHKETNYSKPRTITIDGREKEVVFYRKVKSDVSRLTNGEINHIVDKTVRKAIKSKIAELGSIKKINMDDPTTLPRMPSKKGLGPVIKKVRLWKPISVESIGGGTNKRYVALENNHHIEIFAV

SEQ ID NO: 6224 - protein, 1450 aa, unidentified
  REGION 1..1450: note = Description of Unknown: Cas Enzyme sequence
MKKNILGLDLGTNSIGWAVIEQDFNNKQGKIVGIGSRIIPMSQEILGKFESGQSVSQTAERTDFRSKRRLYQRKNLRRERLHRVLNILDFLPEHYKDKIDFTNKKGQFNQEVKIDYKKNKSGKYEFIFKDSFLEMVEDFKKDGKTEILPYDWTIYYLRQKALKQPISKEELAWILLNFNQKRGYYQLRGEEEEEKEGKEKTFEVLQVAEVKETDEKSKDGKTLYEIYFSNGWKYDKLTTKPEDWIGKTKEFIVTHTQKKNGSIKLSFKQVDSEQDWIAIKKKTENDIENSGKHVSEYIYDHLLKDPKQKIRGKLIKTIERKFYKKELASILEKQKEFHPELTNQNLLEKSLLELYPHNEGHRNQLKNKDFKHLFLEDIIFYQRPLKSQKSLISECPFEKIEFYKREKDSETGEIKMVPTSKGIKVISKSHPLFQEFRLWQFLHNLKIHQRELKEMDRVRIDVDVTEKLLAKEEDWEKLYNYLKDRKEVSQKNIVDFLIKERKIDKMEKSNYRWNYPEDKKYPAMPTRAGFLSRLKKVKDVNPASFLTPEREEELWHLVYSIQDKIEFKKALKKFAKKNSIDIESFVTAFEKHPPYDSQYGAFSKKAIKKLLPLMRVGSYWHEEDITPEAKERIESIKERLEAINFDPERLEEISDDEIPKAVAKSFLKMKNKNMLKGLQTHQATYATYGRHSELGDIQHWKSPADIENYIQNFKQHSLRNPIVEQTVIEALKTVKDIWQHYGDGQADFFDEIHVELARELKNPADVRKKISQKNAENERTNKRIKALLKELIQEGAQPQSPNHLEILKIYEEDVINSEKDRLPKEIEEIRKNNSPTQSQIEKYKLWLEQKYISPYTGKPIPLSKLFSTEYQIEHIIPQSRYFDNSMNNKVICESAVNLDKSNKTAYEYIKEKGGSIVDGHKLLDLKAYESHCQKYFKNNKRKLKNLLSEDIPESFIERQLNDTRYISKIIKGLLSNIVREEGENAETAKKLIPVTGSITSKLKHDWGLNDKWNEIILPRFKRLNELTNTHDFTYLNQNGIEVPKIPDYISGKINKKRIDHRHHALDALVVAATTRNHINYLNALNNDKIKHELQPQLLIKNEQGHYTKTFQMPWKNFPTEASSALKNTVASFKQNLRVINKATNKYWKWVEQEDGSYKKQQVPQTKGEHWAIRKPLHKETVYGKLDNIKTPKNKIATAVKTDLSAISNQKHVAKIVDKQIREVIIPNHLKNYTDENGKIDFATAFSPEGIEQLNKNLTQLNNGKPHQPIYKVKMYEIGQRFPLSDNPESPKHKKYVEAAQGTNLFFNVYWNEKKQKRNYETVPLKEVIEHQKQVAHLPKEERTPAPVNPELGDWLFSLSPNDLVYVPNEDENINNIDFNNLTAEQKKRIYKMVSSTGNRCFFIPVNIAQAIYNKHEFSVLNKIELTDDKISIKEKAIKLKTDRLGNIKRY

SEQ ID NO: 6225 - protein, 1461 aa, unidentified
  REGION 1..1461: note = Description of Unknown: Cas Enzyme sequence
MKKILGLDLGTNSIGWALVEHDFEQKEGKIIDAGSRIIPMSQDILGKFDSGQSISQTAERTNYRGVRRLYQRENLRRERLHRVLNILNFLPQHYKNAIDFDKKLGQFKYEVKINYKKIENRKYEFLFKDAFNEMIKNFKEKHPELFYIKKNGEETKIPYDWTIYYLRKKALTKKIEKEELAWIILNFNQKRGYYQLRGEEEEVDENKEKTFEILKVKEVVETDAVIKKSGDKLYDVIFENGWKYDKPIAKPENWLGKTKEFIVTTSVTKSGEIKRTFKNVDSEKDWIAIKKKTEQDLETYLQEGENRSVGTFIYDTLLKTPNQKIRGRLIKTIERKFYKEELIKILKKQIEFHNELNINTAKGKELYILALNELYKHNEAHKNNIRQRGFNHLFVEDIIFYQRPLKSQKSNIGGCQYEYRVFKKEIKNSVTGETHSEIIKQPVRAISKSHPLFQEFRLWQFIHNLRIYQKEKTIEGRTRIDVDVTSELFKSENDFVKLFDFLRSKKEIKQSQLINFLSKEKFIDKEQKDNFRWNYVEDKTYPVCETRAQIISRLEKTDNFNIIDITDETILKLWHIIYSVKDKIQYKKALEHFADKNSFNKDSFVKAFEKFPPFKSDYAAYSEKAIKKLLPLMRLGKYWNETEISPEIKQRINDIIERLNNINYDRNKIETVSDDDIPKQILKSFIPFKDKNSFSGLNTYQAAYAVYGRHSEVADILKWESPDDIDSYLQKFKQHSLRNPIVEQVVTETLRTVRDIWKEYGKFDEIHIELGRELKNPAEKRKSMTQRNIENENTNYRIKQILKELMNEGVEQVKDYSPSHQEILKIYEEGIYQNPDAEFKNISLDEIEKIRKNPKPSKNDIIRYKLWLKQGYVSPYTGEIIPLNRLFTSDYQIEHIIPQSRYFDNSLSNKVICESEVNLLKGNQTAYEFIKDKGGSKVDLGQGKSVLLFTMEKYEKHCRRYFIKNKIKLKKLLAEDIPESFIERQINDTRYISKFVKSLLSNIVRAENEQSETSKNLIPVSGAITSQLKQDWGLNDKWNEIILPRFERLNKLTGTNNFTYLNEKGHLVPTVPDELQKGFNKKRIDHRHHALDAIVIACTTRQHIQYLNSLNNEKEKYELQPKLLIKNKEGHYTKNFQFPWSSFPIDVKKSLDNIIISFKQNLRVINKATNYYQKWVIDENGNYKKKTVKQEGVNWAIRKPLHKEMVYGKVHFDVPKNKVATAIRTDLTEIKSRKHLDKITDKGIIKILENHLKNYTDENGKEDFEGAFSPNGIEEMNKNIIQLNNGRKHQPIYKVRLFEIGSKFPLSENENSPKSKKYVEAAKGTNLYFAVYETADKKGNKKRNFVTIPLNEVIEHQKQVANLPKEERTPVPVDQSKGKLLFTLSPNDLVYVPTDEELENIDLIDFTDLSVVQKKRVYKMVSTTGGECHFVPNRNANEIVKNENGTNSKEQRMQQFFDDSI

SEQ ID NO: 6226 - protein, 1086 aa, unidentified
  REGION 1..1086: note = Description of Unknown: Cas Enzyme sequence
MTWRLGIDLGTNSLGWAALCLVPESEDFVPCGLMDSGSRIFSDGRNPKDKQSNAANRREPRSARKNRDRYLRRRTRLMRELIEFGLMPKTPEERKALEGGKNVPLIESDPWILRARALDEKITPHQLGRAIFHLHQRRGFKSNRKTDRADKESGKVYDAIKKTKAALKEQDARTLGELFGRPRLEAAKHNETAPKGKRRAQPLARVRKSGKGAKWQYKYYPTRALILDEFDQIWNSQRQYQPGILTDEARKDLRDTIEWQHKLKSPPVGKCTLIPQEERAAKALPSSQRARILQEVNALRITPAGQAKLALADEQRGMIVASLLNPTNKTAKRTFEQFRKMKLFSRYDRFNTESKKRKDLTGDETAARLVQKDRWGPDWFDLDLATQDKIVDRLINEEEEDKLVAWLCDTHGLAREQALRVADCPLVAGHGNLSKLALDRILPYLETGLIYSDAVVAAGFESHSQFGAGEVFDKELSYYGEILERSVAFGTGEPNDMHEKRLGKIANPTVHVALNQLRAVVNDLMARFGPPEQIVLELARDLPLSAVGKNDLEKTQRDNQQANDKRRKQLAEEFGKPDSYDNRMRLRLYEELEALGKRCVYTGEQIGAHNLFSPEVEIEHILPFSRTFDDGFSNKTLSMRRANRDKGNKTPFEAFESLDGYDWEQISLRAAELSPAKRWRFAPDAMERFDEFEGGFLARQLTDTQYISRLAKGYLEAIFGGQGHKGAKNHVWVINGRLTADLRHIWGLNSVLRGHNEPEAEAQKKNRNDHRHHAIDAIVIGCTDRAMLKRASDRAKKNDADWRNGIVAKDSLMKGTPTPWGDEGTFRTDVENSVRNIVVSHKPDHGIQGAMHNDTAYGIPKGKEGEPDKKGVRLVVTRKPLDSDSFKSTNDIEKIRDHHIKMKLLEETYGLSGKEFKQALLDVASSMVPPVYKVRIEENLRVIPFKDKVGREYKAYKGDGNYCYDIWMNEKGNWTGEVISSFEAYQLSRKDPKWWQKLFGRKGQNLIMRLRKNDYLQIEHDKKVIIVQVYKFSHGRLNMSKHIEANVDARVREKELKSIQMSPGSLQKSKAKLVTVSPSGVVKIYQ

SEQ ID NO: 6227 - protein, 1044 aa, unidentified
  REGION 1..1044: note = Description of Unknown: Cas Enzyme sequence
MFKQKILGLDMGSNSIGWALLEGEDGVPTGVIDAGCRIFNKSVEEKTPTPKNVKRRDKRLSRRVIQRRSRRKKRMQNYLIKLKLLPETLLKNPQPEIILNSLGNPYLLRTKALDHKLSPYELGRVFLHLVQRRGFLSSKKTLLGDMIDDPDVLSVLAEEDDTLSDSQRKDKEETAFKQDISEFRNTIKKADCRTLGEFLAGLDHHDCKRNRSREGRHLRTDRQMYKDELNLIWKEQLKYHDILDKNVRAEIEQIIFFQRPLRLKSGRQGNCSLEPLKKRARMGRLEVQKFRYLQDINNLQYRLHGEYKWISLEKDQRKSLVDLFEHVQSSSFRKIRTALKLKGAQFNLETDVKKLNGNTTAVKIRNILPDWDEWPGDRQSALVEDLITIMKKSVLNKRLTGHWGFSLKTAVQLCLVELEPGHNNLSSKAIKKLLPFLEQGQIYSEARISAGYGYEIKKTDERDRLGPPPEIPNPIVSKGLHELRRIVNAIIAHHGKPDIIRIEMARDLEMNTQKYKKFKKQQKANTKANDEAVNKYREMRDQNPHLHLSAYPSRDEKLRYRLWKEQDGRCAYSNISIMLPTLFSSEAEIDHIIPYSLSLNDSYMNKVVCLSTENRYKGQRTPIDAFGGNKKKWNQITEAVENWPKNLRSKKDRFHFTAEDIVERDFISSQLNDTRYICKEALTYLNQLGNEVTTTKGFLVSWMRHMWGLNSLIGKTDHKERTDHRHHTLDAVVIACIDRKFHTTLVKAAKIIEQNQLELKTRKLPIPLPWETIRTDTDLVLKKLIVSHAPQKKVSGELHEETGAGFIKGLGNVYRKDLDGKFTVGKAKDIIDPEVKEIVVKHLSKFDNKPKDAFAQGETVYHKDGKTPIKRVRIIQSKTNLKKLEKRKFGVRNKQGDIFKWMPYGNLHHVEIIKNKDTETYSGVFVTMMEARRRAMTNTKRAHKKRINPESIIKINHGPETQFITALCKKDLVSITYKKGERRIYRVQKLDGPPNNRIRLRLHTAATDKNNAETLPDRESTIPALIKKKMKRINVNVLGKLLDD

SEQ ID NO: 6228 - protein, 949 aa, unidentified
  REGION 1..949: note = Description of Unknown: Cas Enzyme sequence
MRTRQRLAAQGARTLGELFGRPRLDAVKHNETTPKGSRLAQPLARVRKSGEGAKWQYDYYPTREMILDEFDQIWDAQKQYHPDIVTDEARKDLRDTIEWQHPLKSPPVGKCTFIAELQLMGYGGDGSGSDEDVEKRKKLERAPKALPSSQRSRIFQEVNALRVGALVDTKILLTLEQRDLVAASLLHPTNQKATRTFNQIRKILGLTEYDNFNTESEKRTGLTGDETAARLMHEDRWGPSWLDLDLATQDEIVTKLIDEEREEALVAYLSEVHGLDKERALRVADCPLVAGYGNLSKLALDRILPHLEEDVTVYSDAALQAGFDSHSQFGTGEVFDEALPYYGYILERSVAFGTGDPKHADEKRFGKVANPTVHVALNQIRSVINDLMKRFGPPEQIVLELARDLPLSAKGKSELESKQKENQQANERRRALLIEEFRQPDNYNNRMRLRLYEELEALGKRCVYTGEQIGAHNLFAPEVEIEHILPFSRTFDDSFSNKTLSMRHANRDKGNKTPFEAFGHSPDDYDWEEISKRADKLHGSKAWRFAPDAMERYEKEEGGFLARQLTDTQYISRLAKAYVAAIYGGDGHKGYRNNVWVITGRLTADLRWNWGLDSVLRGHNEEISETQKKNRNDHRHHAIDAIVIACTDRSMLQRAAKQAKKQEETSDDRLLAGLKEPWGEKGEFRTDVENSVRKIVVSHKPDHGIEGAMHNDTAYGIPKGKKGRPDKKGVRTVVTRKPLDGDSFKSPKDLEKIRDDDIKLKFLEVTQGLSGKDFKTALLTAAKTMSPPVKRIRIKENLKVIPFKDRSGKDYKAYKGDGNYCYDIWVNEKGKWTGEVISSFEAYQLSRNDPKWWRKPVTRSGQKLLMRLRKNDYLQVEHDEKIMIVQVNQVTPGKVIMSEHREANVDARTRKKYEGDDPLKYIFKSPSSLQKSKAKRVTVSPSGVVKIYQ

SEQ ID NO: 6229 - protein, 948 aa, unidentified
  REGION 1..948: note = Description of Unknown: Cas Enzyme sequence
KELESLDPYDLRARALDEALPPARIGRALFHLNQRRGFKSNRKTDAGDQEAEGMKAAIEKLQAQLQGEGARTIGEWLAGRHQGAVDVRFRGKQAGNKMEWEFYPQRAMLEHEFDAIWAAQAAHHPALLTDSARERIRGIIFSQRPLQPVPAGKCTFEYDEDRAPKALPTAERMRILQELNHLHVRPAPTAELQPLTLEERDKLFRRLKTGSAMKWSAVGKALRLPDTATFNLQSEKRDALKGDETAKRLGIAKKKNIDAADLIGKQWHDLPLATQDEVVLKLLGDADDDAVCAWLMGKLNITDTQARHMAGASMAPGYARLSQKAMDKILPHLEREVITYDKACERAGYDHANPVEETGEVFNRLPRYQEIEAFNRQLAGSGDPNDPPDKRYGRYPNPTVHVGLNQLRRVVNALAEKHGVPSEIVLEIARDLKNSKKARDEIQKRQKQNQDANEQRNTKLRELGLLESGENRMLLRLWEDLNPNDPLDRRCPYTGRQISSTMLFFGEVDIDHILPWSRTLDNSAANRTVCTREANRRKGDLSPAEAVAAGKFAQDDIDRATANLPGNKKWRFAGDAMARYENTERNFLDRQLHESAWLSRLARIYLAQMCHKNHVWVVTGQLTAMLRGKWGLNSLLGAGERKHRNDHRHHAIDAAVIGAIDRGMLNRAARENARKESDAELKLDIAPPLDDFRAKVRAVVDRIIVSHKPDHGTGGQLHEETAYGIVADPEAEGGMTLVARKPVSALTKAEIKRIRNTCISRELQDLTAGASANELREILAEWSRDNNIRRLRILKKEQSFIKIDDRQTGAPYRAVIAGENHHLDVFEMPGGKLAFRVATVFDVNQPGWKAEVPEGGRLVMRLHKGDMVKIDSKSGNREVMRVQKIQPSNRTLALVPHNEAGEYQKRHDDPDDSFRWEFFGFGNFQKRRLRPVTVSPTGKVKRRRPPAK

SEQ ID NO: 6230 - protein, 1093 aa, unidentified
  REGION 1..1093: note = Description of Unknown: Cas Enzyme sequence
MVGEGNCILGVDIGATSIGWALVEEVSNRVVDCGVRIFEPGVEGDEQSIASGREESRAKKRRVARQIRRQIWRRAHRKRKLMNLLQHCGLLPQGEINDVIERIVGRYLPPKDDPRRRQTAHVVPYLLRKKALDERLAPDELGYVFYHLCQRRGFKSIRKSPQAQDEKEGKKVQAGITELERRMREADARTLGEYFSMLYPEQERIRNRYTSRRMYEEEFNLIWEAQRCYYPDILTDDLKEKIYEAMFYQRPLKSQAHLIGRCSLEPEERRAPWPLLICQRFRFLQRLNDTKVIEPNGSIRPFSPQERDKLIPELDTKGQLTFKQVRKILGFSDDYDFQSADEKKLIGNKTAAAIIKAIGKKLWEAFSSKQKEQLVSDLTRYDDEVDLKTHLMDAYGLNEQAAQNLAKVNLEQGYCAHSVKALKKLLPIMEQGTSYATAKKEAYPHAGELPVYDLLPPVLDTNPNADAKSGLTIRNPVVTRALAELRKVVNAIIKRYGKPSIIRVELARDLKRSKDIRVKRHKRILENEARRKAAEEKLKKWGLQNPSRDDVTKFLLAEECNWQCPYTGKQISMETLFGATPEFQVEHIIPFSRSLDNSFANKTLCHVSENKRKGNRTPFEAYHGTPLWDEIIHRVRKFKGPFAKAKLELFQKKEIEEDFAHRQLNDTAYAAREAAKYLALLYGGRIGKDGRLRDKHGRLRVQVSTGQVTAHIRRVLGLNTILGDDWGKNRQDHRHHAVDAIAIALSSPAMVRKLSIASQKARNEGVRSRYFRLFAPIAPPSPTFLDDVRRAINNIVVSHRVSRKVQGPLHEETFYSPPRDENGRISPDGKFVHIRKPLDQLSAKDVEGKFVTVGGKRVRLGIIDDDIRRRVKDKLTQLGETDPKKAFKDLANLPTDHRGRKIKRVRIRLHLEAIERIGNRPGEPFGKGRRERFVIPGSNHHMEIFEFIDKHGNPVWDGYVVTRLQAMRRLKNKQPIIQRTPPQQMLKEHQKKGHTFKRFVFSLAHGEIIQLSGQTKRGIKPYKGDGLYRVTTVPQSKQLVFKHINDAEPAARKEGEKTRVERKGRTAYPETLRELNCRKVVVTPLGEVRRAND

SEQ ID NO: 6231 - protein, 1039 aa, unidentified
  REGION 1..1039: note = Description of Unknown: Cas Enzyme sequence
MEDSPALLGIDIGPNSIGWALLDSEGKAIDDMGARVFEAGLADIEQDGKGKSRNVERRDARCIRRRLERTGRRLSKLARILQDAGLLPPGDVLSDEKRHQLVKRLDAQMDSPYSLRAKALDEKLKPYELGRALYHLAQRRGFLSNRKSAPKDEKEEGVVKEGIGQLRRDIDEAGARTLGEYFAKLDPHQQRIRGRYTSRKMYEDEFKMIWQEQRQYYPDLLTDDLKKAIHSAIFYQRPLKSAKHLIGGCQLENGKRRAPWALLIAQRYRYLSVLNNLTIRLPDGSERELTADERSKLIDYLEKNAELKFTTARGKKLLALPRGTKFNLEEGGEKRMLGNATAAKLRKIFGDRWDSFSEEEQDQIVEDIRSIVKDEALVKRGITKWGLDEESARKLTEVQLPDGYCRFSRKALEKLVPLLEQGKRLQTAIRELYPEKWGRGSQPLDSLPPLSQCEDPALSELRNPIVSRALTEIRRVVNGVIAKHGKPDVIRVELARDVAQPAKRRQQAWKQNRQQERARKDAAERITKEAGIEKPSRDDILKVLLADECNWECPYTGRRINITELFGEHPQFDIEHIIPFDRCLDDSYVNKTLCEANENRNIKKGKTPYEAYYGTDKWENIISRVSRFNGRDRIKQAKLRRFKMHGEELEEFLDNFTNRQLNDTRYGSKLAKKYLGLLYGGVDNDGIDASRKRRVQATIGAVTAKLRDAMGLNAVLGKGAKSRDDHRHHAVDAVVIALTSPGTIKGISDASQHPALTDVRKIKLAEPWQGFLAEVRQAVDRIVVSHRVDRRVRGPLHEETFYGKPRKDESGKSYVHTRKPLSGISAKDVDSIVDPVIRRIVQQKLSELGESDPKKAFKDAANLPLDPQGRVVRRVRLKRNLEVFPIAKEEHRRRYVVLGNNHHMEIVGVGEPDEHGEHPKWEAHVVSMFEAYQRKKNKEPIVKRDWSDETEKDGKPRKFLFSLAGGDTIELQKEEGKRELFIVRTVPQMKQVRFVPINDARRLKDIGKVGFTAYPETLRKWHCRKVAVNPIGEVHYQND

SEQ ID NO: 6232 - protein, 994 aa, unidentified
  REGION 1..994: note = Description of Unknown: Cas Enzyme sequence
VLRAAALERKLEPFELGRIMMHFSIRRGFKSGRKEQQTESSAEREGMLGGIQSLGGELQGLTLGQWLCKKREKGKSVRFKPTVEKSKIIYSFYPSREMYEGEFTAIRERQEKHYKKINWDRLHWLIFFQRPLKRPERGRCQFYNEEDRGYKAFSSAHRFRILQDINNLRYYNEENREEEIPSELKSRLFEALNSQKSLSFDRIRKLLGENYTGSFNLEDSKRDKLKGNETSVDFRKPEFFGPAWDKLGFEKQDEIVEKLMIEDDENVIRDYLKAFKLTEKQIEKLSGYNLPTGTTMLSSRFMIECSGIMLKEWLPYYAAVERMGLHHSKKEKREIRRSLPYYGKILTGQVSGARGENYGDSDEVRYGRIANPTVHIALNQLRKLVNVLIRRFGNPDQIIMEVARDLKSSKTRKDEIFREQAKNQKDNERIEKELKGLGLLQISREDRKKYKLWEELASDGLNRRCPYCGRTISAKQLMTGVVEIEHILPYSRTLLNTRDNLTVAHRECNQAKKNQSPFEAFGKSPQGFDWNLILELADKLPGKKKRKFSPDAMVRFHEEDGGFLDKQLTDTAYLSKAGKDYLSAICDSNAIWVSPGRLTARFRGFWGFNTLLNRGHDTWDKNRSDHRHHALDALVIGLCDRRIIADAARLNSGRGYREIDAPPCPVKRQDVEERLKSIIVSYKQDHGKEGKLYAETAMAKHSYLEQINPADLLEKEIYRIVPKTIQNEIAILVQREGFRKAKTTIQSKYKYLRVFRDKWVTRAPLESLSERDLPNISDPVIRDEVLEYVKDHPAQSGEKLQDVLKRFSEKKQIYSIRYFPKDQVPVCIEDSDNKAYMPSDYYRVDVWRIPQQKGKYKYEGVFVSRPLAVRQQIYGDDSISLRKPHPAAKMIMKLCKNDIIVLSKEKERELCRIAGFSTTQNKIDVRPIYASDTIAAWKRDTNINLTSAFWPSDVEGQYFKSINALFNEYKIKLVKITVDGRFMPILIGDDTQNC

SEQ ID NO: 6233 - protein, 1439 aa, unidentified
  REGION 1..1439: note = Description of Unknown: Cas Enzyme sequence
VKRILGLDLGTNSIGWAVVNEAESDEERSSITRLGVRVNPLTSEELSNFEKGKSITTNANRTLKRTMRRNLQRYKLRRENLINVLKNHDLISDECVLSENGNRTTFETYRLRAKAASDKISLEQFARVLLMINKTRGYKSSRKAKREDEGQLIDGMDIAKRLYDEKLTPGQLCLQLFEDGKRHFPDFYRSDLQLEFDKIWAKQKEFYPEILTDELSDSLHGKNEKQVWAICADRMGLIGIKRETSGEEQKKENLLWRISALSEKIDLERLIIVLQKINAEINNSSGYLGAISDRSKELFFNKIKTSDGRERAQTVGEYQMAILAKNPNASLKNMVFYRQDYLDEFNTLWETQARFHKELTDELKREIRDVVIFYQRRLKSQKGLIGFCEFECRKIEMSLDGKKKTITVGSRVIPRSSPLFQEFKIWQTLNNIVIFGKGKKSKKTKDLDLFDKIGVSTEYTEKRELDQEEKELLSKELSVRKKLTKTDILKLLFNNWQELDMNYEEIQGNLTQAALFDAYKKIIVLSGHNIDVEKKSAQETITSIRAVFNALGYDSNILDFDSEKEPDEQPMHELWHLLYSFEGDDSNTGHEKLIKKISTRYGFEREYAAILANVTFQGDYGRLSAKAIRKILPHLKDGNKYDVACDYAGYRHSASSLTREELAAKTYKDRLDILPKNSMRNPVVEKILNQMVNVVNTIVDTYGKPDEIRIELARELKKNAEERKKLTDAIAESTKAHEEYKKILSQPPFNLSYISRKDIIRYKLYEELKCNGYKTLYSNTYISPEALFSGDFDLEHIIPQARLFDDSFSNKTLELRNINSEKGSQTAYDFIKEKYGETAVEEYLTKIEHLYKQKIISKTKYNKLKMQEKDIPDGFIDRDIRDTQYIAKYAKTMLESLVKTVVSTTGSITDRLRDDWQLVDVMKELHWDKYKNLGLTEELINKDGHRICKIKDWTKRNDHRHHAMDALTVAFTKCSFVQYLNNLSARISKKCCCGYEKYGFDTEEYANWVCPDCGRRYFARKDTGTIYGIERNELYRNNGKLLFKPPITLSEFRREAKKHLENTLVSIKAKNKVITPNRNVSTKKGGTNKKIQQTPRGQLHNETIYGSQKHYAMNEETVNAKFDEAKILTVTKPAYRDALLKRLRENENNPKKAFSGKNSLGKNPIWLNALRTIKVPEKVKTASLETVYTIRKEIGPDLKIDKVIDDKIRNILEKRLKEFNGDAKKAFSDLDRNPIWQNKEKGIQIKSVTITGISNAVALHHKRDKDGNFILDKNGNTQSVDFVSTSNNHHVAIYRDADGNLQETVISFFEAVARANSGLPIIDKKYKQNEGWEFLFTMKQNEYFVFLNEKTGFDPRKIDLMNPENYALISPNLFRVQKIATRNYMFRHHLETKVSFETKEMETQLRGIAWELYQSTEKLKYIVKVRINHIGQIVSVGEY

SEQ ID NO: 6234 - protein, 1432 aa, unidentified
  REGION 1..1432: note = Description of Unknown: Cas Enzyme sequence
MKKILGLDLGTNSIGWKLVELDFEAKIGKILGGGTRVIPMDQGDLGKFDAGNSISQTAERTKYRGTRRLRERHLLRRERLHRVLNVLGFLPEHYASQIDFEKWLGQFLDETEPKIAWKKIWNEHKNKNEFEFIFQKSFCEMVDEFNKIGQNTKIPYDWTIYYLRKKALHSRIEKEELAWLILNFNQKRGYYQLRGEEEEENPNKLVEFHSLKVIDVVADKSPNGKGEIWYSFHLENGWIYKRSSKTPLFNWKDKVRDFIVTTEMDKEGNEKRSFRAPSEDDWTLLKKKTEADIESSQKTVGTYIYETLLQNPTQKIRGKLVRTIERKFYREELIAILKKQIELQPELFTEDLYNNCVRELYRNNEEHRLILSKRDFVHLFVNDIIFCQRPLRSQKSSIGNCTLEYRERKDKEGKDVKEYLKAIPKSNPLYQEFRLWQWLFNLKIYQKDDDFDATEQFITNIIDKEKLFNFLNNRKEIDQKALLKYFKLTDKTHRWNFVEDKIYPCNETGTLIRTRLAKVKNVPDNFLTPEIEQKLWHIIYSVNDPKEFERGLKTFAVKHNLDKNSFVENFKKFPPFESEYGSFSEKAIKKLLPLMRLGKYWNWKLIDDTKTQDRIDKILTGEYDETIKNRVRDKTINLKSENDFQGLQLWLAQYIVYGCPSKDKWNSVADLEKYLEKFKQHSLRNPIVEQVITETLRVVRDIWKKYGDFSEIHIELGREMKNTAEDRKRLTNMINENENTNIRIKALIMEMKDNIDVENVRPYSPVQQEKLKIYEEYAVSNMEENDEEKEFVQKISKTAQPSKSELLRYKLWLEQKYHSPYTGQIIPIGKLFTDEYQIEHIIPQSRYFDDSLNNKVICESAVNQLKDKQLGFEFIKEHHGEKVDCGQGKKVEILSEEGYQNFVKEHYAKNRTKKNNLLLEDIPDKMIERQLNDTRYISKFVSQLLSNIVREDKDDDGVNSKNLIVVNGKITTILKRDWGLNEIWNTLILPRFERMNKLTGTENFTSKNQEGHIIPAIPLELSKGFQKKRIDHRHHAMDALVIACATRDHVNLLNNQSAKSENSRYDLQHKLRNKEKKTYFDKTENKQVTRDIFTEFKKPWNNFTVDARNELERIIVSFKQNLRVINKATNKYYAYDNGKKVLKKQEKGDNWAIRKPLHRDFVFGKVNLPRIKVPSEKITVAMRRNLDTSFDLKKIETITDIGIQKILKNYLASKNNDPQLAFSSEGIEEMNNNITVYNEGKFHQPIFKVRTFEVGSRFALGEKGNKKYKYVEAAKGTNLFFAIYVDKDYNRFYETIQLNKIIDRLKQKLPAVPETNEDGYKLLFYLNPNDLVYVPKNNEVKIEKLEIDRIYRFTDSSGSIANFVPANVAKVIFDYDKDKQKKMNINYQIQNEFGVGSRGSKNEKAVTGEQIKRICLKLKVDRLGNVKLDSKE

SEQ ID NO: 6235 - protein, 917 aa, unidentified
  REGION 1..917: note = Description of Unknown: Cas Enzyme sequence
MSNKNYTIGLDIGTNSVGWAVIDENFDLVKGNKKIIEISADGNISKRKSRTNLWGARLFDEGEVAADRRLKRGMRRRIARRKKRLEYLRGIFEQEILSFDDSFFIRMDESFYQNSDDIKTVKAKYPLFNGKVGSGESFDNEVDYYKTYPTIYHLRKRLIEDESQADLRLVYLALHHIAKFRGHFTNQGQKFDLSNIDIAESLREVLYLFDEATPFTFGVANIDQAEANAILSNRRLSKSKKAFDLNGLYRIDADAVYHAENQAFLSEYENLTDRQKEKWIEQKQKQLYALFKAIVGNGIDIAAIFDKQEYKASDENDYLKASEFKYSDEDFDDKLSVLDILEEERAVIKSGKAVYEAIVLSNILTADSLSASMVEKFEQHKMQLQELKTFAKSVSLDFYAQFFKEEGLYSNYIQGTGNPSKTTPRGDFYKQVKKAFEKEFKIKFPDVDKDFDFSSADLTEEQKDFLTRLSEAIKFENYLPKQRQSDNGAIPYQVHEHELVKILENQGQYYPFLLEKVNLEEEDEEGNTEQVSEYKIQALFKFRIPYYVGTLAQEAGWTRDEKGQLIQAESPAKNSWLVRKSDEKFTPWNFSEVIDKEQSAVNFIERMTNFDTYLPTEKVLPKNSLLYQEFSIYNELIIGGWYQEGKKNYFSPELRKKIVEQLFKRNKKVSAAKMLDFLNCEFPMLHLSSPKELFGIDSFVKSPSYNTSFSSWIDLTRAGISAEQIETHPEIFEQIIKWQTIFEDKKILKKTIKNANIQEWGNLLSEEQIKQLSKKHYTGWGRLSYKLLKGIKAENGKTIIDNLKTENYRNFMRLLEDPKIDEAIKLAQLDKIDTKTLNYGLVEDLAGSPALKKGIWQSLQIVSELEQYLGRENISKIVIEMSREHGLGRTKTRQRQIEDFYKKFKEKTSEELSSQLS

SEQ ID NO: 6236 - protein, 1386 aa, unidentified
  REGION 1..1386: note = Description of Unknown: Cas Enzyme sequence
MKDKKEWYLGLDIGTSSVGFSATDTEYNILTKSGMLQCGARLFSEAQSAKTRRGFRSSRRRIARRKVRIDLLQELFSEVITRKDPVFFIRLNDSSKHIEDKVHKDKYPLFNDSNFTDKEHYKRFPTIYHLRKHLLENDTTDPRLLYLVCHHIIKYRGHFLFPTFNTQRSGDTYKEIILTINEQIGELIDDTLAFDLPDDIISIINDKSKSPAKQWFDIKEKMNPTNNKKLNAIFTIMQGNKITLSKIWSDVDEAEKEAKEELREFKFSSEKYEECLAVAETILNDDQLGFLAQLKTFYDLVRLDRVMMGAGSISEAMVARYNEHKADLKLLKTFIKKFLPDEYNKMFRLNTDYKERGFAHASYVNYIGTNLHNKKTVSHFVMCIKKGEEPMTADYESFLKYTDDVLEKASENAKATEEYKLLKEKIENKTLCKIHNTQDNSVIPHQINETELQDILERQKYNFPFLQNSDEDGCVANKIISLLTFRIPYYVGPLSEKDKGKFAWIEKNKGYEKTQVLPWNFAKVVDTATSGERFITRMTAKCTYLKSEDVIPQQSLLYQKYMLLQDLNNLKINGDRISQEVKLFLFNGVCQKKTSLSKKVIKDTLLMTGKIDKTDTVGKETENDTAFNSSLSSLIKFKAILGDNVDITMCEDIIKWHTVFGDEKAPVLHKIKGCYGDKLTEEQIAKLGKLNFKGWGRFSRKFLDGITTTDKSIGETALTIIKVLENTTLNLMEVLNSDNFHPKYLDIVAMENSGGGDVKVDYSLVEGLYCSPLVKRSIWQAVLISKELAKINGSKPKKVFLEVTRGEDKKQKGKMKSSRRKQIEELFTKAVKAGEDLTTLLKEFNNKADEKEFRSDRLYFYFTQLGKCMYSGERINLEELNNVNLYDIDHIYPQSKIKDDSLTNRVLVKRIDNANKSATYPVDQNIQIKMKPFWDMILSKELISKEKHNRLTCKQPLSEEIISGFLNRQLVTTNQAVKESASALKQLFGEDTKVVYSKASLVSEFRHNNELVKCREVNNLHHAHDAYLNIVVGNVWDSIFGQYWNTNITFNEENALDRLFTKNREGIWQEKYIQKIKEYLYNNKNYLGKYPVTYRPFEKKGEFYDQTIHPKGRGQYELHKGYSTQKYGGYKNAINACNCVIEYDGKTGRRIRGIFPVPIRFVGRYVNEELALAIAQEHNIADKNPFLILPKIQMFSVLEIDGVRYHMRSGDLQCSVTTEWYPNQEIINIIHDIVKYQKLLKDKELTADLNTMEDITFATRERNKHQKESKKITRENNLKVFDAIIEQVKKPFYVNYSFAKKVKDGKIDRLKFKELKTYEQIEQLLSLLNLITMNGTISNASKIGGVTNEHTKYMAGSITKDISSHRICLITQSVTGLFEKKIDLNS

SEQ ID NO: 6237 - protein, 1400 aa, unidentified
  REGION 1..1400: note = Description of Unknown: Cas Enzyme sequence
MKAKEWYLGLDIGTNSVGFSATDTEYNILTKSGMLQCGARLFDEAQTAEKRRGFRSVRRRIARCKVRLNLLYQLFKEVIEPIDPMFFIRLNERNKDPHIKMKKSNYPLFNDSTFTDREYYGNFPTIYHLRKHLLENDITDPRLLYLACHHIIKYRGHFLYHNFKTDRTHDTYDTYIDKISQINENIHEHINDTLSFTIPDNLKGIINDKSKSSSILWDEIRNKLNPQDKVLKAIFTAMRGNKIPLDKIWEDLEDVVKENNEILTNLKFSSKDYEECLAFAKSILNLSVEQLDFLALLREFFDLVRLDRVMMGEIYISYAMVKRYDEHKDDLDNLKEFVKKYIPNEYDKMFRGNEESFAQATYTNYIGSNLHRKKVVSHCEICVKNGEDPTTAKNYKSFLEYTRNLIDKVDDKVKGTDDYKNLIFKIEKETLCQIHNTSDNSIVPYQLNEKELVDILERQKGNFVFLQNTDDDGSITEKIVKLLTFRIPYYVGPLSEKHKGKFAWIVKKNGYENAKVLPWNFEKVVDKAACGESFIRRMTAKCTYLKSEDVIPKQSLLYQKFMLLQDLNNLKVNNDRISQEMKMLLYKGICQKKINLSKKAIKDYLVEIRQIDTADTVGKETENDKAFNSSLSSLIKFRGILGDNIDESMCENIILWHTVFGDEKEQVILKITTQYGWLTAEQIDKLSRLSFKGWARFSSKFLSGITTSKCSNHEEKGLTIIKLLEETTSNLMEILNSDNYLPKFLDIVKEENAYSKDIEINYNFVDALYCSPSVKRSIWQAILISKELTKINGNAPKKVFIEVTRKKDKKLKGKMKSSRRKQIDKLLTKALKTARALTSFTLQDKKAIKDDFNGKQNEKEFRSDKLYLYFTQLGRCMYTGETIVLDDLYNNSIYDIDHIYPKSKIKDDSLTNRVLVKRVINKDKDNIYPIDPKIQKAQSSFWKMLRDKKLICDEKYKRLVCKEPLTDDIIGSFINRQLVSTNQAVKETANALGILFGDATKVIYCKASHVSDFRHTYELVKCREVNNLHHAHDAYLNIVVGNVWNGVHEQYWNKNITFNEDHALDKLFKTSLSGVWRVSYIGKIKDYLFNNKKYLNKYIVTSRPKNSTQEKHKGAFYEQTIHPKGKGQFEIHEGYDTAKYGGYKAGFAAYNCVIEYDNEKGKRIRGIFTVPVRFIGRYSGDDLAQKVAQENGIAERTPKLIISKIPISSVLEIDGIRYQMNSGKLDCPAVVEWYPDYEIITIIHDILKYKKIVANHELTVDENTFDDIPFGNLARNKHQREGKLISRENNLKVFDAILEQIKKPFYSKYSFAKKVNGGKIDFRSNFMALKTYRQVEQLINLLNFITTNKDKPNTKAIGGDANETPKYRAGGIANDISSHSVYLITQSVTGLFEKKIDLNS

SEQ ID NO: 6238 - protein, 1036 aa, unidentified
  REGION 1..1036: note = Description of Unknown: Cas Enzyme sequence
MSDKPTDPLIFGFDIGIASVGWCVLGERHIVDLGVRCFDKAETAKEGESLNLARRAARLMRRRLRRRAWRLTKLARLLKREGLIDGIQSMRQAATESPWRLRVEGLDRKLAPEEWAHVLYHLCKHRGFHWISRAEEKKVEEDKTGEGGKVKKGLQDTRRRMSEKNYRSAAEMVLNEFPDAQRNKQGEYSKALSRVLLAEELALLFQRQREYGNLHATPELEMRIAGCGDRKSGLFWEQKPPLSGKDLLKMLGHCTFEKSEYRAPKASFTAERHVWLTRLNNLRLVIDGDIRPLNEAERRIALPLPYQQASELTYKQLKTALVKAGLLSENTKFTGLSYPTQQAEGKTKDPESERLVKLPAWQELRKTLKEKGLETEWHGIAGAATGGQPELFDQIAWVLSVYKDGDEVERELRKLGLPGGEKMIEALSEISFDKFHNLSLKALRKIVPHMETGLRYDEACKEAGYHHSQVFKAGEGQQKYLPPFYSGRDKDGRMVFDGKEDIPRNPVVLRSLNQARKVLNALVRRYGSPSAVHIEMARDLSRPMDERNKVKRAQEEFRDKNEKAKADFEAEFNMPAKSREFEKYLLYREQGSKCAYSLKPLDLDRVLHDPGYAEVDHALPYSRSYDDSKNNKVLVLVSENRDKGNRTPYEYLTSFAGGENGERWRNFVAYVEGNKSYRQAKRSRLLRKNFGKEESGEFRERNLNDTRYICKFFKNYVERYLQLAEGSDSKRCVVLSGQLTAFLRARWGLTKVRGDSDRHHALDAAVVAACNHALVKRLSDYSRRKELEQARNVIDAETGEILDLVLLSKLEQHFPKPWEYFREELLLRLNTDGPDLLKSEAERYGYPPEVLENLRPLFVSRAPQRRNGGAAHKDTIYSQPERLKSTGSVTQKVPLTSLTLKDVDNLIDPHRNEKLYAAIRARLEAHNGKGDKAFPPDNPLRKPDRDGNPTGPVVRTVTMVIDKLSGIPVRGGIAKNDTMLRVDVFRHKKDQKYHLVPVYVHHAIAKKLPNRAIVAFKDEDDWTVIDEGNFDFCFSL

SEQ ID NO: 6239 - protein, 1123 aa, unidentified
  REGION 1..1123: note = Description of Unknown: Cas Enzyme sequence
MPYLLGIDTGVASLGAAVINVNVDNNGDVLILQDQEPQLFVRIFPSVTGSTIKKLSEGKDEAKDADNYIRRAKRLQRRQVARRRRRAAKLFHLLQQRGLLPTGPSKTPLERDAIIKHLDKKLLEKYLPTSGNGRRTMLPELVTLNIINRNVPYILRALALKRELQPFELGRALYHLVQRRGFKSNRKVKEKLFDDENKDEKKKDEEEKEHGKVKESIKELREQLGGLTLGQFFASCNPDRSGRLVRNRNTGKTKKRAELAKNSPPHYTARDLYEDEFNQIWTAQLSFNSQRPHPILNLPFRRDIHHAIFYQRPLKSQRGKIGYCELETKCRRASAATLEFQQYRYWQKIHDLTVNGRQLTLDEKRKIAERCEQGEGVSWSEIAENVFNIKLKRGQVIFNHQRTKEDKLPVNTTAKSIRKKYPQWDSLTEEKKKQIVAILLADSPEKRIAKRLHEQLDMDNDTAAKLANVSLSSDYASYSIAALTKLLRAMQNGKTHHEALEEFYPRRNDPKRIENLLPPVKEILPYINNPSVMRSLTQLRKVVNAIIRLHNGEKPLCIRVELARILKMGRKNRAAIHDRMIENREKRRKAKIKLQENDIWQLYYGEREPKDMDVKKWMLWEECRGIDPYSGDSISLTQIFGTNPTFDVEHIYPKSLTGDSSFSNLTLCRKDYNLRKGNRTPKAAFGINPTDKIEYEAILARVKSFSADKRERFEQENVPAKFQNRMLNDASYIAKATVKYLATLYGGTVEEGFNLDGTGKRRIEVVPGSATARLRRLWGLNGILGPNAIKSPEILAEESASSHPTKFREDHRHHAIDAFVIANCSPKIIKQWADEEERRDNQRRQNKEKYRMNLLPPYVEERTFEIVEQAVTKIIVSHATRTRVSGELHPQQPVSPYEAKRMKQAKKKGIQKVQEEILKAQKKLQIAEERQDIKKIDKAKDDIQKAEEKRDKKQDKIDIGVELQPNDRSAIRRCFAKGEENHHVEVYEIQGKKGEKEWDVEKPVTLFIAYKRKKSGEPVVNPEQRPNFLFALHKGDSVKIYKDDLARKSDRGGEIFRIEGIDAIGTVKIRHHTDARPWNDIPSKEYQDKYGVPVRPSLKKMKSCLVKVDVDVLGNVILNHEIR

SEQ ID NO: 6240 - protein, 1258 aa, unidentified
  REGION 1..1258: note = Description of Unknown: Cas Enzyme sequence
RKHLLENDVTDPRLLYLACHHIVKYRGHFLFPNFNAQRSGDTYREIISSINEQICEQIDDILAFDFPENLIDIVNDKSKSPAKQWFEIKEQMNPRGNKTLNSIFTAMQGNKIPLSKIWADLEDAEKENKEDLKEFKFSSGNYDECLMVAETILTGDQLGFLSNLKTFYDLVRLDRVMLGADFISNAMVTRYNEHKADLKLLKSFIKTYLPAEYDKMFRYNSDYKDKGFLHASYVNYIGSNITHNAKNVSHFVMCIKKGEEPMTAIYDDFLKYTSTLLEKADDTAKETDIYKLLKEKIDNESLCKIHNMQDNSVVPFQINEAELRAILERQKHNFAFLQNKDSDCTVAEKVVSLLTFRIPYYVGPLSEKDKGKFAWIEKNSGYEKAKVLPWNFAKVVDTAKSGENFITRMTSKCTYLKSEDVLPKQSLLYQNYMLLQDLNNLKINGNRISQELKMLLYNGICQRKSSLSKKAIKDYLLEIRQIDKTDTVGNETENDMAFNSSLSSLIKFRGILGDNPDEAMCENIIKWHTVFGDEKAPVLRKIQESFGDKLTPSQIEKLGKLTFNGWARFSRKFLSGIFTTSKSNPEVKGLTIIKVLEETTLNLMEILNSDTFEPKFLDIVALENAGGEEVKVDYSLVDGLYCSPSVKRSIWQAILICKELAKINGKAPKKVFIEVTRGEDKKSKGKMKSSRRKRIEELLASAVKDSQDLSALMKEFDKQSDEKEFRSDRLYLYFTQLGKCMYSGEPINLSDLRDTNIYDIDHIYPQSKVKDDSLTNRVLVSRTYNAHKNDLYPIEKTIRDKMKPFWDALLRKELISKEKYSRLICSQPLSDEIIGSFINRQLVSTNQAVKETANALKQFFGDETKIVYSKAGNVSEFRHTYELVKCREVNNLHHAQDAYLNIVVGNVWDSVFGQYWSTIITFNENHALDKLFSTNREGIWQEKYISKIKDYLFDNKKYLDKYPVTKCSYEKRGEFYDQTIHPKDKGQYELHEGLCIEKYGGYKNGVASFNCVIEYDSKNGKRIRGIFLVPLRYVGRFTGADLAIKIAQENKIADNNPILIIPKIPIFSVLEIDGVRYHMRSGDLQCSVTTEWYPDREIVQIVHDIAKYRKLVKDRELTADENTRDDITFATRERNKHLQEILKISRENNLRVFDAIIQQVKKPFYVNYDFAKKVKNGKIDRDRFISLKTIEQIEQLMSLLNLITMNGFLANALKIGGVANETCKYMAKNIAKDISSHSFYLITQSVTGLFENKIDLNS

SEQ ID NO: 6241 - protein, 1724 aa, unidentified
  REGION 1..1724: note = Description of Unknown: Cas Enzyme sequence
MKKILGLDLGTNSIGWALIDVEKHNFEKTIFPKGEILGLGSRIIPMQQNEIDDFGKGVTKSATADRTEKRGVRRLYQRDNLRRERLHRVLNILGFLPEHYKNSIIWGQEEGVVEKDWKKRGQFKKDTEIKLPYKAVSEKNEGNKQKYEFIFKEAFEEMLADFKEKQPELFYKKENGEEIKIPYDWTIYYLRKKALEKQISDNELAWIILHFNTKRGYYQQRDDDEYEKQGEKKEFYQLKVVEVKQRDENIKGDGYWYDVILENGFVYRRDSKESLHNWQNTVKEFIVTTKLNPDNTEKTNKDGKIERSFKAVDSEKDWPAIKAYTEQEIDSSDKTVGAYIYDTLLKKPDQKIRGKLVRTIERKYYRKELEQMLDKQVELNPKFKDFDLYKKCITELYPLNDTRRDVLNSVKDENKFKFLFVNDIIFYHRPLKTKKSLIANCKFETRTFINKDGEKEIQAIKAIAKSNPYYQEFRIWQFIDNLKIKEREKEVDGKLKSDFDVTHLFIKTDDDKIKLFEEFNKREKIKQSQFLGLFKNTYGKRLTEKTHKWNYVEKNEYPLNETKHILTAKFKKDRDYLKFYDDNEHTLWHLFYSISGKDELKKALEKLYEKNKDTCNLPDDFVDKAIKIKSFKKDYGTLSEKAIKKILPLLRIGKYADINKFDKIELDELYKNLNSISFDRKKINEITKDESDIAKYKFLIDYEEYKGQIDRIHKRIKEIPIKEGSIDNEKIGEFADDEIIKGMLSSFVDYPENKYTGLKLHQASYAVYGKHSEAKDTEKWVKPEDIEKFLTEEFKQHSLRNPIVEKVVTETLRVVKDIWEQFGNGEEKYFSEIHVELGRDLKNTKAEKERLTDIVTGNKKTNQRIITLLRELKKANIENVRPESPHQRDKLKIFEHDILSPYTEKELKKQEVKGHGIVDIHKITNSNEPSLKEIEKYRLWLDQKYRSPFTNKTIPLSDLFTSKYEIEHVLPQARYLDNSYSNKVICETAVNKAKGKFTGYEFVIKNEGKEIELENGDKRKIVSQLEYEEFVSKNFTKGTKKHKILLSEDIPAEFTDQQKVNMQYISSEMGKLLSRIVKEQGENEVFSKNLLPVPGKATNMLKHDWGLNQVWHELIMPRFERLNTLTETKDFTYYSKKLQKELPSVPAVLKQNFDAKRIDHRHHALDALIIACTTRHHINYINNKHAKSENSRFDLKKKIAEKQYNKESSSDYKWIYKKPWDSFVVETRNSLETIIVSFKQNMRILTKATNKYISYKDENRNIRLDNNGKPKKAYTKQTKGDMRTIRQQLHEETVQGKRNIRFEKNIRLSDAVEGLISGSYFIKDKRLGKYLKNQIKNEKSKKEILAYLKKQKYKFNENDISKVDVYYFSNADNIPETEHKVAVRKELSPALFSSTEKKKASEKIKESISNTVIQQILLKHLNNYNTVNVSIFVVLDKPEILKDEKIKKDIKKLKSENKNLIEYFQKEKINKKNEVEIFISKAKMVFSEDNIIENPDLAFSPEGIEEMNNNIIELNSNKRHKPIYKVRIYTKLGNKFNVGETGNKDKKYVVTGLNPYFAIYCRTDDEKNQIRKYQTISLTTTIDRLKYKLPPVPEKLFDKKENQEYEILFYLQPNDLVYIPTVEETENPNLINFNKLADSQIKRIYKFTDGSGTTGNFVPYYVATTIFNMNKKKQQQNDIAYNIQNEFGIGSPQSKNQNTIDGEIQIKKVCLKLKVNRLGEIVGH

SEQ ID NO: 6242 - protein, 982 aa, unidentified
  REGION 1..982: note = Description of Unknown: Cas Enzyme sequence
MGQRILGLDIGIASVGWAVVNYDKEDATQNKIIKSGVRIFTQAEHPKDGSSLAMPRRLARGARRTLKRKRQRMKAIKRLFMNVFSLSHKDLFVGEIDETIYSKQGRLDVWQLRAKAINRALTSEEFARVLTHIAKRRGYKSNRKVDEKGDREGKKVLGAIENNLSLLEKYETIGQAIYETTKETGIRRNKKDDYLHSVSREMLLDEVNVIFEKQQAFKNTLAIDVLKDTYIKIAFSQRDFASVDGMVGKCTFEKDELRAAKRTYSAEEFVTLTKLINTKIILENGNERGLTKEELEKIILLCKQSEKPSYIKIKETIGLEKTSSFKNIEDYETDKETGEFLKNKTTKFVSAFKGYHELRRVVEKAFSKTHWHNFSQDTKLLNEIGTIFSIHKSDEKIKEALDALTFSMFTEEETVKLKETFINSISFDQFIYLSLKALSKLLPFMREGKRYDEAVALVGYKKELGTQQKFLRVLNKEEQNELTNPVVKRAIAQTRKVINALIREYGQFDSVHIELTREIKKSHKDRNEIKKGQEKYQKFKEKVVEDFRRLFGRDPKGAELLKFRLWKEQDGYCAYSGFMGEKAYIKPEKLIADVKYSEIDHILPYSRSLDDGLNNKVLCLAKENQDKKNMTPFEYFESISRDWYSYEVFVKSMLKNLKKVKRYRLLKKNFDENSEKEFRERNIRDTAYMARYIKSFIEDNLELTSSAKKKVVSINGTLTNMLRHNWGVGNKSRDIHLHHAVDAIIIAFATDSEVQKLSTLSARRDGFAYEKSEEKSKKFRFNPPVDEFRDEVQKSIDKIFVSNAPRRKVTGAAHKETIYSKDAEKGKGSFEVNGGLAENGEVKRVDVFKKDDKYHFVYLYPADFEKDELPNITIKSVEIDNTFEFQFSIFKDELIEIKQRNKDAFRGYFKFSESDGRFNIQFHTDSQYNKKTGRFSTGSLEYIKKYQVDVLGNIQEVKKEIRVATKKILRANKIRAIKKKSK

SEQ ID NO: 6243 - protein, 1391 aa, unidentified
  REGION 1..1391: note = Description of Unknown: Cas Enzyme sequence
MKFIYSPISVDLGAKNTGVFDYVSEDGNIICSNAFLIRIDDSFNTQQVDRRLKRHQRRNIKRNKFAKKFAAEILKYYGCNLNGVITEFKPNIKIKEYLGSIINRRGYTFLSTDEKIDEIDIETDLKVCSLLEINENDTFDDYINNITDCDYPENKLNEIIGKLNKAKEDKKLKSDEIKPFITLLNAYISSLKTGAVSRRKYLQFLKDELQQRGHLIKVTIKNYQLANLIGNISNLQLRDLRKYFNLKFDDKVDDDKILKILKKANNTKFEAKKYTSGLKCLIETDSIKTNPGYEDENHKVPRFEEQNNRRPPKCPAIRFNSKHKLFNLFSNNNLTILKNEAIKIWFNKTNALDDNIPPLDIIQMIFDANPQVGCGIRDFLNKNKNKNATIESIKTALNSNTNFQMFCQLCEDSQIKIDDLLTVAQKYSEEINFITETGSLPKDSILKICLKHPTLKKNTAGELAAHTLMLEEPVDKELFFYEVKKNKLGTAFKNIADAIKNYRSGIKYALDSPPEGKDKEIKKLNKQIEKISFFLDEFVETENYDPKPLHRDPFIISQLYHLLIEGTGGFNKNCTICSKLNFSRKMNKIRQLSRSDREFHKPFDGMVGRLIDRLAWELAKIKMESLKKNNLETDFDIEIPIIFEANSFKFSEELADKKKNKTKILKKLDLRRDRNNDVFLKKEERIKSDSKGICPYCGKTLGDDGEIDHIIPRASNLQNAEFNLIYVHSHCNREKLDRNYNFNNIHESFLKKQGFNSIKEVTRKLTIHVDNLKKREYTNELERNSDLRVLCRLGLFHPEFSSQFRWLLAGRKVASVNGTQKYLKAEFIKKLNKLLDDFGHKGNRIFSSIEVPSQRVSESRRKLCEKNLKLPKKVSGEAQSAYSHCLDATIAAFLDEPTYGGDFHSDLPTSLKIIAVTSKKKYERLASEPKAAKHFKDTLYAENFVPVIMNKLGDFFLGFTKNNSYNLPDDKIPDLLFPVLKGKDKFENWQQMKENAINELSKSNRHFQSFVIDKKCYSKYVFQQFHEKNCSENIVNSLNVANQIRYFTTKKNVASIIENKKKIKTEIKINVKKNQECGLLNPIKINLKAPFANEWKNVNKLVAQKLKNDKNVTIEKINKIFKPLFMNKPTAKLPIYKNNHERMRTIFSLPVIDSPSGAVRLKRENVFQIIGQANGLFAGINPSNLEPVLIPFYALKSKNIMPVDPANYSENCIKVGYKAPILIPDNYEIIKEAKSEVSADKGRWIMHIVFDINKLNYILPVNNTFKIKPSINLLDEFKNPKILKAEKKHKDFLERCSELSKNKKHKIWIKNIKEKNNKKFKYYMDSYKKIAKKNFPLQWKKYIPEILGIPRDLKVSIDFFNNDIIKLHYILNSTSETLKKELVSFWRENSK

SEQ ID NO: 6244 - protein, 1372 aa, unidentified
  REGION 1..1372: note = Description of Unknown: Cas Enzyme sequence
MKKILGLDLGTTSIGWAYVNEAETNEEKSSIVKLGVRVIPLSSDEETDFMKGKATSINADRTLKRGARRNLDRYQERRDALIEILKDNGFISDDILLNEDGKNTTFNTYESRAKAAKKIISKEEFAKVLLMINKKRGYKSSRKAKSEEEGSAIDGMLVAKYIYDNGLTPGQYVYQLLRDKKKYIPDFYRSDLQSELSQIWEFQKQFHANILTEEFFEQISGKGKMATSKIFLGKYEIYTAENKGKRDDVKLQSYKWRAEATTIELSREELAYVVVEINNNINASSGYLGAISDRSKELYFNKQTVGEYFYSQLEENPHARLKNQVFYRQDYLDEFEAVWEMQRSLRAQSNLDTDLDLFNAELKKEIRDVIIFYQRRLKSQKHLISNCEFEKYHKVIPKSSPLFQEFKIWQIINNIELKDINTRTVYKNESIEQEVKDNLFQELNIRVKMTDKEILKILVENPDDFKLNYKELEGNRTNAALYEAYQKILEFEGEELSFSKMSADEINDRISSKFLDLGINVDILIFNADLKENEYHKQDILQLWHLLYSFEGDNTKTGDEKLIKALNTKYGFKPEYARLIANAILQGDYGSLSSKAIRKIMPYLKEGNRFDIACGYAKYNHSSSLTKEERATRVLKDAMNLLPKNSLRNPVVEKILNQLVNVVNAIIIDENLGKPDEIRIELARELKKSAKEREDMTRNINKATADHEKIRVLLQNDFGITKVTRNDIIRYKLWRELECNGFKTIYTNAYVSKEKLFSKEFDIEHIIPKARLFDDSFSNKTITIRQVNIDKSNETAYDYLKETQNEADFNQYLARIEKLYKSKNISKTKYNKLMMKLSEIPEGFIERDLRNSQYIAKKAKEMLEEVVRTVNTSTGIITDRLRSDWQLINIMKELNLPKYEKLGLLETIEGKNGKPETRIKDWTKRNDHRHHAMDALTVAFTSYSHVQYLNNLHARTDKKSSIFAIENKYLHRNEKNKLVFNAPMPLHEFRIESKKHLENILISFKAKNKVVTRNKNKSKLKGKDNYNTKIELTPRGQLHKETVYGKIERYKTKPEKVGSKFDLTKIKQVAKQSYREALLTRLIEFGSDPKKAFAGKNAPSKNPVFVDEAKTIELPEKVKLVWKETDYTKRVEINSDNFKTEKNIEKVIDVGIKSILLNRLAEYNGDSKKAFVNLEENPIWLNKDKGISIKRVTISGVSNAEALHHKKDHNGTLILDAKGNKQPTDFVSTGNNHHVAIYRDAKGKLQEEVVSFYEAVHRVNEGIPIINKNKEGLEFLFTMKQNEYFVFPSDNFKPNEIDMLNPKNTNLISPYLFRVQKIATTNYMFRHHLETTVEDKKELKDVSYKNIRSANGVQDIIKVRINHLGQIVKIGE

SEQ ID NO: 6245 - protein, 1034 aa, unidentified
  REGION 1..1034: note = Description of Unknown: Cas Enzyme sequence
MEGTVLGLDLGVTSVGWALIQAEFDEDGRQTGENGILAMGVRIFEAGMDMTRGLSSRNVERRQARAARRMHQRRRKRKMKLRRILQEAKLLPDTEEQFAAVIALDPYELRAHALDQPLKPHELGRVFMHLGQRRGFKSNRKSERDAEHGKLLEQITALQQEMKECESRTLGEHLHKLREWNAAELLTGDFRLRKRHTSRAMYEQEFDLIWETQSQWVEQLRTPGLKERVREAIFFQRDFEVTDERRQKVLEYAKKARRARGLPDDRGIRRANLWRAPDVGKCPFEPDQPRCPKHDWVAQQFRIYKEVNNLRVIPADGSADRKLTENERKLIVQLLSTTREQKFQKLREKLKLERDRFNLEIGGREKIGGNTVEAAIASAFGKSTWRKMSDSKRDHIRKLVLEHPDEFELIEKLEAEGLSRDKAQKLATLQTGGALMRLSKKAMQKMLPFLEQGMDEYEAMQACGYEVKDDRRQVDKLPPTPDLPNPLVRRALVETRKVVNAILREYGRPTRIVVEMARDMTLVGKRREEHLRNQRALEKERDEAREYLRESFGLEYPSRSDIERYRLWKEQDGVCPYTGLAIDQSRLLSPDFEVDHILPRWRSMDDSYMNKVLVSAAANREKGDRTPYEWLHKDEARYRKVLGLVERSSMPPRKRQRFKLEELNESEAPERLLNDTRYMTREAVKYLNQLYPEEERVGEKSVGTSKGMMSAKLRYAWGIDNLVGHAQGGVGKARDDLRHHAIDALVTALTTRSRLKKFADYWRRTEPNYVSAKNMDVVFDTPWEEFRSDVIDKVDGINVSHRPQRKIRGALHEETFYGRTEEENEFVYTVPIESLTPSQLQSVRNPATRALIEQRLYEKGWQGGKTKFPKDWCEEALRFPSGQRLRKVRVLKALGNTVPFEDKDTGEVFRIAKLGGNHHLEVIRKEGTSGPDGLRFEAVSRWEAAHRARRLGISPYRMDHGDGWHTEMVLHRGDSVLMWDEDLKEDVLCVVQKFSTVPNVDVVLKHSNDGRSGKESGENPQFRLRSARAWYGTR

SEQ ID NO: 6246 - protein, 424 aa, unidentified
  REGION 1..424: note = Description of Unknown: Cas Enzyme sequence
MKRILGLDLGTNSIGWALVEIDHQNEIVKIRGLGSRILPMNADEINDFESKGKIKSTAAQRTEKRGPRRLNERYLLRRDRLHLVLNLLNALPEHYKLKIDFTNEKGEKCGKFKANTEPKLAYLPKQKGEKAEFLFKDSYQEMLDELKIDNKKGKRIPYDWTLYYLRQKALKEEISLEELAWVLLSYNQKRGYEKTEVEDKATKNEIIEELDLQVKSVNQKFDEKGNSFFEIQLDGNDAIVYNEKSDIQFTHVGDIKEVIRVSKVDEKGNIDNSKTQYKIVDIYPLKIINIDYKKEDGKHKYTLTYKNGWKEEKQTKNYTFRYKNALNKSFDYIVETVYDSQGNFKPIQGKERKLREPDFSESSNDWTLLKKKTEKEALIFNINHGYKNNDAHKRNIRQVWRIKKYLNNVLKHCIRRTKIIKDLY

SEQ ID NO: 6247 - protein, 1368 aa, unidentified
  REGION 1..1368: note = Description of Unknown: Cas Enzyme sequence
LYPKNKNHQRSLLKNKNAIQHLLVEDVLLYQRPLKSKKSEIANCKYEVRYWKDVLDKETGEVKIKQKSIYHKVVSSSHPYFQEFRIWDKIHNLKLIQLEKEVGGKIKTNQDVTKEYFKTKADYQNLFEKLNNQKSLTQEQFLKYCKEIFGIPYSKKESNFVWNFPEDEELKGNETRVSFATRFKRSGFTDYSKFLIQEKEIELWHYLYSVSYKERKANDNKSAKTFFNRFFEGSNVNEEIKEKIIKDFITFPKFNSKYCAYSEKALKKLLPFIRMKESQFVGKFDISENQADLQSIGFDGKRISELLKKSAKKGKELESYKQLLYYRLWQHSVNERIDEILDRLSKVDFTDDEVDLSQVIENKPIDGKLPYPKGLFNAFKGFKKVDDFIHLNLTQASYLVYGRHSELAQAKYWISPDDIRKELHQELKQHSLNNPVAEKVLLEMMHIVADIWEYFGKGTKNFFSEIHLEVGRELKKSAKEKERITNNQKANKAQNKRIRQVLEEFLIRNPYNANPKNSDHFERLKIVEEGAEHTKNTDKEFFKDKQYSKKDIEDILKKPSISQADFEKYKLWIEQGYRSPYSGRIIKLTELFDGTKYNIDHVFPQASITNNSLSNKVVCELALNQLKSDRTARAFIQAQKGKSYLGIPVCSEDKFVELVKTQFSGTKRFILLSNDIPKGFTNSQLNNARHIARKAMELLSHIVREPGEVEFRSKNVLPVTGMVTTELKRAWKLDEVWRELVAPRFIRMNKLTKSNLFGKERTSVSGKKYFDCNLDRSIREKDESYNIKRIDHRHHALDALIVALCTEDHVNYINNINANARSKNYGKQKMIEEYRKTLKKKIMFSKPKKDSPKENDWYYLLPGEMRQKNAKNSRKDSILSKSYFYKDLDTFNNDYKKMILTALQHTIVTFKQNLRVINKTVNRYNNTPNKKEFVKQEAEKAGNKYNWAIRRSLGKGTYYGRIDIGERINKQLFKNAGFFYENTDAIVDEYLKSKLQEIKSKSLSFKDFEIKLKENFENITIKCIAYKVASRFNSDLNESFNREKIKTISDKGIQKILINHLKQFDTVEMRFEEAHRYFDYILEKQEMEALLKNDENSFKVIEDLTNYLRLNDFKYKKTDFSKLNVFVEQVNDKDFRNDERFKDKINEHPEIAFTLEMIKEMNKSENLKKLNDGKNHKPIFKMRTYTGFGNERRISVNKSSVKYKQFIKVDKGTNFYIAIYEIENKLEISRKSPIRIFKEINLFDLIEFQKSTKTFDLPIEDNIFSENGEKYNFLFTLTQNDIVKVNTKDDELIYAFNRFTGGDIYFRPINHASEIEKYEVDLKIDLKTGKLRGSQTNETTSINGVQIKNICQKLKVDRLGNIDRFEEY

SEQ ID NO: 6248 - protein, 1477 aa, unidentified
  REGION 1..1477: note = Description of Unknown: Cas Enzyme sequence
MENNILGLDLGTNSIGWSLINRDFSGNYKNVLGQGKIIGMGSRIIPMSQDMLDKFGKGQSISQTAERTRYRSVRRLRQRHLLRRERLHRVLNIIDALPEHYRNAIDFKEKKGQFIQDKEVKISYRINENGNHEFIFKESFLEMLNDFREKSPEYFYNKSLKLPYDWTIYYLRKKALREKISLQELTWIILNFNQKRGYYQLRGENEEEQNKSVEFHALKVINVTANEPNTKNEIWYNIELENGWVYKRKSEIPLNDWAGKIKEFIVTTQLNKDGTIKTDKKGKEQRSFKAVDSEKDWIAIKKSTEEKIEESRLYVGEYIYQTLLNNPAQKIRGKLIRTIERYFYKNELKAILERQKEFHDELKNTDLLNKCINELYPKNYAQQNVLKSQDFTYLIIEDIVFYQRPLKSKKSLIDECRFESRTYIDENGEKQTRPIKVIPKSHPIFQEFRLWQFIQNLRIIERRKLINGKIETDIDVTSEYLPDYEAKIKLFDLFNDREKINQKQFLSLFKNDNGKKLTVENFRWNYVEDKEYPLNETRAAFVNRFSKHKGFDWKTFMNKEIEEKLWHLVYSISDKHEFEKAIKKSQVTSTLPDEIKNELVKMKPFKKDYGAFSAKAIKKLLPLMRMGKYWLYDNIDQKTKQRISKIFNGEVDESINKRVREKSINLENENDFQGLPLWLASYIVYNVHSETTETTIWKTPDDIDKYLMAFKQYSLRNPVVEQIVTETLRVVRDIWKYYGNGKERYFNEIHVELGREMKNPADERKRITKGVTQNQKTNQRINAILSELKNQDIEGVIPYSPNQLEKLRIFEQDVLNRYSEKELKAEIYDGVSIAEISKSATPSRAEIEKYSLWLEQKYRSPYTGQVIPLSKLFTTEYEIEHIIPQARYFDNSQGNKVICESEVNRFKDKMTAFEMISNHPGRMVTLGKGKHVTLFTLSEYQDFVSKNFKKGTKKYKLLLSEDVPDQFIERQLNDTRYISKLVKGLLSNIVREEGELEATSKNLIPVTGNITNILKRDWGLNDKWNEIIAPRFQRLNKITGTDEFGYYDTDNWGKRFFRITVPDDLKKNFSKKRIDHRHHAMDALIIACATRDHVGLLNNEYAKSDNKRYDLNRKLRNFKQINKNGKAIEIPANFLHPWQGFPVNAKNAIEEIVVSFKQNIRVITKTKNYYQKWVKENGHLKKKLVVQEGRNLAVRKPLHKETYFGKIEKAGKSYSVVRKEPDSTFNSKKIEDSVCDKDIKNILSNHLNNYNEVDINGKIKERPDLAFSGEGMEKMNNNIVSLNDGKPHKPIYKVRVKEDLGNKFRLGDTGNKTSKYVEAAKGTNLYFAIYYGLNKKGEKVRVYETIPLKTVIERLKQGWKPVHEKYIDEKNNMEYRLLFSLSPNDLVYVPDISEENEIKYTSKEVKKDRLYRMIKTSGKQCYFIQNNVAAVIKQYDRKSGYGEFGSQNKLEIIDGKIKIADHCIKVKVDRLGNVKII

SEQ ID NO: 6249 - protein, 1195 aa, unidentified
  REGION 1..1195: note = Description of Unknown: Cas Enzyme sequence
MDILGLDIGVSSVGSAWVNTENGTIRLGVGIFPEGVAKKKDGSLGAAKNQDRREKRQQRKQLGRRSDRKKQLRKKLVKWGWIPGNFVEVLKWERLNPWRLRREALERELAPTEFGRVLLHLIQRRGASWFEDVKGSPKKKEENDGEQNQKKTPKLDPKGANLKLRELMKKTKAETYGACMSILKDKRIIELKNKKDETVCIHNSIRNRNNAEGNPVFEFCADRRLLIDEFLLLWERQKSFGGSLAEQLTDNRKEELYKSKGTNTWKTQGLLFGQRNTYWDTGTLGRCDLEPTDQCCPKADMYAQEFLVLETANNIRIIPPGQYARPLNKEERAKVIQTLETQKTASASTVRTALGLGKEIALNLEHDKNKKLNTNWFKSQVVAAIGLEIWNSMDLTRQNGVNKAILKFDPKDIDDKKTLVQGCRDWWGFDENQTQAFIQAWENRPKKEARLSLSRKAIQNLLPYMRQYEGCSVTEARQYFAEDGDNGATNQQRERYSLAYNRPNKHLRQYMQKHPDLLPPPPMIANPVVRKTIHEVRRQIIEHIRQAGGVVPEQIIVELTRDAKHSAVVRDRLNDAMKKNREKRAKIKKEFPDEIANQNLTRTQERKAIDRVILCRQQKEQCAYSNLDKMEARPIDPRQAARGEGLEIDHIIPQSRGGSNSLSNKVLCYAATNRGKGNKTLREWLGEDSFARMEQRFGHWKTDRELKRKWEILHTESLSMEDYIQNQLTDTAYAATQVIQWLQQALYGGCHDGKRHIFPTTGRYTGLLRKEWGLFYSERNPDAEEKSRDDHRHHALDAVVVAFSGPERIRQLAEISQRLELAHEKGETLPREEMRIPAPKPWKDRDSFRAQVIEQVKNLVVSHRPEKQKIVGRFHKETQYGPILDENGELTDEFTQRIFIGKLNPKNHLRVPEHWDTLREKLELAKTKKEKHDIQKQMLALDDVRPGKSGVVRDRWFREELRQCLRKNGLDPDSFSNGKTDKEEDKKHFRHLIREGKICLPSGVPIRQVTLRKVFNFRAEIPRKRIDPVTGKRIVDKNPKSMRVYELQSNHHIEIRENPKGKWVGDVIPTFDAVRRVRPPKAPGQKPRPAVDRSDTKKGKFIMSLCIGETVYMKHKDSEKPGYFVVFKVDSGKSGRIHFTHHWDAGKDKADETHPARADISLSPSQLQALGAEEGKPPVKVWVSPLGKVKVLHRD

SEQ ID NO: 6250 - protein, 1045 aa, unidentified
  REGION 1..1045: note = Description of Unknown: Cas Enzyme sequence
MGKKILAIDLGITSFGFSILEEAGENSYINIDNSVIMRDAPYDKDGKSKQTSRREQVSQRSLGEKRKQRIREVAKTFDTFGVLSYDECMRVQQENKIIDKWKLRAEDALQRILTPQELFAIMAHMAKHRGYKSIATEDLLYELELELGLIEEQAEEEDNNADEKRQVYAALGRLKRLKETYKADTIAQVIHKAVEEGKFRSYRNHDDYEKMVRREDVEHEIETINKKQCELGALSFNGEKCLQFIESLHEAITDQVMPENDESLFGQCSYYTNEKAAPRYSYLYDLYRLYKTLADLKIDNYDLTQEDREKIVDFVIQKIAKGKNLKQVYYKDIRKILGLSDEHKLYGRDDKVIIKGKSSERTLIKFFFLSEIGKFPTVMEKILSHTEALSIFAQLAETVRFHKTPKPALEALDELLESYGLEIEATELLALIKGKSAGTLSISHRFIMDALPHFAEGKDESTVKEILGISTSEDYSSYPKSLKHLHLGRDNLFEKRQNSINNHAVKSLASWALQNIADLSWRYGSFDEIIIESARDALPQSIKDAIDKSMREREKEIDKIMESYKKEFPSIDRKMARKIKLLESQKFIDIYSGDVITISDLFESRADIEHIVPRSLGGLSTDYNLIIAHRDTNMQKSNRLPMDWLGGDIEYVKRVEMLFNEHKINWKKRKNLLATSLDEIYVEVQDTKALRATSYLESLVSEVLKMYYPFPNEEHRKNGVAVRNVPGKTTSKTRSWLGIKSKSPSHKDTVYSSRHRDPNDPDKVVPTVRKSILGAFSGLDILKKRHKWNKEEFLKVYDKEIRQKLWLYHLGNSNDPVYRAIEERANAIGDLIETYIYKDPQHDKAVDEVYQDEIRLLLQTPITAAEKPVYKTVFVDDTFSPIEIERGNGNKVLVRTDDNFLAVMFEKGEKEKLHISKVDVNSLHRLKQQNAMVVYLNEVIYLFNKKKIIHYGALRSFSIATRGDKNIKLFNPRFPSNPKAQPKKFSKGTSIKDVSIGSTTGVIKVQLDINGKMKSYQKFGLIPKEFEAQFLKESGYGIVEDNTDH

SEQ ID NO: 6251 - protein, 1093 aa, unidentified
  REGION 1..1093: note = Description of Unknown: Cas Enzyme sequence
IDSLFTKMLKESNLTLDYKTGLIKNFMHFTGYPNDYGVYSEKALKKLLPLLRIGKYWCKSDVEKILAHSEGKIPEKVFEKENIHGEIKDFQGLWISSACYIVYGRYAEVGDLQYWKSPYDIENFLRNEFKQHSLKNPVVEKVLVETLNVVKDIWGHFGEMDGVDEKGRPNFKKLFDRIHIELGREMKKNMKERQSENTRNNENKKTNDRIIELLKELKNENTEIKPKSKYQQDRLKILESDLLSSIEYDKDATIYKFKTTIGHITRKEIREISKKDLVKIKKSEIERYILWMEQRYQSPYTGKFIKLSNLFDRERYEIEHVFPQERVTLNAMYNKVISESEVNKEKGAKTGYQFIIDSKGEKEIHCKAHGCKARILSKEAYESLIKENFKDKRKQEILLSKDIPDSFTNSQLNNARYISKIAMKLLSNIVREEGEDSFRSKNVLPITGIITTVLKKDWKLNDVWNRLIQPRFDRLNKLTGTNLFGEVEKIEGHDVFMNRIPEEMGKDFNKKRIDHRHHAMDALTVALTSQTHVNYLNNIYSSDKKNDSKDKLVYRQQLKNKITEARKNKNGEKSRYFLPPAQIKEGSQIQEYAYIFGETASNIFWDIALEALQNTVVSFKQKNYLIRQRTNKFKKWNAETDKIEHVKQENLTHKQNYNVRQRLHEDTYYGKVKLRYVKEISIESAVDEVDNIVDKPLKKWIQKVVHSGVDKNDIVNQLKSGKNDFEHIDFNEVKVYYWETDEKGEGTNVATRFGNSLESFAEVAAEKIQAKIDSVTDTGIQEILRRHLKKYNSIEVKIIEAFQYLDLVANDAYKLALEQKLKESLFTEKIEIDGKKIVKVDVFSETLELPKEQSEKIKQNPQLAFSPDGVKELNKNIKELNGGKDHKPIYKVRLYTALGNKFSVSKESVAKNKKIVNTASGSNFYCGVYENKQGDRKFLVPTLRETVVNLKNGYLPCKPNHPDNTKEDVYSLRFVLKPSDLVYVPTAKEIKNKSKINFSNLSSDQKNRIYKFRDGSISEKGIVQFNFMPVNLASMIYKIPKDGKKYMLNIGKQLKGEVTLTTDKDKSQNTIDDNTPIKYVCWKLKVDRLGNIT

SEQ ID NO: 6252 - protein, 943 aa, unidentified
  REGION 1..943: note = Description of Unknown: Cas Enzyme sequence
DINDQKIHSDLRIFRTGDAATRRSYRSQRRNTVRSADRKRMIRRLNQHYLSTPTILGRINDPLGYRLKGLSDKISKAELASCMLHMSKHRGQRPEIGLDADHSSEVSEVLWIKRCHEAHVKSGEPYFNRDGKKKKNIDHNRTDLQAEFDQLWLTQMNHHSDLTEEIKEQYREVLFHQLSWWWPHSTTNKCPYFPSDEVVQKCDMYAQQYRLFEALANIRVDGKRLSAKDRDAALDLLKEKNLTPIRLTELVGSANHNLVAPIAKDWFEVRVASAIPLGRDNRELREKLNRLIVSISSYGSCSLDRLNRILQKQGCSGEQCARMVQAIKKALKDMPRGRLAYSRNLLTKGGLLKRMRTGENSVEAIPKLGIKEKPPKVIQLPNLPNAVANSSLREQDRLMRKCLSLVDVDDVCIGVELSRDVRQPKKVREMREARQRANERENNKIKEMVAESGLQPTGKWLERSKLWIEQGGKDLISGVDIPLPDVVSPGVTEIDHIIAQAKGGHDRNDNRMLLTSTTHHDKGDRLLRDYVGETKCKEMAEWYASPHTFVLNGCEFRVKPNKDKGKSILATKDDVEAQVWKKGDLPTTSYIESEFVSYVEAKYLPTHPKRVIRISPLMVATLRRYWGLQELLDASKDKREDHRHHVIDAIVVACLTLPQIRNRIEKALWSHKTDDMKIDPPWGTVESFREDIADCLAGLIVPHRINRKLKGPLHADTQLSCYDKSRNLFRKRQKLDKALTIRYSTARSKLDIPDVSEQEEGGHGIGGKIEGYHVRKYILQTLTDHNCIGEFYSRKKVTDLIDQGLLPRYVNIVARMNNVEEVSLRDSAGKIVGVRYYAKSDNYHAIVRDCGGKWKIEVVSRLEAAQKKRKGAIPPIKEDGVIMVLYKNSMLQIQQDVWRVAKMQNNRVSLVKHYDTTTDSTKYRNMSAKQLQESGAVLYAIEG

SEQ ID NO: 6253 - protein, 1520 aa, unidentified
  REGION 1..1520: note = Description of Unknown: Cas Enzyme sequence
KILGLDLGTNSIGWALVELCIEEKIGKILGIGSRIIPMSQDVLGNFDVGNSLSQTAERTGYRGNRRLRERHLLRRERLHRVLNVLGFLPEHYANQIDFEKRLGKFISETEPKLAYNGKEFIFKQSFNEMLEDVRKNNPEILNKKNKRGEDAKIPYDWTIYYLRKKALSQKIEKEEIAWILLNFNQKRGYYQLRGEEEEGNPNKLVEFHSLKILDVVADETPNSQGETWYSLHLENGWIYRRSSKIPLFDWKNKIRDFIVTTDLNDDGTIKTDKEGKEKRSFRAPSEDDWTLLKKKTEADIDQSKQTVGTYIYNTLLQNPSQKIRGKLVRTIERKFYKEELVAILSAQTTFYSELRNEELYNDCIRELYHNNDVHQFILSKKNFVHLFVDDIIFYQRPLRSKKSSIGNCPLEFRKYKDKGGNEITEYLRSIPKSHPLYQEFRLWQWLFNLKIYTKDTNTDDTPQFITSVADKEKLFDFLNNRKEIDQRTLLKYFKLTDKTHRWNFVEDKTYPCNETATQIKSRLKKVENIQTDFLTPENEQKLWHIIYSVTDKIEFEKALKKFAKRSQLDEVSFVENFRKFPPLKNEYGSFSEKAIKKLLPLMRLGKYWSWEAIDVKTKERISKIITGEYDTEIKNRVREKAIHLTSENDFQGLQLWLAQYIIYDRHSEANTADRWNTVADLKKYLEGFKQHSLRNPIVEQVITETLRVIKDIWMKYGNGAKNFFYEIHIELGRNMKNTADERRRLTSIVSENENTNLRMKALLMELKNNSDGKLFVENVRPYSFTQQEILKIYEDGIINSDIEIPDDILKISKTAHPKESELQRYKLWLEQKYRSPYTGQVIPLGKLFTPEYEIEHVIPQSRYFDDGLSNKVICETAINKLKDRQLGLEFIKNHHGQIVETGFGKSVTIFEEDAYRNFVKEHYAKNRSKRNKLLLEEIPDKMIERQINDTRYISKFISSVLSNIVREETNDDGINSKNVVPVNGAITSLLKQNWGLNDVWNKIIEPRFKRMYDLTMNECFWKKYKDKDGNTIIRTGVPLELSKGFQKKRIDHRHHAMDALVIACATRDHVNLLNNQFAKSEITRYDLQRKLRKFERVSYFDKKANKQVEREIPQEFLKPWDSFTVDARNILEKVVVSFKQNLRVINKITNKYESYKDEEGNLRIEKENGKPKKGLISQIKGDSWAIRKSLHKDTVFAKVALRKIKTVRLSEALKDWKMIVNKELKQEIKQLISLYGGKLNADIINKHFKDRGYYFKKVDVSKVKLYYFETENAATRKSLDTSFSEKTIKESVTDTGIQKILLNHLDTKDNKPEVAFSPEGIEEMNQNIVQLNDGKPHQPIYKVRVYEPIGNKFQVGTIGNKKNKYVEAAKGTNLFFAIYADENSNRSYETIPLNIVIERLKQGLKEVPERNEKGNPLLLHLSPNDLVYVPTEDEKDNIQLINWNNLDSEQLKRVYKMVSSSGNHCFFIRQEVAIPIVNKIEFSALNKMERSIEGIMIKEVCIKLKINRLGDICKYEYYES

SEQ ID NO: 6254 - protein, 1033 aa, unidentified
  REGION 1..1033: note = Description of Unknown: Cas Enzyme sequence
  MOD_RES 288..293: note = Any amino acid
  MOD_RES 994: note = Any amino acid
LTPEQKKIVIEECYNKSKLEYGQIRKALQLGDASDNKTKKLKRPEQVGMFVSYDNVQADETDTNFRPAITFNNVKYNQRVDKTPKEEKELAKKEKRKPNWVYEDLSYAECEKQVFVELKGFHQIKKALGKYFSKDDIHKDEQIELFDNIAYVFTIYKNDERIKEGLEERKIESDIINQLLEQDLNFSQFGHLSIKALKKILPFMEQGDRYDQACSQAGYDFRNQNGNSDKKNKLDFNRFVAGYGYEINSPVVKRSISQTFKVINAIIREYGQPEAIFVELAREMAKNXXXXXXTERGKIQKLNQENQEQNARILGYIKELGVMQPAGADIIKYKFWKEQGEECAYCFKRLGHEEVFSKHTEVDHIIPYSISFDDAKNNKVLVCQQCNQEKKNQLAYNFIESRGSEHLEKYKVWVGQKYAKNRAKKEKLLQAEVEEQGMSARNLQDTKHATTTVANYIANNLAFAESNRFKRKVFTVNGAITSYIRKRFGRNKSRETDNHHAEDALFVSIANENGMIPKIALFEKLRRGGWISKREQKVYTGQKDKILKEYLMDELIVFDEDNNRYIIKETGVVYEDKEDLDKFLNNYISENQESLDKMLDDYLQGKNDDVKNSMDKYGLKFPEPWKNFRTEIKLWFDESDPNSEANLEERNKYLPQYERDEVIKPLFVSRMSNHKITGAAHADTIKKVIEQEKKDKKGNIIKEEYFIKKVPVEKLKLKNGEIENYYNKESDTLLYNALVNKLKNGGFAKDEKFYKPKADGTPGPLVKSVKIIETTSSNLKLNKVGAAASNGSMVRIDVFSEINAKTGKKKYYFVPIYVADFKKPQLPNISTNGLDMTAKDDQGNDKYSFEFSLYAKDLVKIGSKDGLTAHPMDKDKNKDSTSVEDNDQDAQKNDTAKDITQDIKKVVATSDKPELMYYTGADISGGTIGAIAHNKQFKCRGVGIQSLEVFEKYEVDILGNVKQAPYVPRETKTLAGGRNQDIKHGTKRKQELIXKNQQQKERTIVASSFCCLANHYNQNQNWFLSTNKCMTSV

SEQ ID NO: 6255 - protein, 192 aa, unidentified
  REGION 1..192: note = Description of Unknown: Cas Enzyme sequence
  MOD_RES 171..173: note = Any amino acid
EKGGEAGELLKAVANIDKILTEKQYQTIGEYLYKEKQQQKPVQKIVDGRPVEIMQTVFLTRNKSGDYSIMYDRKHIENEVAIIFDRQRQFGNEFARQDIQDKYKQIVFSQRFFDIGPGKGSKWGWDEGSMISKMTGKCTFEKKENGFEKDEPRAPKASYTFERFVLLQKVXXXRQRARVDTRAKKDSYRRML

SEQ ID NO: 6256 - protein, 1177 aa, unidentified
  REGION 1..1177: note = Description of Unknown: Cas Enzyme sequence
ISRAWQFINTIKYYDDQGNKQPLPSEMRQALFQEKFLKKDSNFKFEEIRKLLDKKFKKPKKYNYPLNEKTKVYDTTISGMPVCKGLIDILGDKARAALNELEQYHIGNAPKIIGCYSIYDIWHVIFDFDKRVAKDEKFLEKFAIEKLGVQNKTVTRKKKPLSISPLVELKDKFLQGYGDLSLKALCKIVPFLKEGYLFNEAVVLAKIPELVDGNWQGNRDVITSALQKANQVYTEKKTIVGIVNKLIDGHKGLPNSEKFAYKEFDYTLKSDDIVEIKKASEGYFGEKSWEAAENKEQIIQEVGLLYQEYFYDSKRSYRKSPILTNVFKEVLRENNIELKGELYHHSNRENQYSKNLETDWETGERYLPIDNKTGVQILPIPLIDSIKNPMFNKSMSVLRKLVNELIKTGKIDEDTEVVVELARELNDNNKRAAIERYQKLRRDNRAKYRLFLEEFKINEKTDLNVEESLPVFELWSEQIFDNQKDEKGKEINTNAVILKEKDAVKRYELWMEQKGRCMYTGKTISITQLFSNEIDIMHTIPRSILPDNTMANMTIGFARYNRDLQKQKLPKECNNYYSEVAGWGTAIEPRLEMWKLERDKWKSLYESRVKPKGNEDEANKNKRVQEKHYFKMHFNYWKDKIERFEAEEVTDKWARRQLVDTQMVSKYAREFLKLYFKKVFVQNGAVTSDFRKLFGFQEEDEIKSRNKHTHHAIDAAVLTLIPVNSSYRVRILKEYFEALENNDKSGLEGLRRMVKPSSSFNPQLLIRKIEGTTLIVNYEKDKILNQSVKKVRKRGRIQYVKDKQGNFLLDKAGNRIIKYAKGDTVRSELFAQTYLGKIKDVERHEDGQPQRENGDWKYKKGKEEFVFVKREPIEKVKSSDKLINAIVDPVIQELVRDQRAGNPKDVQGNYIRHVRIKTTAGKEVKERINYRSKHNYKNKFYSAAGSLPYAVLLQSVQQGGKVERAMIPVASFEIAKTFKKYGSFNFIEFINEEYPKYKGWNKQLLKTGQKVLVFNSDEEFAKKENADFQVNRLYEITQFKYDGSKIMLKYHLEAQAKSDIDKKVKEVKDEILRKTESKLGISNVTENQEILDLKARRKDFEKRLYDFASRLELVAEKSNKETSNRLHEEISKYKTESSKIEIEGETPILGLSKNNWTLLFENQDFSLSILGEISMEI

SEQ ID NO: 6257 - protein, 1490 aa, unidentified
  REGION 1..1490: note = Description of Unknown: Cas Enzyme sequence
MKTVLGLDLGTNSIGWSLIEHDFEKKEGKIHGLGVRIIPMSADILGKFDAGQSHSQTAERTGYRGVRRLYQRDNLRRERLHRVLHILGFLPEHYAQHIDFEKRLGQFKEGKEIKLNYKPSADGKYEFIFQSSFNEMVADFKKHRPDLFYVKSNGKETKIPYDWTLYYLRKKALSQSLTKQELAWIILNFNQKRGYYQLRGEELDDDKDKQFVQLRVKEVIDSGEVVKGKPLFDVIFENGWKYDKQVVKTEDWIDRAKEFIVTTKTLKNGDIKRTYKAVDSEKDWAAIKAKTEQDIERSQKTVGEFIYESLLKKTTQKIRGKLVKTIERKFYKEELKKILTKQIELQPQLFTTELYQACIEELYPRNEAHQNAIKNRDFLYLFMDDIIFYQRPLKSQKSNISGCQLEQRVFYKLNKETGKKEEVKQAVKAIPKSHPLFQEFRIWQWLQSLRIYNKVDTDKGELTDVTKQLLPTDESWVALFDFLQSKKELEQSQFIKYFIDKKRINKTEKDHYRWNYVEDKKYPFAETRAQFMSRLTKVEGIDDINAFLEQKTQLGNKDNSPFVSRIEQLWHIIYSVSDINQYKSALEKFALKHNLNKESFVDNFIKFPPFKSNYGSYSKKALNKLLPLMRRGKYWNEKVISENVKQRVSEIMERVNALNLKEDYNAKELAEALANVSDDDVKKQVIKSFVPFKDKNPLQGLNTYQATYLVYGRHSEVGDIQNWKTPEDINTYLKNFKQHSLRNPIVEQVVTETLRVVRDIWKHHGKNKPNFFSEIHVELGREMKNPADKRKRISDRNTENENTNHRIRKVLKDLMNDDSIEGDVRDYSPSQQHLLKIYEEGVYQNPKVDYSKVSEEEIAKIRRSNSPTQKEIQRYRLWLEQGYISPYTGKAIPLSKLFTHEYQIEHIIPQSRYFDNSLSNKIICESAVNEDKDNKTAFEYIKNKDGSIVNGHKLLRLSEYEAHVNHYFKNNRQKLKNLLSEDIPEGFINRQINDSRYISKLVKGLLSNIVRKEDEQEATSKNLIPVTGSVTSKLKNDWGLNDKWNELILPRFERLNQLTQTNDFTTTNTNGNTIPTVPYDLLKGFSKKRIDHRHHALDALVVACCTRNHSHYLSALNAENKNYGLRDKLLIKNVQGDYTKAFQMPWQGFTTEAKNQLEKTVISFKQNLRVINKANNKFWSYKDENGNLNLDKNGKPVKKLRKQTKGDNWAIRKAMHKETVSGKYNIETPKGKIATAVRGALADIKNEKHLAKITDPQIREVILPNHLKNYVDEKGKIKFDVAFSDEGIEDLNKNIVALNNGKNHQPIRKVKFFEIGSKFSISENENSAKNKKYVEAAKGTNLFFAVYWDNKKQKRNYETVPLNEVITHQKQVAHIPKYERLPIQPNAKKGEFLFTLSPNDLVYVPTDEELNNPKAIDFSNLNKEQVSRVYKMVSSSGNQCFFIKSEVAISIWNKKEYSALNKMEKDIEGNMIKERCIKLKVDRLGNISKA

SEQ ID NO: 6258 - protein, 1125 aa, unidentified
  REGION 1..1125: note = Description of Unknown: Cas Enzyme sequence
VKQILGIHVGTEAIGWSLVRQSTSPRILSIGTRMFSSFVDYLGEGERELSNATARTQIRNARKVYLRKTQRKRAMLSFLAKNGLCPLTDKELVKWRNENKQTTLSKKMHQWFALNPYVLRAKGSQEKLSEHELGRVLYHLTQRRGKVLTNDDSTSKAKILQKGLPVANRLGIQHTQSFLKKQSLGSYLHSLLPQDGTPYHYGNHRLRNRYLTREMYQSEVETLLSVQKSHHKMITAEFKRILHGEEGNKGLLFYERPAQYKKLRGSASACMFEKEKKVMWKSHPLSEWYDIYCWLDSIRLYGKRLNHKQRESAKRVAVHFSSFMFKKVRIALNIDDLQAFNYEDTEKITLAHTVTLLSRKTAFGQKFFRFSDEDQHELWHDLHFYTDKKMLNERLKVKWGLSSIKAKTVADLKLKPGYGNVSMKAARTILRYLKEGHEANVAIIVGGVRSAIGEQRWSQIDKETREAIDYFVEAAIKENIIQDPDWLCDFSNAFGIVLRPEKLYLIEQRRQEDTFPISPEENKEIMRKFKPVAQKPIFELRKLVNQLIREYGAIDQVNFVLSNELKANAKQRKVMYVSKKIRHKELPKIHDAVVATGNNPTHTNLFKYKLWLEWNKTCPYTNAPISIEELFTDEVSVVYIHPWKRFFNDSDKNKAICMTYFKENIMDKTPYEYFSKQPSGVWERVKTRVFQQLQNGSGKHNSYQKFRHFVLATYPQDSLIQEFNDQHHIAFKVKNYLNRISPNVVAARGNAISSLRRKWGISTPSSFHNKRRYLDSREPALLALVTAINEPKYLNELRYWNRYESSQHRDVFPIPWTHFTRDALEAYATVSVSIDVNNQVVRKMPYAKPESYSLSPKGKLHKDSYFGKRKMPGEVEESFHIRKPINSLTTAKQVSKIVDHNIRELVYDQIDLSGGFINGKIPKNALISTTDTGWETKVFLPNKRGDNVPVRKVRMRENVGHAVQLNEGKNKYVNPRNNHHVMVYQAIDNTYQEEVVTFWEAVRRIRNKEPLYQLPSDGRMVITTLHSNDCFILGLNHKEIFRRLQEGESLWENVYKVQRLSSKYYEFRQVYDMDTYNQNYPSYIRILNFGNKKTGWLTNDPFKISISLLGDISPYYKSLKVPEMQ

SEQ ID NO: 6259 - protein, 1030 aa, unidentified
  REGION 1..1030: note = Description of Unknown: Cas Enzyme sequence
VTKKILGLDLGSNSLGWALLEEKDGEVCKFIDLGSRIFSKAVEEKVPTPKNVKRRDMRLGRRVLQRRARRKQRMLNYLVSLSLLPKELQGNTQPEILLNKIGDPYQLRAKALDEQLSSHEFGRVLLHFVVRRGFLSAKKQVAGDLIDDPDTIAYLEEIDKIPSNDKEEGAFKSDIAEVRNAIEESGSRTLGEYLHKHKQSECKRNRSHEGGHLRTDRKMYQDELNKIWQQQSQYFSQLPDDFMADHKGIKQIIFYQRPLKLKADRVGKCSLEPKCNRAATARLEVQRFRYLQDVNNLKYLERELDQQLSLNDEAKEKLKQYFECHPNINITTLRKELGFDKYTKFNLEMKNLKGNITTSDIRAVLKDIWDNYTAEQQRALVEDLLSIKKKSALKKRLINHWQLLAEEAVRLCLLEFEPGHSSHSLKAINKLLPHLEKGLIYSEARIAADYGYEEQEIKTQEKLGKPPETSNPIVNRGLHELRRVINAIIKHYKFTPDVIRIEMARDLEMNTKRYKDSLARQAKNKKENEKAVEVYRELKLGKYPSYDDKIKYRLWQEQNHFCPYRCKTIPLNAIFTASVEIDHILPHKKWLDDSYMNKVLCYTAENRNKGDRTPKDAWSNNEKKWNQITQLISGWKGLDSKVGRFFKTEADLLKRDFISSQLNDTRYIARLAQDYVKQLGCDVSTSKGVTTAWLRHQWGLNNLIGETDKKERTDHRHHAIDAAVIACVDRSLYQQIKTWTKNNEKKIKVNAPYPHFRDELDEHLKHIIVSHDTQRQLSGSLHEETGAGYIEKHGGLVYRKTLNLEFSVKNANSIVDETIKNQVLAHLEKHDNNPKKAFADNITVYHKDDRTPIKRVRILQSKTTLKKLEQSKLGIKDKNGEVFKWMAYGNMHHAEIIAHKETGKHKGEFITMMEAHRRAMTGTRSARKRNIVREGIIQTNHGDEWQLVMALHINDLVSVDAGNDKREFYRVQKLGGGYDITLRLHTETSTKREKEFIESKKILEDSFSNFISKHDLRLHNINAIGILSHD

SEQ ID NO: 6260 - protein, 1024 aa, unidentified
  REGION 1..1024: note = Description of Unknown: Cas Enzyme sequence
VRQILGLDLGPNSIGWSLVLEQEKNVSIDITAGGVRIFQEAVDAKTRTPKNQARRVARLTRRVIQRRAKRKRKLTNYLISIGWLPGEMMHMPEPERWFNATGNAYELRKKGLDEALSLEEFSRVMLHMCARRGFLSNRKIALIDFYNSDDPDVLSAFSDDGNDEQEYLESADLSPEDKDEQTAFEKEITDLRDDIDVARARTLGEFLASLPYHQRKRARRTDRRMYQSEFELLWKVQQEFSPEVFTVERNLACYEIIFFQRPLKLRKNRRGKCSLETSRYRCAKAKLEAQEFRLLQDINHLSYTDRTTGEWVQLSNEQKDVLCQKLESQGTMAWSAARKLLGLNNRVKFNLERSKKKLQGNITVAKLRKVDSEFWKGLGDIEKGAFVEDLLTIRNRYAAYLRLIRVWKLSKTTALSYAQLEFEPGFAHLSMKALRRLLPYMRQGQMFSEARVLSGYGYESPDADLRATLGEPPEARNPVVQKALYEVRKLVNAIIRVHGKPVAVRVEMARELKLTPKQKKQQDKQKRLNEKLNSQAADEYAVIREKNPHLNLPEWPSRDDKMRYRLWREQSELCVYTGKSIGLTELWTAEIEVDHVLPYSRTLNDSYMNKVVCAAQANRDKSNKTPYEYWGGDEGRFDEIRQRLRNYPDPKKGNIERKELDKIDDFISRQLNDTRYISRLVLGYLKTTFADVSVSTGAGTAYLRKQWGLNSILSDTGEKTRADHRHHFIDAVTVGLTNRRTYQSMAHVASRSDMDSGYERLSRLRIDAPIVGLRGKVQKIADEIFVSHAINRKLRGALHEDTFRGIHKSGYVTKRIPVDSGLKASDVARVIDPDLKKFLEGLLDEHGGNEKAAFSEPIELGGGRLLRHVKIRSAKPPKPGVYLELKNARGDVQRRAIFGNTHHVEIYRNAKGKHESRFVTTFDAARRARRKRFPIIDRLVPDDATFLFALHINDTVKITLEGKASYYRVQKFARDANALTLRCVRASTLKNSDEMLRKSITALMDQYKMCPVEVDPLGRLHQID

SEQ ID NO: 6261 - protein, 1173 aa, unidentified
  REGION 1..1173: note = Description of Unknown: Cas Enzyme sequence
MNTFKKVLGLDVGSNSIGFSLLELSEKDNEITFNELTSNSIIFSEPFDASDRRDARSSRRRNERKSARNRNARNVFIEFNIANKRFLKDSTNYLNSFKFEDNDVYNIREKAVFGAKLTKEEFVLATYSILTDRGYNNMFSISNEDGVINEAVIKNSKEYLEKDYKLPSMVLTAHRKDLEKTYQNIPIRNKKDDYHNSLDRDMHIEEFKKVVLSQANNQDIFKSVEDCESFISKITDDKYNSFYQRPLKSFEDMVEFCSFYDEFNPKGSYKKTPLANVRNIELTLRQKIDNYECIDGKTGEIKTLNKDDIDKIIDFWINRPSSKEINATNIFKSTGLKNMRLNISEQSSQIVLNIQAHRNILEVLNKYKIDFQDTQNDFYNEVLLELHYFKNHSSRVEHIYRIVKKYDLKLDENFTQELANLTNMDGFASFSLEFTNEVLEIMKIEDKMHSEALESVGYYSKYLGMPTYDYLPPLNPTRKDIEWLKENISYFDTKHLFYQPMMSPKVKRVISVLRKLINDIIKRYGKIDEIRIETAKEMNSKTEKEKIDKNQSKDRAKNKEAIELLKNHNLKESTKNIEKAKLWKEQGGECLYSGEDITMDEAFDENETEVEHFIPRSVIWINSYKNKILVKKKYNQDKGSLHPIEYLKSIGQWVNFQGRVQKVYMSFNKKDWLTKEDVIDSVMGKEHWQDSYLNDTRSATRTIQKYLNHYLYPNEILYGKGEKRSIFSVSGRAISELKYMWGIHTVMPKNEDGKKDRNTNYHHTLDAFAVALCSNAAISTLHSYFKKKENKFKTKALKEKLTTNIPKSKNGVNVVEHLKLLVNKYETNKLYVCPHNKRKTNMKGFKDGNLKLYVRKDKNDNEILSEMEKVSIDSSILIKIVGGFPEDRRDKEVMDYIEILQDRLDMQKQKKIIDAIEIYAKELISLRSKINSVKDDIKELKKTFKTGKQYKDYNTIVNESIKLYTEQNKTLARELQELKCSFVIKNGKRQTVKSLKLQKIKIEQTKADVIVFKDRIERLAISNFKKAIDDKEPFVIKMNESTLNVELFNTEKRGQAVGLNYFSSISNDISTKINDKFVEELKEKKSDLTLYKNDIIKVNNIKESKIEYYVFNGGGNIAATNNKLSIKNINLNNFVKINKKGETKEIKEDNVTPNKTTVISIVKIDFFGNITEN

SEQ ID NO: 6262 - protein, 919 aa, unidentified
  REGION 1..919: note = Description of Unknown: Cas Enzyme sequence
MGKKVLGLDIGSNSIGFALLELDSGKNIVFKEIVSNSIIFSDSMLAKERREARSSRRIHERRSARNKKTRKIYVDFDIASFEFIQNTTTYLNSFRLKDSDVYNMREKAMITNDLSKEEFIFCSYSILTKRGYKNMFSSKTQDSKEEDENILINSSIAKNKKEYESSQYLLPSSILVSKRDALKDTYLNIPVRNKQGTYFNSLDREMYKEEFKKIVQSQKNNTNIFKSEKQCNDFMNEIINEDKVNSAFYQRPLKSFEDMVEYCSYYDKFHPKGKEKRMPLSNARNIELVIRQSIDNYISCDKNGEIKTFSKDEISTIVLSWIHTPKTEEINNTNIFKNAGFKDYKIDSPNKDKLTILNIKAHKGILEILNTYKIDFQDKDNDIYNKILLILYYFKNTNVRYAKLQKLTNNDKFSEELSLLNNMDGFASFSLKFANEVLAQMINGKTHHQSLEDLGYYSKYIKMPSYSFLPPLNPNNTDIEFLNKIPYFKKEHLFYHPIISPKATRVISVLRKLVNQLLEKYGKIDEIVIETARDMNSKREKKNIDKSMKKNKRINDEAKKILSNNDIKESKKNIEIVKLLEEQQGKCLYSGENITIDEIFKDNKTEIDHFIPRSTIWINSHKNKILVKKKFNQDKGYKHPVSFLKEISQWENFIARVKQSSIKDNKKYWLSDEHNIDKIMNKEHWKESFLNDTRSATKVISKYLSHYLFPKESTYGKGEKRSINAVSGRAISELKYMWGIHNIMPKNEIDKKDRNTNYHHTIDAFSIALCTTKASKILHDYFKQNENKFKTKSQKENLSSNPPKSKSGLGVNEYLHNIVKSYENNKLYVCQFHKRKTNIKGFKDSNLKIYITQDKDGNDILAEMEKEYIDKGILLKGFYKDRRSDKEVIEHIESLQERLDKTKQKNIIESILIYAKALI

SEQ ID NO: 6263 - protein, 942 aa, unidentified
  REGION 1..942: note = Description of Unknown: Cas Enzyme sequence
IGLLHNRGFDRVEGAFEKLDALTREFLEEKIANIEELSTVSKIDIFVNNSESSIELEKELKSYRKNINRLFTNLRAYRVKESIKKDIKKILTHEFSKFSSNTEEHIKKMLIENNVEFDYEHGKLKNQLLNGKIDISVVDFEKELNKILKVEDKFLDAFSTLEHDLKMLGDKDNDPSISRLFETLIEAISTGAKPRKMYQNNIKKEIENFSFIAKKDKADMYHIIANISNLQLRVLRKYFNGKMPEENSLDEKKLSIVMYKYFVSRHYTKDFEKERRKKLFDVLKKFLNPKKKVYEAKKFFLACSPEYTIPPYEDINNRDTYKCNSLLINPKRLTDGLKKSVDILLKQSQFDMLVNFSDSDDKSYAKKFQRTLDINSKNIDKSIHPRNVFKHQKDGTNIQYYQDLLTDNFKEFSAFVKEFYEKEEGAVNGIFKEEDKNYIFIKCSKNTPARRNIKHELINAVFASNFEMPEDIEMFKQAIEKNKIKSKLEKISNVSKKYQNEFFKNLLYANELKNNKDKKVEYDNLNKDIKEILLMVDNLLGVFKNILSESNQKSYLADNFSFEEKESKVKKRGKNLKRFVNSIKQTYDVLYLDTGGHNKTCKGCTKENNERSNEAYPLAKRLLSDVAKPINGKLDMLLERIAWEIVQPLDDRYLENVDNIEILLEQNKFNFEKSLHELKIRKKEPEEQDLDYDICPYTGKKFDKKNGEYDHILSQSSSQKANRQIYNSEANLILCSSEGNKEKDNKVYTFIDLQKSHLKIIFGIEDKEAIRKEIISVWDNPKSGLNYYSSFRNLKLNEQRAFRYALFFDSNDKHFKRAEALLRQEQRSVTNGTQKRLAKLIFTKLPKSYRNSVNVKVIDNKEVSSTRKELAEYYRKFDENTGEVLEDKNLTKEDNQKSYSHIVDAMVVYYVANKLELDDFKQIEMNDQLDYTQTAKTGHWYE

SEQ ID NO: 6264 - protein, 1014 aa, unidentified
  REGION 1..1014: note = Description of Unknown: Cas Enzyme sequence
MPKIFGFDIGTTSIGFAAINYEPDRESGAILRMGVRIFPEARDPDGTPLNQTRRAKRMARRQLRRRRQRRRTLNECLAEAGLLPTFCPQPARRKDDEDDPWHVLMRSNPVEVRKRGLGERLDPHELGRALYHLAQRRHFRGRDLEEDEDKPDGEATTPAKGKKRKNEESGEDSEQSAEEKAAKTSRDSTLATLRASGHTLGQFLFAKAAHERQRGIHANRSTVLDEFDRLWNAQANHHAVLRDPAFRERVEDAVFAQRPVFWRKNTLGECRFMPGEELCPKGSWLSQQRRMLEKLNNLALAGGNARRLDEEERAAILAKLQTQASMNWGAVRTALKPLYKVRGEAGAERGLKFNLELDEKGILLGNPLEAKLAATFGEEWANHPHRQGIRDAIHRRLWAADYGEIHTQRVVILPGDERKQRRADVAHSFIDDFGVTVEQAAALRELKLPTGWEPFSTAALQRFMPQLEAGHRFGVLTNSLEPEWQDWRARTFPNRKQPTGEFLDELPSPTRKHPEEMKRLASLRNPTVVRVLNELRKVVNNLIRRNGKPDLIRVELAREIGKSKREREKMQQGQQRQERRRLEAAADLRSNGIDPSRESIDKWMLWEECGKFDPCSCKPICFDDLFRTGEFDVEHIWPRSKCFDNSYANKTLCLKALNARKANRTPFEAFSSDSDEWMAMTDRVWSRVKNGKMARGKAKRFCREEPLDDNFTQRQLNDTSFAAREAVQFLRLLWPDVGVERPVKVDVVTGRVTAQLRRFWCMNNILSNSGEKTRADHRHHAVDALVVACTDPGITQRLSSFWQAEDNPAALPPRLDPPWPTIRADADRSVADIVVSHRVRKKISGPLHDEMPWGYTGEDTIKDGKTFGIYVKRMPVEKLGLETLKITRVDEMSRNAKFIVRDEAVRKALLAYLEKADAPPTKAYPPYPRVSLDGPEIRKVRVLTIQQKALMAPVSKVGDRSASEERQPLGFADPAKNHHIAIFRLPDGKADFEVVSLFEASRRLAKGEPVVRRQ

SEQ ID NO: 6265 - protein, 1289 aa, unidentified
  REGION 1..1289: note = Description of Unknown: Cas Enzyme sequence
MKKILGLDLGTNSIGWALVNTDENGNPCGIAGMGSRIIPMDAATLSDFDKGNSKSQTAERTGFRGIRRIRERYLLRRERLHRVLNKIGFLPLHYAQSIDFEKRLGQFVSETEPKIAWKKNNDGQFEFFFQSSFNEMLADFRVHQPLLLENDKKVPYDWTIYFLRKKALKHRVQKEELAWIILNFNQKRGYYQLRGEDEDENPNKLVEFYALKVVAVEATDEKKGKDIWYNVHLENGWIYRRTSNVPLDWVGKIKEFIVTTDINDDGTLKLDKDGQEKRSFRAPKEDDWTLVKKKTESDIDQSQKTVGCYIYDTLLQKPDQKIKGRLVRTVERKFYKAELKAIIEKQKEFHVELQDKDMFAECLNELYPNNESHRNTISNRDFTYLFMDDIIFYQRPLKSKKSLISDCPYEERKYLDKETGEIKTVPVKCIAKSHPLFQEYRLWQFIFNIRIYQKERWINEKLHTDVDVTSELLKNEDDLTDLFDWLNNRKEIDQKAFLKYPGFGLKKEVDNYRWNYVDDKAYPCNETRSQILNRLEKVENVPTNFLTKENEEALWHILYSVEDKHEIEKALKSFATKHNLNDSFVDVFKKFPPFKKDYGSYSAKAIKKLLPLMRMGKYWDEDSIDTNTKLRIDKILNGEYDEKIRTRVREKAINLNEISSFKALPVWLVCYIVYNRHSEAKEIAKWEKPQDIDAYLKSFKQHSLRNPIVEQVITETLRTVRDIWKKHDDFSEIHVELGREMKNPADKRKRMTEQINENENANLRIKALLMEFMNPEYEIENVRPYSPSQQEILRIYEDDVLKSSIEIPEDVENILKKFKETDAKKQPTRSDVLRYKLWLEQKYRSPYTNEIIPLSKLFTTDYQIEHVIPQSRYFDDSSSNKVICESEVNQLKDNYLGYEFIKNHHGQKVELNFGKTVEILSVEAYEKLVKDNYSRNRGKMRKLLMEDIPDGFIERQLNDSRYISKVVKSLLSNIVREDGEEEATSKNLISCTGGITDQLKRDWGLNDVWNTIVYPRFERLNELTKSNQFGQWENKNGNRVFQTQMPLELQKGFNKKRIDHRHHAMDAIVIACATRSHVNYLNNEAAKANAKESRYDLRRKLRRIEIVQIEKLMDGKKVLKNIEVAKEFYKPWETFTQDAQTALENIVVSFKQNLRVINKTTNSYQHFDENRKKIIEKQKSAESWAIRKPMHKETVFGNVNLKKIKTVNLSSALDHPELIVDKPLKFKIKQLLAEGLDNKKIQKYFKDKTEEWNNINFSKIEQYYFTNDTKEKLVATRKSLDDSFTSKKI

SEQ ID NO: 6266 - protein, 1538 aa, unidentified
  REGION 1..1538: note = Description of Unknown: Cas Enzyme sequence
MKKILGLDLGTNSIGWALIDAENKRIDGMGSRIIPMSQDILGEFDRGNSVSQTAERTGFRGVRRLRERHLLRRERLHRVLNILGFLPDHYAKSIDFEKRLGQFVNDSEPKLVYRISPTTNRVEFLFQKSFGEMMNDFKKNQPQLLEKNRKIPYDWTIYYLRKKALSARIEKEELAWLIINFNQKRGYYQMRGEDEEEKQNKTVEFYSLKVIDVVDSGDRKGKDDIWYNVVLENGWIYRRTSKTPLDWKGKMKDFIVTTDIDEEGKVKTDKDGKEKRSFRAPQEDDWTLIKKKTESDIDHSNKTVGSYIYDTLLLNPTQKIKGKLVRTIERKFYKEELKQILEKQKEFHSELNDSALYSACLEELYEYNEAHRNSIGSKSFTHLFLDDIIFYQRPLKSKKSLISNCQYESRTYIKDGKKEIEPLKCIAKSHPLFQEFRLWQFVHNLKVYAREKVVNGKIETDVNITNELLKTDDDWADLFDWLNGRKEVDQKAFLKYFKLKVETHRWNYIDDKENKKSYPCNETHFLIATRLAKVENVPDNFLTKEVEQSLWHILYSVEDKKEIEKALKTFANSHELGDDFVENFRKFPRIEKEYGSYSSKAIKKLLPLMRMGSYWSIESISLEIKKRISSIIERLESVGFNEKNIDSIADDDIPKQVLKSFVKCNNHYSGLNTYQACYAVYGRHSESGDIRKWATPLEIEKYLREEFKQHSLRNPIVEQVITETLSVVKDIWRHYGNNEKDFFSEIHVELGREMKNPADKRKSMTNQISENENTNLRIKAMLEELFNDGSVENVRPYSPSQQEILKLYEEGVLSAETDIPDDILKISKMSQPSKSEIERYKLWLAQKYRSPYTGEMIPLAKLFTTAYQIEHIIPQSRYFDDSLSNKVICESEVNKDKDNSLAYEYIKNNSGKKIELSYGKEVTLFTLAAYEEHVKKSFSTSRGKMKKLLMEDIPETFINRQLNDSRYISKVVKGLLSNIVREEGEQESTSKNVLSSNGSITSTLKQDWGLNDVWNTIITPRFERLNKLTASSNFGQWTNKEGNQVFQTQVPLALQKGFVKKRIDHRHHAMDALVIACATRNHINYLNNEHARQKDDKIRFELRNMLRRVEEVEVDRVENGQKVRKRIKVAKEFYKPWKTFTQDAQTALDSTVVSFKQNLRVINKSVNHYQKFVDGKKVMEKQVKGDNWAIRKPMHKDTVSGSVTLRFKKKVQLSVAVDSVEMIVDRSLRAKVKELLIQYNDKKKAIKFFKDLDYKWNDADISKVEIYYLDNENVASRVKIDETFNADKIESITDTGIQKIMLNHLNQEKYQNQKDESGKPILPETLAFSADGLDDLNANIVNLNENKFHQPILKVRTYEPKGNKFNVGVTGNKKDKFVEAAKGTNLFFAVYTDEAGKRVYDTIPLNIVIENQKQGLSSVPLKYFDDKNQKEYNLLFHLSPNDLVYIPNLEERENPRLVDFSKMTGDQVSRVYKMVSSSGNQCMFIRNDIANSIVNKVEFSALNKMEKSVDGVMIKEFCWKLKVDRLGNITEANGKRVM

SEQ ID NO: 6267 - protein, 903 aa, unidentified
  REGION 1..903: note = Description of Unknown: Cas Enzyme sequence
KAKDGDDDDAGTEHRMHKFEQDLENMAPGKADFHFPAYFDAYQMGLWNPAGPDELKLRSDCHAKTTRNQIVPRKMVEAEIRKMAEGAAKHYPTLAGKADYLLYGPTETAYASIYPKIRKQFPDLKLREGAATDWQGVVGQKIPRFENRIIAKCALIPRLNVCKLREGEKGQPHEKSLVAVEVTFLMKLKNLRVQRPGGNGWLSADEIRSILEHPKRKDWKFTEAGWRKFCVTIGAIPLPGHEEVASPRFSGRSRFCRPALEILKRLILSGKIPSAFLQEEVARLNGNQDPLKGLVEADLKFISDMAAKNDTWEGIYIPNQQLDALTELSNNSEESITRLIGQQNDPIVRHRLNVFYKRLCELEQTTKSRPDQVVLEFVREDFMGKKAKLAYNSFLKERAKDRIKYREEAVKAGATEKSSGLKLELLCAQDGCCLYTNEGLVPSKLDEYQIDHIVPRSKGGPDAVVNYVLTTQKANEAKADRTPYDWFHQEMPDKWDAYVNRVRARATHLRNKKVQLLIALNAAELADKYTALAETAWIAKLAQAIVGLHFGWRNGVDENGNKRVTVISGGLTGRIRRKYALNQILNPNAKTEEEAEKKNRDDDRHHALDAMVISFIPSWVRDAMKEKFFRFPEPIHQNAKGFFEKEIASVIPQFLCFEKAPLAETIYGARGEGDDKVIVQRSELLQLAFKSIAPGKTKFDLDYLGDQIKAIRDEHIQKLLAEFHAKMPDEGAWNNFCTEFQLPRKDGTPGARVFNVLMNVGEPKEYKDLSKDGTGAYRKALKGHKGQIVYVETSTDKKGQAKETAQVRPVYAFESQAEVAKELTERLGDKCRVIGFFQSGCLVEVAKPVAHAKQPLPPGKYRLNTILTDSKNVKVTTADGRTYPDIPRYNLGNMIGAGFKRSD

SEQ ID NO: 6268 - protein, 1048 aa, unidentified
  REGION 1..1048: note = Description of Unknown: Cas Enzyme sequence
MSLQRETGQFTLGVDLGVESIGWALLSSRSDQRAVIDAVGSHTFDPAVEGDVEAGRDESRAKARRDARQPRRQHDRRARRRLNIARILQQHGLLPKARIDTPGHFDALLKKLDASLRTRHIGEGDRIHAHLLPYILRAKGLDEKLELHEVGRAVYHLAQRRGFLSNRKSPRDDKEEGVVNAGISVLHDKMKNAHARTLGEYFASLDPEVERIRQHWTSRQMYEHEFEEIWSKQVSYHATLTDALKKELHGAIFYQRPLKSQKHLIAECELMPGHKHAPVALRIAQQFRMLQKVNDLEADLADGTTLKPTLEQRRCLIDALDARGDLRFTTIRSKKILNLPKGTTFNHERGGEKTLPGNRTDAALAKIFGDRWESLTENDRDQVVEDVLTYEKSEALVRRAKTHWGLDDDAAAELGDVKLEQGYSNHCRQALRLLVSHMEDGTQYATVRRQIFPESFEGTDPVDMLPPVLEALPSLRNPAVCRALTELRKVVNEIIRKHGKPHSIHVELARDLKRPRKQRVEISNRNLANRKAREGAKKRILEELGDSQPSRSDIEKVLLADECNWTCPYTGKSINMRTLLGNNPQFDIEHILPMSRSLDNGYMNKTLCYHEENRTRKHNLTPFEAYSGDSERWSEIIERVRRFHGDAPAIKLRRFKMEEIPEDFTLRQLNDTRYASRLAADYLGLLYGGRSDSEHHQRIFVNTGGITAHLRNVWMLNSILDDGGMKTRNDHRHHAVDAITIALSTPSIVKRLSDAARQAEAGYRRPFTSVAEPWAGFLDEARKAVLSINVSRRTRRQLAGPLHKESLYSKPIIGTDARGKAVEYRHIRKPLAAMSTRELDKIVDPIIRRVVRQKLDEIGGEPKKAFAVPENHPVLTTGDGRRIPIHGARIRKSEKVVSIAHGARQRYVTPGSNHHMVIVAHLDKEGADKKWVGHLVPRLCAVERARRARMGEPVRVVQRGWPEGQEFRFTLAPGEMFRLGEADGATTLYVVRSISKNRVEYVRNEDARLKKEIKGAKDWKSSPPNRLRELGCRKVTVTYFGEIRPAND

SEQ ID NO: 6269 - protein, 955 aa, unidentified
  REGION 1..955: note = Description of Unknown: Cas Enzyme sequence
MNSYVLGLKIARNAVGWTLLQTSQEPSIMDIGVRVFPKGVDRDNKGAEKSKNTGRREARAARRIHKRRSLRRDQLIKALCSRGLLPDDGRELCELLKRDPYDLRARGLDEKLSLYEFGRALFHINQRRGFRSNRKIDKSGSSPIVAKEAGALQCRIHQAGCRTLGEYFAHTEPEKDRIRGRYTLRSMYEKEFDLLWDRQSHYYQEVLTEDFRKKIRDNIMFYQHPLKPKDEFIGRCRLEPGEARCPRGDWHAIRFGLLQNVNGLKIQNADGSETELTTEQRQVLLGALEREKEIGFDMVREMLGLRQGQRFNLEKDGKVKSLKGDFFAAAMRSSNVFGPERWDAMEEQKKIEISNAVLELGDEELARKMVSEYDLTDEQAQRVLEVSMPRRYMSFSRKAIQRLLPFMEQGASISGAMQQAGYEKDIGQKEKTLDKLPLPDDLRNPIVNTALFQVRKVVNSIISEYGKPTSIVLEIARDMKESPQERQDSQYRMQENERRNEEARIRLIEDMNIQDPKRDDIIKYKLWKECGCRCPYTGKSISQTALFVTNPHFQIDHILPYSRSLDDSYMNKTLCCVAESKAKGRKVPYEAYGQDEERYEQIKHRIACLPWPKQRKFFQKEIHLRECVNRELNDNRYINREVVKYIRQLGVPVSGTRGRTTGELRHQWGLDSILNCAGEYIKNRDDHRHHAVDAAVVVARKKEHLRRLAQSKYSKVDIRFLEPWPNFRNELAERVRRINVSHRVARRARGQLHNETSYGATGREDDKGQDIFVYRKRVEELTMAMVVKIVDPVVRNIVVQRLKEHGLEPEKDKGKRIPKNVWDEPLLMKNRRNLRIPIKKVRIEAIIKNREVLRDRSGEPYRVVATQSNHHIEIFKYTDEFDKLGLPVHDSEPVSMFEAVRRKQSGQPIVNRNHGPNTKFVCSLAINEMVLMKKNKDGELDLYRVQSIPMSKQIF

SEQ ID NO: 6270 - protein, 1079 aa, unidentified
  REGION 1..1079: note = Description of Unknown: Cas Enzyme sequence
LKSANPKPYRLGLDLGTNSLGWFVVWLDRDGDRWRPVGLGPGGVRVFPDGRDPQSGTSNAVDRRAARSARKRRDRFVGRRKDLIEALVRHGLMPTEPHDRKALEALDPYELRAKALDGPLPAHHIGRALFHLNQRRGFLSNRKADKKDDDKGAIKQAASRLKQAIEDEKVRTLGEFLWSRHRRRDPVRARNRSTGPKAEYDFYPTRGLLLDELKQIWDAQAPHHPSMTAQAREEIAQIIFFQRPLKQPPVGKCALAPAKEPYEKDPEGYRCPWAHPLAQRFRILQEVRNLDVRETGRSARKLSKEEGDRVALALQQSNKVSFDKIRALLRLPQEARFNLESERRDHLKGDEVAERLANRNLFGKAWRGFTLDRQIMIANRLLGEADETALVSWLQSECGLDPAIADKVADALLPDGHCRLGLRAIKKILPHMEAGLGYADAATAAGYDHAKLPDGVLSLTGRLPYYGEWLPDAVVGSADPRDPNEKRYGRFPNPTVHIGLGQLRRIVNELVSKHGAPTEIAIEFTRALKHSPKDRAEIKREQRRNQEKNDERRKELEKLGMPANPRNLLKMRLWEELNPRDPLDRKCVYTGEQIGVEKLLSDAVDIDHILPFSMSLDDSAANKIVCMRYGNRHKRREAPFQAFGSSPILDGHAYRWDDIAVRAASLPRNKRWRFDMDAPEKFDKMGGFIGRQLNETGWLARVAKQYLGAITDPYQIWVVPGRLTSMIRGKWGLNALLPDHNYAGVQDKAEDFLAATDDMEFSGVKNRADHRHHAIDALVAALTDRALLWKMANAYDDERDKIAVDPPWESLRDDLKATLDRMVVSHKPDHGIQGKLHEDTAYGLVKEPEKEGANLVYRKPIESLNENEIERIRDRRLRDMVREHAQVAKTNGIALADALKEFRDKVRDPHIKHGLRRVRLLKPEKAEYLVPILDRRNGVTYKAYSAGENFCVDIFEMTDGTWAGEAVRRFDANQPDRAPRWRRDHPDAKLVMRVHKGDLIRVDHEGQTKLMVVHRLDAAAGRFKLAPHNETGKLDRRHETDNDIDPFRWLMASYGTLKKMAAVPVRVDELGRVWRVQPK

SEQ ID NO: 6271 - protein, 959 aa, unidentified
  REGION 1..959: note = Description of Unknown: Cas Enzyme sequence
MNKTLGITVNYDCLSWALLENVEQSSFIQTGIRVFQPSVLNLGSGLLEESHLALRTRYRNARKSASRRQYRKLLLLRLMIENKMCPCPISAWILWKNKGIFPTKELEDWLKLNPYNPRVQGLSQKLKLSELGRVLYHLAQRRGKLVSKLNGNTDASIFMHGDPKTKRLGLYATQKQKKKDFTLGQHLARYQQTKHSSFEQQEERIRNRYLDRMMFVEEFHKLYDMQQDFHPSLNENLCEKLGGKPLPNNDGTSGLLFFQRELKSNQSRRNLCVYERGKKGTPKSHPLYEYFHILKWISQIQYDGQSLNTKQREKVLAVALKFTQFSFKKVRKALGMEDESIQFNVNESSKIYLSHTLVNLGKPQLFGPAFFSKPLEEQIDIWHAIFFFDNEKKLQDHAMHVWGFSKEQSKRFCKLQLNTGYASVSSKAIRNFSYFLKLGLTFDQAVFLSVIKRATEKDWLMFSNTVETVCIKELLKAFEYTKQNIKTESIQRILQKNYGVAKFDTQKYSQYINANSRNENNSFQVNYTSDQYILNHFKPILQKPVFELRKMVNTMINQLGEIDEIKVFIRPELKSSRSGRKRQLMTRRKRNLTYEFHQKTVLEMGKNPTHTNVLKHRLWEEANRSCPYTGQAINIQELFSDKVSIVYILPWRRFFNDSDQNKTICLTSFKHNIIDLTPWEYFTALDPGVWEQVKTRALSQFMGSKKQENLSKFKQFTMSNYAKDAISNEFNDCHHVSLAIKELLQEVCPNVQMTLGHATHSLRKNWYLDSFDNFLENEPLGDYRRHGLDALITAVKTPKLLVELTKWNRYEQNSPKNFPLPWKSFKKDVEREFYAMPISFQRPKQCFAIAVRKHKEGKTLYTQRSDSARGQLHKESFYGKRKSPHHETHGFHIRKAVEHIQTAKQVKKIVDPVLRQRIYDLVDASGGFDNGKIPKDALIYTGDDGGIHSKVTMPNIRGG

SEQ ID NO: 6272 - protein, 1087 aa, unidentified
  REGION 1..1087: note = Description of Unknown: Cas Enzyme sequence
MARLRLGLDIGTNSLGWALLTVDRDGWPTGLVDLGVRIYADGRDPQSGATLAEDRRLARAARRRRDRQMRRKARLMRAFIDLGLMPADPAARKRLERLDPYHLRARGLDERLSLHELGRALFHIHQRRGFLSNRKTDRKDKEAGKIQVGREALARLIEESGSRTVGEYLHKRRQSGLSVRARLQGEGANASYEFYFDRDLARREVEALWRKQAEFHPDLTDAAFARLTDAIMFYQAPLKTPDVGRCTLIPAEERAPRALPVFQRFRLLEELANLRILGEDHRLRPLTLEQRDDLLEALASRQKMTFAQLHKRLRLRPEERFSLESDTRKDIKGDETAAVLAKPKCFGKRWLALPPEVQEEVVLFLLTTENEEEAIAGLMERWGLDRARAEAVSAASLPDGYGRLGRTALTRLVEVMEAGVDPETGEVLEAPLTYDRAVKALGLHHSDLRPEGGVPRLPYYGQVLERHVVGSGRAADRREDRFGRFPNPTVHIALNQVQRVVNAIIAAHGKPDEIVVELSRELKLSEKKKKDVRKIQAENRAKNEKRREKLAELGVADNGENRMRLRLWEELHPEPHRRRCVYTGQQMAAADLFSGQVHIDHILPFSKTLDNSVANRIVCFADANAAKGNRAPCDAFGHSPVLNGRAYNWAEIQERAAGLPKNKRWRFAADAMNRFEDQDFEGLGLEREDTELLATGFLARHLTDGQYIARIAREYLLHLYPRAEQSRVWTVPGTLTGLLRDKWGLNRLLASDNVVPPESAEDRDVKARARERKNRADHRHHAVDAVVIALTDRGMLNEVARRAGAAEAHGHRLVEGMPEPWTGYLDAVREKLARLVVSHKVDRSASGKLLDETAYGFVPDPAKEQGANLLYRKPFLALNENEVARIRNTGLRKRVQRAVAEAKAAGGTLRDALERVAAEGMGGASGAIRRVRLVKKGDGAVPIRGGDGRAFKAYLPTENHRLEIYETADGVWRGEGVTLYDANRPDYRPTWREAHPDARLIMCLHKGDLIDLEVEGERRIVKVVRLEPSANRVRVVAHHEGGDFAKRHADPADPFAWRGWRLCSFSRMKEAGARPVRVDVLGRVHAG

SEQ ID NO: 6273 - protein, 1012 aa, unidentified
  REGION 1..1012: note = Description of Unknown: Cas Enzyme sequence
MVERILGLDVGIASVGWALIDYDKENLQNNQIIKSGVRIFTIAENPKTGESLALPRRLTRGARRTNKRKKQRIKAIKNLFVDYLNLSRDNLFSEDNIFNTKALIDVWQLRDKALKRKLTNVEFARVLTHISKRRGYKSNRKVEEQANSDGKKVLSAIEENKKLLGKYLTIGQAIYHTTNNDTDKQTRRNKKDNYNHSVSRDILHDEVNIIFEKQLGFDNNFANDEFKKKYKELFVRQRDVASVDHMVGTCTLEGSNEKRAAKRAYSSEEFVTLTKLINTKLINEDEEERYFTKDELEKLINLCKQSEQPSYKKMRESIHLEENYKFKLLDYLKLDEKKQTGEFINPEKEKFKSGFIGFHKLKKVVEKSLSKIHWQNISNDKSLLNDIATIFSYHKSDDSIQQELEKLNFKSFSKEEKEKLINALILNINFDKFLHLSIKAIDKLLPLMRDGKRYDEAVKEIGYKKIAGTKEKFLRALNSDENKELTNPVVKRAIAQTRKVINALIRKYGQFDKVHIELTREIKKSHQDRNKIKKGQDEFQKVKQGIVDKFIEDYGRKPKGNELLKFRLAKEQYYKCSYRCIYSMKPISEKDLLTQGVVEIDHILPFSKSLEDGMYNKVLCLTKENQDKVNRTPYEYFTQTNKNWHKFENFVKSLHLGKAKTTRLLKKNFDKNSVFDKNSVEEFRERNINDTAYMAVYIKDFIENNLELKSNVISINGTLTNMLRHNWGIGNKSRDNHLHHAVDAIIIAFATDSEVQRLSTLSAKINEFQFTKSEKKADKLKFIPPVEKFRDEVQTSIDDIFVSFAPRRGVTGEAHEQTIFSPKDLKANKKQEKPSYLTGGSTIRNVTLNNNSKIAKQSSMPRIDIFKNKNTNKFYVVPIYTVDFINESLPNKAIVSGKNKDGSLKQWLEMDDKYEFLFSVFKNECIEIKTKKEIIIGYFVSAHSGTGALEIKNHNNIENDIFKRDSSNVCIKSTGIQNAIYIKKYQVDPLGNKNEIKKEPRIGTKKQNKKDK

SEQ ID NO: 6274 - protein, 1603 aa, unidentified
  REGION 1..1603: note = Description of Unknown: Cas Enzyme sequence
VIALTDYKTNFWNMSKKILGLDLGTNSIGWALIETDFGKKEGSIKGIGCRIIPMSQDVLGKFDSGVSIPQTAVRTGYRGVRRLLQRNLLRRERLHRVLNVLGFLPEHYANSIDFEKHFGQFKKNTEVKLNYRKNEQGKHEFIFKDAFNEMLNEFKEFQPSLFYKKENGQETKIPYDWTLYYLRKKALTQKITKEELAWIILNFNQKRGYYQLRGEEQEVEEGKKVEFITLKGDKVVDTGDTLNNTGDKLYTLFFDNGWEYTKPISSLEKWLNKEHEFIVTSKKNKNGETKQTFKAVDSEKDWIAIKTKTEQDIEKSKKTVGLYIYEALLKNSSQKIRGKLVKTIERKFYKDEFEKILKTQIKHHSELQNRKLYQDCIIELYPRNEAHQANIKNKGFDYLFRDDIIFYQRPLKSKKSTISDCQYEYRVFKSEVIDKITGEKREEWVKSPLKAIPKSHPLFQEFRLWQFLKNLKIYQTKNDDGNLIDKNITETLLQTEDDWVELFDYLNEKAKIKQSQIIDFFVKKKRIEKKNKENYRWNYVEDKEYPCNETKAQFIARLKKVKDINVTAFLTAEMEYKLWHIVYSVTDKQEFGKAIANFAVRNNLDQESFKKNFLKIPPYKSDFGAYSEKAIKKLLTLMRRGKYWKESEIQEEVKERVMNIMVRVNALNLPLNPTKKQLNELLEKGQVADDDIPTQLIKSFISFRNDNPLSALNTYQACYAIYDRHSEAGDVQVWRTPCDIDKYLLEFKQHSLRNPIVEQVVTETLRTVRDIWKYYGKSDERFFEKIHIELGREMKNPAGKREAMSKRNTENENTNQRIKAILQELKDEGVSDVKPYSPSQQEILKIYEEGVFQNPDAKFSELSEDDITKIRKNQSPTKAKSSPTKSDIRKYKLWLTQGYLSPYTGKLIPLSKLFTTNYQIEHVIPQSRYFDNSMNNKVICESAVNELKSNQTGYEFIKNHGTEKVDLGFGESVNIFTLEQYESHCNKYFRKNKTKLKNLLSEEIPEGFINRQLNDSRYISTLVKSLLSNIVRDENEKEATSKHVIPVTGSITSKLKKDWGLNEKWNELVQPRFERLNKLITKEGEELSTDFGYWDYQKDENGKNVGKQFFRTQVPDEISKGFNKKRIDHRHHALDALVIACCTKKHTHYLGSLNTEKENYGLRDSLLIKSDKGHYTKHFLMPWDGFTIEAKNQLEKTIISFKKNTRVINKTKNKTLQWVEKEGQWKKQLVPQTKGDNWAIRKSMHKETVSGKVFLKREKGYVKLNSALEKWKMIADKNIKNKVKKAIDLFDNDIKKVKDHFKNNPLKINDKEVEQILIYENIEATATRMSLTDKFTRKQLESVTDTGIQKILENHIKNYMEVNKKGERIEMFDLAFNSDGVEELNKNIVKLNNGKKHHPIYKVRIYEVGSKFSISENKKSTKNKKYVEAAKGTNLFFAIYKDDNGNRKYETIPLNEVIEHQKQVANLPKNERIEIPVKNVFIEKGKEISVHFLFSLSPNDLVYVPSDEEQSNPNIVDFANLTKEQVGRVYKMVSSSGRECHFIPNTNAAEIEKNENGTNSKNERIQEFLCPISFDEKNKPVMIKNICWKLKVDRLGNVTSSVK

SEQ ID NO: 6275 - protein, 1464 aa, unidentified
  REGION 1..1464: note = Description of Unknown: Cas Enzyme sequence
MKKILGLDLGTNSIGWALVEQDFLQKKGQITDVGVRIIPMTQDVMGKFDSGQSISQTAERTGYRGVRRLNQRKLLRRERLHRVLNILNFLPQHYKDNIDFEQKKGQFKNEIKIDYKKNEDGKYEFLFKEAYKEMEKEFRNKGYEGEIPYDWTLYYLRQKALKEPISKEELSWIILNFNQKRGYYQLRDEMAENESDNKKKEFISLQVKQVLPTGEKTKDGKDLYEIVFENGWIYPKQTVNPQAWEGKTKEYIVTTSTNKDGSTKRTYKQVDSEKDWIAIKEKTEQDIEKSQQEVSEYIYNYLLTNPKVKIKGGLIKTIERKFYKEELKKILKNQQKYHPELSDKKLYQQALVELYPFNEGHRNNIKLKDIPYLLIEDIIFYQRPLKSQKSLIANCPYEKISYTKKEIDPQTGTEKEVTETKPLKVTSKSNPIYEEFRLWQFIHNLKVFKHKLYKNGELITDQEVTSELFPDEKDWENLFEFFANKKEISQKTLVDFLIKQRKIDRKEKTNYFWNYPEDKKYPSMPTRSGFLSRLKKVEGVEPESFLTADKLKQLWHIIYSVNDPVEYEKALNSFASKNRLNKESFIKAFIKHPPFKSEYGALSEKAIKKLLPLMRLGKYWNEEAILPEAKQTIDLIMERLDSISGDEIENKKVNEILDQISDDEIPRAVLKSFYKNKKKNPYKGLQLHQASYAVYGRHSEAGDVQKWKSPEDIDRYLQRFKQHSLRNPIVEQVILETLKVVRDIWKYYGEGKKDFFDEIHLELGRELKNPANVRKKISQRNAENERTNTRIRALLKELLNEGANPESPSHQEILKIYEQDIVNSFEKLPDEIEKIRKENSPTPSQMERYKLWLDQKYISPYTGKIIPLSKLFSTDYQIEHIIPQSRYFDNSLSNKVIAESEVNQDKGNKTAKEYILQKGGHTIEGGHKILKLEEYQALVEKYFSHNKKKTKNLLSEDIPDDFIQRQLNDSRYISKVIKSLLSNIVREEDENAETSKNLIPVTGSITSMLKHQWGLADKWNQLILPRFQRLNRLTKRDDFTYLNKNGIEVPNIPEDMPGKINKKRIDHRHHAVDALIIATIDRNHINYINALNNEKTKYALQGQLLKKNENGHYTKYFQLPWENFPLEASEKIEKIIPSFKQNLRVINKATNKYWKWVKQENGTYKKQRVPQEKGDHWAIRKPLHKETIYGKFDLLKTPKNKVATFVRTSLSAIDKPKHIDQITDRNIREVIIPNHLKEYTDEKGKINFEEAFSPEGIEKLNKNIVLLNNGKPHQPIYKVKMYEIGSRFPLSENPDSPKHKKYVEAAKGTNLFYAVYWDEKKKKRNFETIALKDVIAHQKMEAHLPKEQRTKIPINEQLGEFLFYISPNDLVYVPDDDENIDMIDFNNLNPQQIKNIYKMVSSSGRRSFYIPIHVAQAIYNKKEFESLNKMERDMKGNIIKERMIKLKTDILGNITGVEKGKSHL

SEQ ID NO: 6276 - protein, 1129 aa, unidentified
  REGION 1..1129: note = Description of Unknown: Cas Enzyme sequence
MKKILAVDLGITSFGYSILEEANDNSYRCIDNSVVMRDSPYDEKGESSQKQHSTQKSLRKLNEKKKKRIKCVAKIFDDFGLLPYEKALQINRDNPIKNKWELRAIDALQRPLSPEELFAIFAHMAKHRGYKSIATDDLLYELERELGLRDSETAGSTKSDERSQVYAALNRLEELKKSYGSETIAQVIHRAVAEGKFRSYRNHDDYEKMIRREDIEEEIEKILLKQAELDALPLDNEQIGELIDRLKECITDQKPPTIDESLFGYCTFYKEEIAAPRYSYLYDLYRLYKKLADLSIDNYEVTPEDREKIIRWVEEKIKAGKNVKSITYKEIRKILGLSPDQKIFGQDDERIIKGKKEPRVFVPFFFLANISKFKNLIASIQKHPDAQQIFKELAEILQRSKTPQESYEKIQELLQSKGINASEAEIVELFKNKKPGTLELSHKYILQALPLFLEGMDEKEIQRQLGFSDSEDYSAYPKSLRHLHLREGNLFEKDTNPINNHAIKSLASWALGLIADLSWRYGPFDEIVVESARDALPENTRKDIDKAMAEREKSLETIVKKYKSQFPTIDKRLARKIQLWEQQKELDLYTGQTIKLTDLLDGRADIEHIVPRSLGGLSTEYNTIVALKDANAQKGNRLPGDWLSHDDAYKQRIEMLKNKGLINWKKYKNLTATSLDETYTETFHSKGLRATSYLEALVAQVLKRYYPFPDPKAQQHGHTVRMIPGRVTSKTRSLLGIKSKSRDTNFHHAEDALILAIINRGWQNRLHRMLRENYGKSEAELKALWEKYLPHIEGLTVPDYVKEAFERFMSKGEESLFYRDMFGGIRSVSYWVNKKPLSASSHKDTVYSPRHDVPTLRKNILDAFAALDVLKKRHDLTADEFMKKYDTEIRQKLWLHRIGNVNDESYRAVEARAAQIAETITRYQLMDAQNDKTIDEEYQQELKTLLSTPIEVGGKQLRKMRFVYDKLNAVQIDRGLVETDKNMLGIHLSKGPKGKLTIRRVDVNNAHQLSRQKEGMLCYLNEMLFFFNNKKLIHYGCLRSFSINNQGAKYLALFNPRYPANPKAQPKRFTTGKKIKPVSVGSTTGVIKAHLDLDGHVKSYELFGQIIPEQLRWFIEESGYGGVENDPDH

SEQ ID NO: 6277 - protein, 1080 aa, unidentified
  REGION 1..1080: note = Description of Unknown: Cas Enzyme sequence
MITLGLDLGHTSIGWTLADVENGKIIDGGVEVFDAPEDEKGNTLASIRRGYRGSRNTNKNHEKRILNLKKLCSKYKLVPKSLLVTPKGGIAPLFKKGIQKDTPLKLRAKGLDELLSGRELTRIILHIANRRGFKFEIEDETDDNDKELGKIRDSQNELKNEFSKTNHRTYGEFLYKEYELKDKKTRNRAKKDGTPTYNFSVHRDDLSNELLQIFAKQKELNSLYVTDEFIESIMSELLFVNEPKSLKRMIGECSLIEGRKRASKALYSSEMFVARGILVNLRVKEPDSEEYRALGKDEIALLLKEAHIKKIGKTDAKKILKISNKSKFKGDEEDSKKAIVHLENFLKMKGAIDNEVLFQKLFSNIELYENIVDLLTYEKSLKRRKEKLKDFLEESKLSDDEQNYIFDKVIYLSFSGYLNVSTQAVKKILPCFENGLNYYDAIHEKNLEIKIEPQLYLPPLKDTQLMIPNPIVIRAITKSRHLINAILKKYREKYNDNEWTFDRLNIELAREINTQKEKKEITSAQSRDSKQKQKAVDFIIEQCGEKYITSKNILKVRLWQQQDEYCLYSLKSISATNMVNEIIKKSDSYEVDHILPISRSSDDSISNKVLVLSDENQMKSNKTPYEYFGKDKKRWETFENFIRSKDMYVKLGKAKVGKLIMLDFSSKEQGFLERHLNDTRIISKTVKNYVEKYLKFKDANEERRVYVVSGKLTSTLRHQWGLENKNRENHYHHFEDAVLIAFSNASIVNRLSRYYRALETYKRDGKNKPKFTKPYKNFLDDINAMIENINVVREPKVKNSGKVHSDNPRKIDEKTRKGMEIRGGIVDNGEIIRTDVFKDLNKEKYFLVPFYLKDLNKPLSNKFITAGNKEWEEYDENKHKFIFSLYPNDLVKVITKTEVVQGYYISPNSATANITLLSMDNIDDGVFTKSIVKYVLKIFINNTLDTDSRKEEIEKLSKLSNIKKRKPTGILSLMMDIKINDVKEFKDKKNNLQLLLDELSDNYFIESFKKNTKEVNINKINANKSDIKLSVTLDTIYDNRALRGTGVKTKTLGFKKLNIDLLGNITELPHETLRKPFTKR

SEQ ID NO: 6278 - protein, 1033 aa, unidentified
  REGION 1..1033: note = Description of Unknown: Cas Enzyme sequence
MNMSKRILSLDLGITSIGYSILNEMDSNKYGLVDYGVSMFDKATDKDKKSKKLLHSASKSSSKLYDLRKERTRNLANLFEKYNLGSASELLNQEKQNRFINKWYLRAEKSFSERLTIEELFSIFYLVAKHRGYKSLDTDDLLEELLIELGFKVEEKKEKDAEKGKVKQALKTVESFRKKYPEKTVARIIYEIEIQKENPTFRNHDNYNYMIRREYINEEIRKIVQAQDEFGLFDAGIDIELFIKELIDTVDDQKDSTNDMSLFGNCEYFPEHKVTHQYSLLSDIFKMYQSVANITFGKTKISKEQIETIVNDFFKKIKLGKNIADIKYQDIRKVLKLNDEVKIFSKEDYHLDKKGKKIHSTITKFHFLSSLGKIGKSFIESIFEKENKFEILKEIFDVLEFEKAPKSMYNQINEIFIKYTLVEDEKLKNETIINLIKHKSGNSLNISAYTMIQFIPYFERGMTTDEIKQELKLERNEDYSTYKKGIKHLHVKTFEKDDNLEINNHPVKYAVSATMRLVKHLHVTYGVFDEIRVESTRELSQNEETKKAIEKANKENQAKFQKIIDNEEYQKIANHYNKNLKRYARKIMLWEEQEKLDMYSGEVISFNDIFSNKVDIDHIIPQSLGGLSVKHNLVLAHRDENHKKSNQLPMHFVVDTVDYVNRVEHLFKEYKINWKKKINLLAETLDDRYKDTFESKELRATSYIEALAAQMLKRYYPFPDKEKQANGQAVAHVQGRATSNIRKLLGVKTKVRDTNIHHAIDAILIGLTNKSWLQKLSNTFRENMGVIDDKARANIKKEIPLIEGIEPKELVELIEDAYNIYGEDSVFYKDIFGDTKVVNFWVSKKPMSSKIHKDTIYAKKPNGLFTVREGIIKQFIALKTTVTTDPEQFMKNFEKKILQKMYLFMTNPNDVICKIVISRAEEINLLLQSFVNIDRKNKEDMSEAKEKLDKLMHKELLDNNDNVIRKVKFYQSNLTGFDIRGGLATKEKTFIGFKATLENEKLVYERIDASNFKRIQKENDGSFKVYKNDIVFF

SEQ ID NO: 6279 - protein, 1051 aa, unidentified
  REGION 1..1051: note = Description of Unknown: Cas Enzyme sequence
MRILGVDLGVASVGWALVDDENNEIIDSGVRIFTQSTNKDGKTLASVRREFRGSRRGLNRKKQRLNQLKKLFIAHKLLSKSEFKHLFDSKNRLDIWQLRAKGLDRQLNNQEWARVLYHIAKRRAYQSNRKSESNGDDSKKKVLSAININQAKMNQGGYQTIGEMIYKENKHPGDGKIKRNKKDKYTNSISRDLLRDEIDILFEKQNEFGNQYTDATFRDGYKQIAFTQRPIQFNTDLVGKCTFEKDEYRGAKNCFSTEKSTILSKINNTDLIDKDTGEIVRLFEYATLESLLDVFYSTKEVKYTTLRKQLKISDNFEFKQLNYHQNFEYKTNIKAKIVDFYQLEDWLSLEQKVLLEKQVLDDKKEKFKRYKYSSIRSILSLPDSQKFNGVKYDTKVEDTAFGKLNGYYSIKKELSKDVFELLFVDKDKFNKIAEILSYQKDDDSATNDLKSQVFNGLNLDENIIDEAINGLLNISFSGFNNLSIKALDKILLYQEQGFKYHDAVAEVYKHHSQFKATNPQQYLRPLNKEENYQITNPTVKRVFSQFRKVLNAVIRKHGSFDAMHIEMARELKNSKKRKSEIETGQKEYQQEKEALKAKFLENFGYEGSGRDLLKLRLYEQQHGKCIYSKKEIKTNRLLEDGYVEIDHILPWSRTFDNSLNNKALCLSAENQNKGNKTPFEYLTNSDKDSEKWQEYKNYVGSFANIKQAKRNKLLNTTLPKRRGNDLSGDDIENPESGFLARNLNDTAYASKFIKSFVEKNLIFAENSEIKQKVKVRSGALTNQLRYNWDIEEKNRGNNLHHAEDAIILAFATQGEVQRMSTISAKRADFKYQTADERKIKFTPPFSNFRDIVDESIDKIFVSFAPRRKIAGAAHKATIKPKDTSGKYKFPVNDGMAENGVIQRVDVFVNNKNKYQFVVFYPADFYKDDFPQLDLNGNEIDENPQFLFSLFKDDLIEFKTKKTKNKDSKHLLAYFKYIQSDGKIAFQQNYKAKAERKKSDNKKGYTDVLLATGFGLVSLKKYQVSVLGDKVEVKNEKRLPLIKQMRKNKAKK

SEQ ID NO: 6280 - protein, 1152 aa, unidentified
  REGION 1..1152: note = Description of Unknown: Cas Enzyme sequence
MNKIISPIAIDMGAKNTGVYYANYNQGATFEEIDKQGEVLVYGNYTPLLVNRTTSRHTRRGYQRKKLAKRLLTVVLKEYFKFPADKHTQALGFLMNRRGFSFLEEEYSKKHLNNLPSTTWGALSEEVQQFFDGQKNIADQLMNFAINDSEKVTKLLEKIQNIQGYKDHQQFKKDAVYYSYIEKISKACDIRIDNKKIEEETNKLSTTSKWIISKLTKENNINLISISDENLFDQMNLLDSEQANSLKKQIPNINEKQEKTKKQIKESVWNFKYTEFELDKKEDDLNFDSNNTEDINKKNVQKKQQLHHRAHLHHLVYAVYKINNEIISGGRHRSKFFDEIKDDLNKFREDDFLNNKHNPKYLKEFIFAIIQNKELDIDKLYQLVCHISNFELNPLRKYFNDEAYKDGDKLEEIKLAKITSRWFLKHWMVTEEKDKQKKVNSYQELKAAWKKHQDKDDMIDFWLQITPDLTIPPYQAMLNRHPPKCQSLLLNMDYLNKHYSNWQNWLQALNPDEAYKTKLEFLRSGRKVKPNRLIDDEKIKVRQLQFILDTAKKQDSYKFNEIWSIYHKLQKSDTDKWQKKLDKAIGDSKLPNELKQDLDFNKQESFAHFLNKYYQTRRKARDGRYFLIQEKKEKWLTDNKLLTLCTHKPRQKKHQWQLDLAAILGVNVDILKDKIGSQNPENYFKNIAGFVSNCGKAAKAQKDYRGELKLKIHHELANKPQGTLTKLANKCDKLKQELIEKTGVNEILADRQSNEFNQKIALVFKFAQIHNIVFKDRSGFSKTCPVCSTDNAFRMQENDEGMTKASRLPALSIRLIDGVVMRICDAIARQVAVTKWHEIKDDLQNGKTVSIPLVLEQNRFEFEPSLKTIKGKKANEVSKDRTSKYKGQKVSLYSGESLGKNGEIDHIIPRSSQYGILNDEANLIYISKNDNQKKSNNTKFLKDLHKNYKNEIFGKKSDDEIKQFIYGQLGSDTDSKNFVFGKYLSFVNLNENQKKAFRHALFLQDDDPLKQKVIKALNNRNRAIVNGTQRYLAQCIADKIHRIARKEDKINNSSYANKIEFDYFEYSARWDDPKSTYNLRKEYGLSKPKKQPLYSHLIDAQLAFLIAAEDHQNDGSMGINFSEKQTIWKSEIDKSTGEISPSKSFDAIDIGE

SEQ ID NO: 6281 - protein, 1355 aa, unidentified
  REGION 1..1355: note = Description of Unknown: Cas Enzyme sequence
DMNKIISPIAIDMGAKNTGVYLNHFEQGEDPTTSGNIQGTTIVIDGTNITWSQASRTQKRHQIRTNKRRKLSKRLLKLVLAEYNIIPNQKQSEYLNGLLNRRGYTYLVEGLEESLIKQSFVAEYFVEKYNIFFKSEGNFYPDFLTISNDIEQARKLKEVLILSKNEAKKEVDENKQEFADAYDNIKSVLNTQIKAEDEGHKYRAIYLKNIKADIENSDLLTPLLSYLDADKLANLIGNISNLQLRVLRKYFNDKNMKSGDSWLPDKLHQVFFKWVRSWHAKQQNEKDNRVEILQLKSNVNILDILTTLNPKKTIPPYEDQNNRRPPKDLTLKLKPKGLDGHLKDWENITQLLANNYILPPIDTHITEQIDLQEGLESNSRPQQDKGKDQDTEARQILANTLHRILDRTIVLDPYKLRWLAQDSDTPDAKKSKDLLNQHSENQADNIIALAKKYYAEVAVARQGLWSSKDENSVFFRCNTNPPHKGKLTHKLVGHILRETFTEDDVVNFRKDCWHQKIKGNSTTKSLAGKIEETRKEHGNGFNYIVQTLKKRQWVHENENPTPEQIARWDKYKNDHKDVVKAIENTQLVAEKINQFLKHDKQEQYNNPYSVAQLYNHLEAEITGFSKTDKFNTEENAWRDKEQSTEILNKTNERIKITKSNASRLTADSIRPFDGLLDRIISRQAYEIASMKIKQIEALDVDKNTELFVPIFMEQNRFKFEQDMAEIKSNAKKKENAKKGLEKQKDQWQDKDDRIKKNTFCPYTDEKISNGEIDHIIPQSQSKRNQDVVFNSEANLIYCSGTGNHQKGDNRWTFEQLKPNYLNEIFGNETNIKQNIIDFINNLNENDAISFHNLDNTEQNYLRHALFISELDTKTFPLLNTRYKTFVNGTQGYLGKQIRKLLQEKYPNIRVKTYQIPAQEVSQLRTVLGGCDKALEKQERQGAFSHVVDASLVLATALQTPKIAEELTTTNVSGLSEKGQWLKDLLPKNASVQHIKRKPKYRKKLESTQIFKDGLYGERFMPILLDDEKLYYGFALDNCHEIELLKKPKETVKDFDKKLQVAKEKQQTKHNEYFELLKPFLYTGNKNDKRLVEGDLSDNWQYQYLSIDKTKALNHLQKCAKEVCSELEVEQAQQLEKLRYSVEKKKIKDVLLTGQGKKSFIKALEYKKFKVSGLTLPAKSQWEALIKHSIKDYADKQTTLEECFNMPEQIEIESKKMVDFWQDLAKESSLSVDYLQEHLFKRNDKGELAKKSGIIPKGVFNGKIKTEEKLKRLENSTLLNKSFGVEFKSTTDLIPQSSWNTLFEEFFRTNKVKNNNQHKQVRKEYSLPIASNPSGGFRIKRKNPLTNEVVYQVSSI

SEQ ID NO: 6282 - protein, 1056 aa, unidentified
  REGION 1..1056: note = Description of Unknown: Cas Enzyme sequence
MKILGIDLGIASVGWALVDDKDNKIIDSGVRIFTQSTNKDGKTLASIRRGFRGTRRVLSRKKQRLNQLQKLFIDNSLLSKSEFKHLFSSKNRTDVWQLRAKGLEQPLNNEEWARVLYHIAKRRAYQSNRKSENSGDDDKKKVLSAININQKKTDQGGYQTIGEMIYSETKHPGDGRIRRNKKDNYTWSISRDMLRQEVGILFKKQVAFGNQFAGDDIKQNYKEIVFTQRPMQFKADLVGKCIFETDEYRGAKHCFSTEKSVLLQKINNTDLINEETGEIRRLFECVNIDSIFDIFYTVKEVKYTALRKQLKISNNFKFKQLDYQQNFEYKTNIKAKVSDFYKSEDWLTSEQKTILEKQVLDDKRENFKRYKYSSIRSILSLPESQKFNGVKYNTKVEATTIFGKLVGYHSIKNELDSEVFSLLFANKNKFNKIAEIITYQKDDKSATKDLEDMVFNNLKLDKIITNKAIQDLLNISFSGFNSLSIKALDNILPYQEQGLKYHNAIKEVYEHHSHFKANNLQQYLRPLNEKENYQITNPTVKRTFSQFRKVLNAVIRKYGSFDAMHIEMARELKNSKKMKFEIQTGQKEYKQEKEAIQIKFLENFGDKGSGRDLLKLRLYEQQHGKCIYSANELKINRLLEDGYVEIDHILPWSRTFDNSLNNKALCLSKENQNKSSQTPFEYLANSDKESQKWQEYKNYIGSFISVKQAKKNKLLNTTLPKRRGNDLNFDDIENSESGFLARNLNDTAYASKFIKKFVEQNLVFSDNSKIKQKVKVRSGALTNQLRYNWGIEEKNRGNNLHHAEDAIILAFSTQGEVQRMSTISAQREDFKYQTADERRVKFTPPFTNFKNALDESIDNIFVSFAPRRKIAGAAHKATIKPKDTGGKYKFLVNNGAAENGTIQRVDVFVNDKNKYQFIVFYPAAFYKKDFPKLDLSGNKIDESSQFLFSLFKSDLIGFTTKKKPKEQRAYLSFITSDGNIIYQPHSLASCEVPSLDKEGKQKQNKKGKLLTKPLKFKKTTLTSLKKYQVSVLGDYVEVINEKRLPLIKKMRTNKSK

SEQ ID NO: 6283 - protein, 1388 aa, unidentified
  REGION 1..1388: note = Description of Unknown: Cas Enzyme sequence
MKKILGLDLGTSSIGWAYVNEAVNENEKSEIIKLGVRVNPLTVDEQQNFEKGKSITTNADRTLKRSMRRNLQRFKLRKENLIEILKEKGFINNDTLLSENGNKSTFETYRLRAKAATEQITLVEFARVLLMINKKRGYKSSRKAKSQDEGQLIDGMEIAKKLYNDNITPGQFVLELLKENKKYIPDFYRSDLQNEFDRIFDKQISFHSTILTTELKEELRGKKRDAIWAICAKTFKEKGIELVGIKRQGKATEQKLENYEWRAKGLTEKLELEQLVIVLQQINIQLNSSSGYLGSISDRSKVLYFNKITVGQYLMRQLDENPHKPLKNQVFYRQDYLDEFNTIWETQSKFHNTLTNELKNEIRDVIIFYQRRLKSQKGLVSICEFENKKIEVIIDGKKKTKTIGNKVCPKSSPLFQEFKIWQILNNIQLIEKANGAKRELVQEEKEILFKELNLKDKLSKGEALKLLFENHKDLDFNFKDLEGNRTNASLFKAYQSIIELSGHGEYDFSKLNADKVIEITNSVFEGLGYNTDILAFNTGLEGEKFEKQASYQLWHLLYSFEGDNTPTGIGNLIHKITENYGFEKEYATIIANVGFQPDYGSLSTKAIRKILPHLKEGNEFSVACTLAGYKHSKDSLTKEEKEKKVLKNKLDILPKNSLRNPVVEKILNQMINVVNTAIDSYGKPDEIRIELARELKKSAREREELTAAISKSTTEHEKYKATLQKDFGLTHVSRNDIIRYKLYLELEHTGFHTLYSNTYIEPSKLFSKEFDIEHIIPQSRLFDDSFSNKTLESRSVNIEKGNETAYDYLKNKTDEKGLKEYSTRIEDLYKAGRITKTKYNKLKMSGKDIPDNFIARDLRDTQYIAKKAKSILEELVKDVITTSGMVTDRLREDWQLIDVMQELNWDKYNKLGLTEIIENREGHKIKRIKDWTKRNDHRHHAMDALTIAFTKRSHIQYLNNLNARSDKSGSIYGIEAKELYRDNKNKLKFKPPIPLDDFRAEAKKHLENTLVSIKAKNKVTTININTTKKKGGLNKKKQLTPRGQLHLETVYGSIKQYVTKEEKVGANFDEQIILTVANKKCREALLKRLKEFDNDPKKAFTGKNSLDKNPLYFDTLQTYKVPAKVKTVSLETIYTIRKDITPDLKIDKVVDPQIKKVLENRLKEFEGDSKKAFINLDENPIWLNKEKGISIKRVAITGINNAQALHSKKDKEGHLILDENGNTIPVDFVSTGSNHHVAIYKDENGDLQDTVVSFFDVTTRVNLGLPIIDKSYKEKEGWQFLFSMKQNEYFVFLNEQSGFNPKDIDLLNPENYHLISPNLFRVQKFSKLQYGNSFIREYVFRHHLETKLNDNKELKDMSFKNIKSLTPLEKLVKVRINHIGQIVSIGEY

SEQ ID NO: 6284 - protein, 1745 aa, unidentified
  REGION 1..1745: note = Description of Unknown: Cas Enzyme sequence
MKKILGLDLGTNSIGWALIDNEQKKILGMGSRIIPMDEGEIGKFAEGVKISKTADRTNFRGIRRLRERNLLRRERLHRVLNVLGFLPEHYTKEIDFEKRFGQFLEETEPKLAWKKNGKKDNGKDKFEFLFQDLFIEMIEDFKKSQPQLFYIKKNGEETKIPYDWTIYYLRKKALEKAISKEQLAWLILNFNQKRGYYQLRGEDQEENPNKLVEFHSLKVVDVKPEIKYNLILENGETYYRTSETSLLNWKDSYQDFIVTKYADNTGKEKQSFFLKIDASVLKSRKPKSSKKKAKEIEGEQSIKIVDVIEEKQDKIWYSLVLENGWIYRRESNVDLSDWKDKIREFIVTTDLNDDRTVKIDTDGKESRSFRAPKEDDWTLIKKKTENDIDKYIKEHKTNNDLAGTVGTYIYDTLLKNPKQKIIGKLVRTIERKFYKVELRQILQKQIELQPELFTNELYNDCVRELYRNNEAHQLSLGKRDFIHLFLDDIIFYQRPLKSQKSSIGNCALEYQLHKINKKDEQGNTIKNVFEQDENGKDIEVKEYLKAIPKSNPYYQEFRIWQWLFNLKIYQKDDDKDVTDDFIKNTSDKENLFSFLMTKKEVNHKDILHYLIVPKVKEKFPDTKPKALKEETAKEINKHRWNYVYNSEKDESKLYPMNETGSQIRTRLEKVTNLPDNFLTKKIEQELWHIIYSVNDKNEFEKALESFAKKKELYYIPKESRDLENPDKGCFVYNFKNLVWKEKSYGSFSEKAIKKLLPLMRIGKYWNFDAIDGNTKQRIQNLQNAEVDESIKNRVREQAHKEKLDKNEDFQGLQLWLAQYIVYDRHSEAEISGKWKSIADLEKYLDEFKQHSLRNPIVEQVMTETLCVVKDIWQHYGKGAEDFFDEIHIELGREMKNTAEDRKQMTNQITENENTNLRIKTLLMEFANDEYFKNQEDYKDEKGDTPAFYKKGNNPVKAFSPTQQEILKIYEDGVLNSGIEIPNEVSEIIKKFKESDAKKQPTKTEVDKYKLWLEQKYKSPYTGQIIPLSKLFTPDYQIEHIIPKSRYFDDSLSNKVICEAAVNSLKDKQLGLEFIKNHHGEKVTLGDGTKNTVEILSEDRYKTFVKEHYDKNRSKRNKLLLEEIPDKMIERQLNDTRYISKFISNVLSNIVRTDKDDDGVNSKNILPGNGKITSTLRQEWGLNDVWNTLILPRFERMNHLTNTTNFTTKNKEGHTIPAIPLELSKGFQKKRIDHRHHALDALVIACATRDHIQYLNNENAKSQKHHLQMGLAKKLRKMETVKVKKWRRNDNNVWEKTDEKITKTVPKDYLKPWDSFTVDAKSELEKIVVSFKQNLRVINKTKFTGLTYKESKEKSKDRNWAVRQPLHEETVSGLVKLSWVQVDKEKGEITTATRKALDKNFNLSKIEKITDTGIQKILTNYLTQDKFKIVNSKGEVSYNTEFAFSPEGIEEMNKNISQFNNGKFHQPIFKVRIYEKGTGRFQLGIKGNKKNKYVQGAPNLFFGIYLDKEGNRNFETIPLDKVIERLKQRISSVPENKTIEKKKEIHELRLQFHLSPDDLVYVPTEDERENINAIDFNNLTKEQKERIFFVNDFSGSTCYFRPNRIAKAIVAKEVDMNYDEKKKKTTGSFDTKTASFEGKQIKDICIKLNVGRLGNIIPFSNIKFYPNPSHQPDEAKEGVSYFKTAKISTLQQSEERMLLHTSNMNPEERMAYLQQLRETTQNSNLSEDEKISILSKFKINPTDENS

SEQ ID NO: 6285 - protein, 1428 aa, unidentified
  REGION 1..1428: note = Description of Unknown: Cas Enzyme sequence
NILGLDLGTTSIGFAHIVEGETPEQSSIVRIGVRVNPLTTDEQTNFEKGKPVSVNADRTLKRGMRRNLDRYQLRRNNLIDALRKSGIISAETKLAEDGKNTTFSTYRLRAKAVSEKIEKEELARVLLAINKKRGYKSSRKAKNENEGQAIDGMAIAKRLYEENLTPGQLAFMLLKEGKKHIPDFYRSDLQAEFDKVWYCQQKYYPDVFTAEFYQELQGKGQRATSASFWGKYKFNTAENKGTREEKKHQAYEWRSKAIKEKLTKEEAAYVITEINNNLNNSSGYLGAISDRSKELYFKKLTVGQYLHHQLQRNPHTRLKNQVFYRQDYLDEFEAIWSEQSKHHSELTQELKTEIRDITIFYQRKLKSQNNLVSFCEFENREIEVEKNGGKVKCQVGLKVAPKSSPLFQEFKIWQVLNNVLIRKKGSKKRVATANTERYNEEAEVLALDLQAKQHLFEELNLKGNLTAGKAIELLGYKPGEWELNYSVLEGNRTNKALYEAYLKIIDLEGYDVKELLKVKSNKDEVELSDLNVLSSEVKTLVKTIFGNLQINTDILDFNPEKEGNAFEQQASFQLWHLLYSYEGDDSPSGNEKLYELLERKFGFKREHGRILAGISLSADYGGLSTKAIRKIFPFIKESEYSKACELAGYRHSAASLTKEEIENRPLKDKLELLKKNSLRNPVVEKILNQTVNVVNALIDANSEKDKDGNIVKYFKFDEIRIELARELKKNAQERAEMTANINAAKKTHEKIEKILQNEFNVKNPTRNDIIRYKLYEELKNNGYKDLYTDTYIPRDILFSKLIDVDHIIPQARLFDDSYSNKTLVFRKDNLKKGNRTAMDFVESEFDKEKNEAYIKRIETLFETGKRNPGEGISKAKFMKLQKRESDIGDGFIERDLRDTQYIAKKAKNILYSITRSVVSTSGSITDRLREDWNLINIMQELNLEKYKKIGLTEKVEKKDGTLKERIVNWSKRDDHRHHAMDALTVAFTKRSHVQYLNYLNARYNEKHKEHKHIKGIEEKETHWIYDDQGNKKRVFNLPIPEFRELAKEHLKGVLVSHKAKNKVFTKNKNKIKTANGVKIKIELTPRGPLHKETVYGKISVPVIAEEKIGAKFNLEKVNTVTNSLFKQLLTKRLFENGSDPKKAFTGKNALSKNPIYIDEDKTEILPEKVKTVTYEDDYTIRKDLTPENFKDIKTIEKVIDTGIRKILLARLNEYDSDPKKAFSDLDRNPIWLNRDKGISIKRVTISGVKNAEPLHYKKDHLGGYILDENGNKIPVDFISTGNNHHVAIYMDEEGNLQERVVSLFEAVQLVNTGLPVIDKEYNKGLGWQFLFTMKQNECFVFPNPETGFNPNEIDLLDAKNNTIISPNLFRVQKLATKNYMFRHHLETNVEERKELSKITYRLIQSTGYLKDLVKVRINHIGQIIKINE

SEQ ID NO: 6286 - protein, 1457 aa, unidentified
  REGION 1..1457: note = Description of Unknown: Cas Enzyme sequence
MNKYISPIAVDLGAKNTGVVFSHYKEGEEPISHRGVTFVLDANNFTFSPKDRLVNRHRMRGEQRRKLAKRLFFLILDKEYGLKQEQSKIWEFIRGLLNRRGFTYLQEESESDEKITVPLDFAKYFFPKEFENCKKDVLDFIREQADEEEAKALTVWKTLRDTDKKEELQKFLAEYSDYTRRDSESYLKQIKETAKGLIKEIEQGNKPRKKYLEEIWIDIQKKSELTKLLAKSKKPISVKEFYHLIGHISNIQLRGLRKYFNDINMSKGNDYWDEKRLTKYYVLWLKSWHAPKDKPSRQYQSDLIRQVEKEGKSILQIFFDNDPKISIPPFEDQNNRRIPTCQSLLLSAIELDKRYNGWRDIVKELTEKQDFYKVDNIQSILDEQKKSLQGFSHNNQSGKNLTKEKIPFDFDSILFQRVLETTKSLDLYKLRLLVQVKQLKQDDLASSLEGREKLKKIIQNAEENLRAVLKPEQKKLLLTIAEKFYQEITEARAGIWDENNSILAKCNSKTKHRNKMQKEVVEQVLRFKFNSEISFEYFKENIWYHPIKGKSTVKSLCENIEKERKEIGNHFNEAYQQYTRKVFAIAKSESKDLALINKSLSKEKGNNKSFSTIYENIELIANFIGSSLKQSPLDIKSYKNPFSLAQLANILEGDQAGFYKICSACQKENSWRAELEDLENSKKEVSRVAKATQLSADTGRPFDGQIDRIVTRIAKEVTNKKIHQLKGHFKDGDKIELPILMENNQFSFTEEALDLKKASKKAKEKSKRNIEKSESRLLSKENRIKSDSGGICPYTGSALGEDGEIDHIIPRSVTKGTILNSELNLIYCSHKGNQEKGNKEYTLQNINQKFLKHHFKTTNLDSVIAEIDKIILEVAQKNREAQRNYIIADSLEPYQRICLKLALLDRSLRNKVIPYLQTHSKALVNGTQAWFYKKLKEELESRLQSEYKKSEIKIVPHYFGGRDDDFILGELRNKLASYNKNYKKAEIQTEGSHIIDASMLFAHSLLQSDKNKGFLKSPLLKEELQNEGEWIESLLPEEIEVKYIERTAKYRKQNPNSNSLFKAGMYAERFISLLVDNKGIRFGFTPDKASPYIDTKFNEEIFEKLKPFLLYRGEFIQENLEHFLKLANHPKYSLFKLHRNKVKEYLQTCSKDDELGNFLESLRYITQNKKIFDEKLNLNIDEKTLSKKEKFEIKFGKKKITSFEIIMPYVDEWNKLKDYLKGCKPENIENKAREFFTKDLIRNKSKHGTVSRKLSLPVKSEPSGGFRIKRTDDFNELIYQVQAGETTNIGFEKNNNEVNFSNSILAKNYLSGNVSAYKLEDKISANDFVYFDEWRNLPIANDLKDAGILKLEMAPGTKSRCYIKATILLEVLLNILFDGKEKSSLKSKIYKLNLYDKKDKEGFVKLSRFLETHISKQRDFISINKLNNKLVEIEYVTDGFPSSLKSLYNQGTKIENP

SEQ ID NO: 6287 - protein, 1050 aa, unidentified
  REGION 1..1050: note = Description of Unknown: Cas Enzyme sequence
MRYRLALDLGSTSLGWAILRLGSDGAPCAMVKAGVRIFPDGRNPKDGSSLAVTRRAARAMRRRRDRLLKRKARVMQALIELGFFPSDRIERKALERLNPYELRAKGLDHALTPHEFGRAVFHLNQRRGFLSNRKTDKKDSDSGAMKTALSGMRLALDANGTDGKPRTVGELLHRRFTDATKPPRERTVRARYREARVPKEGGGTRIDKSYDLYMDRAMVRAEFEALWATQARFDPARYDAAAKQALDYRLWHQRPLRPVRPGRCTLMPEQERAPLALPSQQRFRILQEVNNLRWLDASLREHTLTLEQRDAVVHALERGNASFDTRIPKLTGLSGAAKFNLADAKRNELKGNVTSLRLAKKDLFGDAWHRFDEAQQDEIVMQLLTEESEAALVAWLQARCGLDEARAERVANASGLPEGYGSLSREALARVLPELRRGVVSFAEAAKGAGFHHSRLAANEEVPGRTFPIEKIVEGTGEIQQLHVFKELPYYGEFLQRHVGFADPDATEADLPEKRFGRIANPTVHIGLNQVRKVVNALIRRYGHPSEVIVEVARDLKQSREQRMDAQKRQADNQKRNERLRQQAAGLRGCAPEQVKHADIERLVLWEELSFDIASRRCPYSGVQISAQMVLSPEVEVEHILPFSQTLDDSLNNKTLATRQANRVKGNRTPWEARHDFAAQGWMHDDILARAQQMPRGKRYRFAEDGYQKWQQGGEAGQGRSFLARALNDTRHMSRVAREYLSLICPQDTRVIPGQMTAMLRAKFGLNHVLGVDGEKNRDDHRHHAVDACVIGVTDQGLLQRFARASADARQRQLGRLVETMPLPWPTYAEHVRRAVNNIWVSHKPDHGHEGALHNDTAYGLLPDGYVRFHKSVEGARTLQTESLRVIEMSAPKAAERHGRLPNGEPRPYKGHKGDSNYCIEIDRGDDGRWDWQVISTFDAYQRVRRDGIAGLRNSRLSARGGPLVMRLMIGDCIRAEFKGRLRVLVVKKIKSNGGIFVAEHQEANVRQREDAKDTSLVYGSFSANTLRKAAGRAVTVSPAGDLHDAGFRP

SEQ ID NO: 6288 - protein, 1079 aa, unidentified
  REGION 1..1079: note = Description of Unknown: Cas Enzyme sequence
MPRERKIIGLDLGTASVGWAYLKLSSNGNNIVSGEILGSNSRIFPAAVEGRGKDQKPKNRGRRDARHQRRQHRRKRQRRNKLRTYLIESGLLPNMSTDQLNAQFSDMRRFDPYALRTRALESRLEPYEIGRALFHLAKRRGFRSSRLHGKPKEDGPVLKEIGNIKANMASAGYVTPGAYLNSLEKKRGSELTGRRGYMARDDHEKEFERIWERQSSYYPNLLTAELKTKLWDSIFTQREPRWDRGLIGKCTFDPKKKRCFLAHQDAQRFRYWQDINNIRVQNTDTYKRFPLTFEQKEHLATVLENAEKIEVASIPRRLKMKGSFKVNLSGSKKHLYGNRTAAAFRTKHFKQTWEGLREDQRDQLINAIYRIGDDDRVLTKHLAEKWNLDRGQIESVLNINLEQNYSRHSLRAIREMLPFMKQGYRYDEAFRLAKYKRAFRSAWDLINDVNRERVFSDLILFKGSQTDITHLKTRWGFSDTLIERVERTYADIKTKFDPLGLEELEPLDENLRNPIVQKALTQVRKVVNELIRTYGKPDEIHVELGRELKMTQLQKEAYEKQQRLNEKLNMEAEVELGPLNNNHPVTVKQKQLYRLWKETNGVCMYTGNSIPLQALVGDGIEIDHIIPYERCWDNSYMNKTICLALENQVKGKRTPWEHYGGDKDRFYQILTRAENLPETKRKKFEMTTQEVAEIDWAGRQLSDTRYISKKVRDYLIQLFDKPEAVSIVTGQSTELLRRNWGLNGILQQDGTDAKNRRDHRHHAIDAIVVALTDRELFNFISTLAGRNKAKMHSMFRDFPQPWPSFRSEVESAMKKLEAPTFSSLEDAITVSLAPTRRVRGEYFKQEAYSKLSSGEFVHRVALSKISNSNLKKIVDDAVREIVRVRLDEHAGIAQSAFAEPLLHKDGKTPIRKVRVIEDKFVERKAHVENHPDGTPIRFYASGGNHHAEVFENIATKKRRIKVITLHEAFENIRQCINRGEVPSPNSWEFQENERPLFTLAANDLIEYRGIDGALRVFRIQKMSQSGNEKTFEIVIRPPYDGFTEPNEGTPIRIRSRESLLGITRKLQVDPLGRLTQARD

SEQ ID NO: 6289 - protein, 1082 aa, unidentified
  REGION 1..1082: note = Description of Unknown: Cas Enzyme sequence
MSRTRTVLGLDLGPTSVGWAFLRLSYEGSRLTSGEILGTNSRIFPAAVDGQGKSQKPKNAARREYRHQRRQHRRKRQRRNRLRSILIANGLLPLETIAESSRQFNNITAEPEKCANPYRLRAKALDEKLELYEIGAALFHLAKRRGFKSSRIHGKSKEDGPVIKEIEHVRSEMAGFRTIGSFLNSLGKKRGSGSSNRRGYLARDDFEKEFEEIWSKQQTFYPNTLTNRLKQAVWEIIFSQRQARWDRSLIGKCSYDNKKKRCYAAHQSAQRFRYWQDINNIRIQEKTTFVRRSLSRDEKRRLAEMLERTEKISLDAVTKRLRIQGSFKVNLSGSKTALYGNRTAAAFRTKSLKSIWNNLTEEEREKLINAFYRIGDQDAILKKHLKEKWNFNDDQIENLLMVNLEQGFSRHSLNAINKMLPFFEQGYLYNEAYRLAKYREAFRAKWENIQELDREKIFEDLIAFKGTDSEVIHMKIRWGFDDELIERIEKTYAGLKNKFDLPNLEKLEPLAENLRNPIVQKCLTQVRKVVNEVIRTYGKPDEIRIELGRDLKMTADQKAEYEKQQRRNKKLNDDAERELGMYNGGTRLTSKQKLKYRLWRELDEFCDRRCPYSGEYITLEMLLEDGLIEIDHIIPYERCWDDSFVNKTICFGHVNREKGNRTPREYFGGNENGYYQFLQRVEDFPDAKRKRFEMKSEELADIDWAGRQLSDTRYISLKAREYLLQLYDNAQAVTVVTGRSTELLRRNWGLNKILNPDGMDDKNRRDHRHHAIDAIVVALTDSGLFDYISTLAGQNREEMHSAFRNFRKPWLSFFADVEKSINSIVVSHAPIRRVRGEYFKQEAYFKLTDGKFAHRVDLNKISNTNWRKIVDGGIRSIVKARLDEYGGNAVQAFTEPLYISHTNPKKKDVGKNTRISKVRVYEDKFVERKAHIRYGHDGKPIAYYASGGNHHAELIENIRTGKRRIYVVSSHEAFRNVRMSVMNGGSASPNTWDLERDEKPVFTLAANDYVEFCGENNELNIYRVQKVSQGEKGFEIMLRSPYDGFTEAKEGEPVRIQGVAALSRITRKFQVDPLGRLSETGD

SEQ ID NO: 6290 - protein, 1464 aa, unidentified
  REGION 1..1464: note = Description of Unknown: Cas Enzyme sequence
MEKTKKKILGLDLGTNSIGWALIEQVFDNKEGRIIRMGSRIIPMGQELSKFEQGQAQTKNANRRIARGMRKLNKRYKQRRNKLIYVLQQLEMLPEQIILAEPFDNPLKLDRVSILPIKKNQKQYSALDLLELRVKALNEMVSLQELGRLIYLFNQLRGYSGGGDEPDKEDNNEDESENIEKKGKEIYVIFGKIISVSEPETIIYNGKELKKRKIKFETEERELEGDTFLELLKTGESLELLVNITTSKKHGEAITFKLPNKTNWRKKMENLEKELAELSKEKGREIYLSEYFLSILKENKWSKIRNNVVLRSRYQSEFDKIWETQSSIEGTPLHNVLKNLPQEKLSEILQFIFPGTKETQEKYRQEGKAKGLYHVVRNQIIYYQRELKDQSHLISDCRYEQGEKALAKSHPVFQEFKMWEQINKLTINTKIEAGKTRKGEIKYKYVDRPIPTTLKEWLIDELQDKKEISFGVVFNKLKKEYKLQEGVEFLNGMNPKAKLRGNETKLMLKKALGEQFWEQLGLSEKSRQIELWDILYNAKGNEYDIESERTSKVLSFIKKYSNDVANPEQTAIQISKIKFSRSYAALSLKAIEKILPLVRSGKYFSSDFSDSLKETIIKLVNETVSDPFEKAAQEYLENNVEVLAEGGIMNAYATILVYGKHTAKEYSEEEKIKNFYDIKRLTPGELRNPLVEQLISEALMVVKDIWRQYGKPDEVRLELARELKNNAERRNKIYKANNENQKANDEVKNLLTELKQEITLNNIEKYKLWLSQENLADEYVKQYKDPSKSEIEKMKLWREQGHVSPYTGQPIPLSELFNRERYDVDHIIPQSRYFDDSFVNKVICEKSINKEKSNRTAMEYFELGSTIPSVFSKEGFINHVNKYFQGAKRKNLLATKVPEDPIARQMKETQYISVRVKEELNKIVGNENVKTTTGGVTDYLRNQWGLTDKFKTLLKSRYENVQPLVAEMEYEKYVSALEKKKKEYKEKNIPFTDIELSKEQSIESFNRNYFQTKNNKLVIKGWTKRIDHRHHAIDALVVACTEPAHVKRLNDLNKELQTWLDEHKKDLLPNFEGSPSELLDEILNLNEAEREKIFKQIDKFKTIDMPWIGFPEDAEKEIQNIIISQKPKDKLIIQYEEKKDKNGNYQKTEKLQIKIRGQLHEGTLYGKSQGIESYRIPLSKFAGKKFATDKAIEKITNEYLKEAIKEHLEKDFGNKKEDAFSAEGILALNKKLAEKKRLSGWKRKGKKKKVGDDAPHTPISSIKVFYRDPAKIKKKKGQEEVDEALERLDRKKAYNETLLVKTGDNYLFAIMEKDSNRIFDLITFFDAANLLKDEFNKATDKASFSKEQIFKKYFEEKNKAKLLFTLKQGDPVYMPAEGEEIITDPQSNLYEAFWKDKVARSKSIHYVTKYSGKQIYFIKHDIADPIVRGKEFGSQNAYEIIDGRSIKQHCIKLNVDRLGNISKG

SEQ ID NO: 6291 - protein, 1111 aa, unidentified
  REGION 1..1111: note = Description of Unknown: Cas Enzyme sequence
MADKTPGPLTFGFDIGIASVGWCVLGEDRIVDLGVRCFDKAETAKEGESLNLARRTARLMRRRLRRRTWRLTKLARLLKRSGLVPAVHQVQQPTAISPWKLRVEGLDRCLDNEEWARVIYHLCKHRGFHWISRAEEKKAEGDAKGEGGRVKKGLSDTQRRMIDKGYRSAAEMVLAEFPDAQRNKQGDYGKALSRVLLGEELALLFRRQREFGNPHAGATFEAAILGSGDRKSGLFWEQKPPLAGADLLKMLGRCTFERTGGPDGKGEFRAPKASFTAERHVWLTRLNNLRIVVDGATRPLNDEERGIALPLPYEYDTELTYKRLRTALKGTLDNFNFAGIADDKEKDTLVKLPAWQQLRKALKNAGLETEWKSMAGMATGGEPTLLDEIARVLSVFKDGDEVETELRKLNLPGGEAMIDALSEISFDKFHALSLKALRKIVPHMEAGLRYDVACASAGYHHSQLHEAGAGGHKYLPPLYSGRDKDGRMVFDDALDVPRNPVVLRALNQARKVLNALVRTYGSPAAVHIEMARDLSRPLDERNKVKKAQDEYRERNEKDKAAFSAEHGIAAKSREFEKFQLYREQQGKCAYSLKPLDLDRVLRDIGYAEVDHALPYSRSYDDSKNNKVLVLAEENRNKGNRTAYEYLTAFPGGETGERWRNYVAFVESNKSYRLAKKTRLLRKDFGSKAAEEFRERNLNDTRYICRFFKNYVERFLKLDDRSKAKRCVVLNGLTTAFLRARWGLLKIRSESDRHHALDAAVVAACSHGMVKRLSDYSRTKELGKVREGFPDPDTGEIVDPAMYQQLHVHFPDPWPHFRAELEARLYIDDAAEMRSRLEIFGTYPEGTLAELRPLFVSRAPQRRNGGAAHKDTIYAQPERLKEQGGVTQKVPLSSLTLKDLDRLIDPHRNEKLYAAIRERLEAFGGKADKAFPPSNPLRKPDRDDNLTGPVVRSVTTVIDKLSGIPIRGGIAKNDTMLRVDVFRHKKDGRFHLVPVYVHHAVAKELPNRAIVAFKDEDEWTVIDENFEFCFSLHPNDLVKVKLRDGIRLGYYAGCDRSTACIHLWGHDRNTLFGKDGLIRSIGVKTALAVDKFNVDVLGNIYPAPKEERRGLA

SEQ ID NO: 6292 - protein, 1435 aa, unidentified
  REGION 1..1435: note = Description of Unknown: Cas Enzyme sequence
MKKILGLDLGTNSIGWALIEQDEVQKTGKILGMGSRIIPMSQDILGEFDKGNSVSQTAERTGFRSTRRLRERFLLRRERLHRVLNILGFLPEHYAQEIDFVKRFGKFMPETEPKLVYKNKSFIFKKSFEEMLKDFKESQPQILINKNGEPALIPYDWTIYYLRKKALTHKIEKEELAWILLNFNQKRGYYQLRGEEEEENPNKLVEFYSLKIVDVIADEIQKGKAELWYSLVLENGWVYRRASKTPLFDWKDKTRDFIVTTDINDDGSPKTNKEGEIKRSFRAPSETDWTLIKKKTEQDIEQSHKTVGTYIYDTLLRNPKQKINGKLVRTIERKFYKNELKQILGKQIELQPELFNNDLLNDCIRELYKNNDAQQQSLQHKDFIHLILNDIIFYQRPLRSQKSSIGNCSLEYYKYKDKEGTEHKQFLKAIPKSNPYYQEFRIWQWMYNISIYRKEDDLNVTSEFLNNIEDWEGLFSFLNNRKEIEQKALIRFLLEHKGYKGKALTAEIEKYRWNYVEDKKYPCNETKTMIATRLEKVERVPDAFLTNAIEYKLWHIIYSVNDKIEFEKALKTFAHKHQLDENSFVDSFRKFPPFKNEYGSFSEKAIKKLLPLMRLGKYWSWDNINSNIKDRIQKIINAEYDEKIKDRVREKTIDLTSESHFQGLQLWLAQYIIYDRHSESSSTDKWNSIDDLEKYLHNFKQHSLRNPIVEQVVTETLRVVKDIWKVYGNGASDYFKEIHVELGREMKNTAEDREKITRQVAENENTNLRIKALLAEMINDSKVENVRPYSPMQQEILKIYEEGVLNSDIEIEEEYVKISKMAQPSTTELKRYKLWLEQKYKSPYTGQTIPLNKLFTPEYEIEHIIPQSRYFDDSFSNKVICEAAVNKLKDNNLGMEFIKKFHGHKVTDTLTILDVEAYENFIKQHYAKNRSKRNKLLMEDIPEKMIERQLNDTRYISKFISTLLSKLVRDNINDDGINSKNLIPGNGKITSQLKQDWGLNDVWNDLILPRFERMNALTNSNVFTAWNENHQKYLPTVPIEYSKNFQKKRIDHRHHAMDALVIACATREHVNFMNNEHALKKGKSKDEKQNLRYDLRNKLCFKKYNNDSKESYKWIFYKPWEKFTQESKEAIENIIVSFKQNIRVINKATNYYEKYVLKNGEKKKELVEQTGTNWAIRKPMHKDTVSGKVELYWYKTPKGKILTASRKSLDTSFDLKTIESITDTGIQKILKNYLKSKGDNPELAFSPEGIEDLNKNIKIHNDGKHHQPIFKVRVFESGSKFQVGQSGNKKHKYVEAAKGTNLFFAIYEEENGKRSYESIPLNEIIERQKQGLPSVSFKDKNGFYLSPNDLIYIPTADELENRINIEFTNLSRENKKNIYKVVSFTGSRLYCVPYALATTIVNKLEFTQLNKIEFTKEKETCIKLAVDRLGNISKA

SEQ ID NO: 6293 - protein, 1170 aa, unidentified
  REGION 1..1170: note = Description of Unknown: Cas Enzyme sequence
MQDKRNTSIVFGLTIGIDAVGWAVLAENRIIDLGVRAFRRAEAGENGEPVNLVRRLARLARRRLRRRAARMSSLFALLQKHGLVADRSQLARGGAKSPWELRVEGLDRCLTPVEWARVIYHLCNHRGFHWGRGMAPSAAETASEDGSIKEALAKNLAKIAAGHYRTAGEMLVKETQKEALIEHEATDMNAAEAQGASQGAPPIAAGGAVPGTPPISALTYRNKAGAYDKALSRAVLGDEMACLFAAQRAAGNPAASPELEVAILGNGDHKSGIFWQQKPTLTGTQLQAMVGECTFEKGEYRAPKASFTAERHVWLTRLNTIRLSLNGDQRPLTPAERAVALPLPYHQAGDLTYRQLRGALTKADLWPEGACFAHLAYPTPAAAGLKGPAPDPENQVLAKVPAWQALRQALQNQGLDAEWQALATAALCGEAGLLDEIGVILTLNKEEDVIMAALRGLPLPGRSEAVIQALLPVSFSHFHALSLRALRRIVPFMAEGLRYDQACKAAGYHPSQVGEPQVRRKYLPSLYLGRTPSGGMRFNPSLRDMPRNPVVLRSIQQGIKVLNALSRAYGSPTRVHIEIARDLPLPFQERAAIRKAQEKFREAKDRAKAAFAVAFDFSPNGRDLKKFQLYQEQKGLCAYSLQPLDLQRVIREPGYAELDHVLPYSRSLDSGQANLVLTLATENHAKGNRTPYEYLSSFAGGEANDRWQRFVATVQSNPLLRQAKRNRLLRRDFGQNSAFAYRQRYTTDTHHIARWFKNHVDAHLALSAPDAPASCVMVNRQVTAYLHARWGLHKDRRDDIRHHALTAAVVAACSRGMVQRVAVYARYQELAGVPVGFTDPETDEVLTAEALPAGEDKFPQPWPHFSAELRERLMLDDPDGLREAMRAYGTYRAEDLAALTPLFVSWAPQRRNGGGAHKATIYAQPARLKAQGAVTERVPVTKLTLSDLDSLVDSHCNVKLYAAIKERLLAHHDDGIKAFPPDNPLRKPGRSGALDGPIVRKVTRRINKMTGIAVRGGLARNDTLLRLDVFRQREAGKFHLVPVYAHQAVARTLPDRAIVASKPETEWTRIDGRFAFCFSLYPYDLVRVTTKTSVITGYYLGCNRSTGALQLMVHDRARAQGVTQGIGVKTALALEKLHVDVLGQVYRAPAEVRRGVGRAAVGTPPPAGAA

SEQ ID NO: 6294 - protein, 1378 aa, unidentified
  REGION 1..1378: note = Description of Unknown: Cas Enzyme sequence
MKFKHIIGLDIGTNSLGWCLIKEYEDESIEIVKTGVHIFPIGTIVDDVSNKEKTRNEQRREYRGASRMRYRFKLRRKNLKDALTELGMLSDFSKYHKAKGKGQSYELYKLRADAINPKNKIPLEEIGRIFMLLNKYRGFKSNAKKLAQKDKEAGVVNAGTDQLEKFIATSNSKTIGEYFFKMHEKARQWYEENKWHNPNEPIDERAYSAENGEFILFNSNGIRRHHGRYTLRKMYTDEFDLIWETQQKHHPQLSGYMPEKKHDSSFKGNKQEYDEIMKLPYRECIDALKKFKDTKYWHIKEYCIYYQRPLKSQKKYVSNCQFERGEFESERYTAVEHGVEKTKEKRIWKKKAKKACPKSHPLFQEFRIWQKLHQINFSSTELDEFQKPLKPEWLPVLADALMENFKVCLNGTPKVKKDGKPYFGNILQEKGLIQNADEYTFYIDKTDEDVADDDKNENRIHGNVTYSAFMEALGAETFSKIKNGEFKMTSRKEKSTLWDLWHHLYIAKDGLFKEDDWLKKILTEPTKWNFTEAQADKLIEKGLVGDYASYSSKVLKAILPHMRQGLNEYEALKRAGYVNDDNTVGEKIKLRDKISQLRYQELRNPVVERALSKSIRLVNALLERYQDEIDRSTLEIRIESTRQLRKPRQERENERRKNSDKDKLRQQYAEYLTANKAKLGFAKDIFKNDSIVGKYELWLQMNMNEDDETFIKEFKAFSKITKEQDRLKHKLWLECGRRCPYTGEIINFTDCFSSEVEIEHIIPLSRGLDDSFNNKTLTYRKTNALKGSMTPVEFMQKLGGGALKNFKSRLKNANHDFSDSKKKLFLAENIAVDFSNSQISNTSYIARYTVKKMREVCRNVQFTNGSATAELRNNDWSLSNLLDKIRYEEDFNINMDEIYSNYYRIKKDFRTWYEKKHKTTDYKWKDLLQSKDLKEYIKATNNDLLYWAGEIEKFNEFRNKSGKKDRSDHRHHAVDAFVIAGCSPKIIQTLSTYNSTKESNGLEYRDRIERSFDYDQLKQSIANILVSHSEKQTLIKKRKNRVKTKTGIKLSETYAPQGKLHEESFYSKRNGATVRRVELFDDQRQDKALFSDADKLHYKVKGEIKWHLIPDDELYKITKRRLDELGKNAFTKESMEKIPFYRVSPKSPDKITSGKKGKEGKPVPIVKSVRKRFNIDRTLINLPAKDREGRILTMNRYADNDSNHVIAFYKNGRKSFAKPISFYESVKNKRDKKALIPDEVEYKDVKYGIDNQLPWLKAGDIVFICLKDDTIQNIDWKNFSLLKDRLFKVKGFSTSITPNPKYGGYEYGNTSLLNIRIAKTDSYPSQKKIEDALTTNSFTLSHDKFNAIKVRLNILGEIIAKGQECFEPIQVASKELKP

SEQ ID NO: 6295 - protein, 1524 aa, unidentified
  REGION 1..1524: note = Description of Unknown: Cas Enzyme sequence
MTKILGLDLGTNSIGWAVVDKENNKIEDCGVRIFPEGVVNISEGEEREKSKNALRRENRQTRRQVARRRMRKIKLLELLIEQGMCPLTHEQLMVWKHWDKHKKSEGRHFPKTEEFIRWLKLNPYELRYNGINGDLTKMEFGRFLYHIIQRRGFLSTRKEKETGKIYTGKENMVGIDDTKAALNGNTLGEYLYSIYPEENESFKYIRNKEGEDLRIRGRYTLRDMYVKEFEKIWQKQASKLGLDKIYVTKQKVVFLNGSKKRNRNAKKIEYLKKNRDKVDVEEIVVEREKANKTLTRVTSYEKISLHDHLGGKVEIKDDNIKFDNKDSVLFYQRPLRSQKSLLGKCRYEKNKTPVSISHPDYEIFRAWQYVNTIKFGNNIPLPLEQKKVIVDYLKTKKTAVKFADIVKLIQLSHENFNYNEDDKVEGCPTIAQLSKLFSNKGWNYYYHKIWQDFYFFDDSEKLFKKLSKTKEYELKENIQLEDIKKVSIKDDKYSNLSLKAIRNILPFLQRGLLYNQAVVLGGVVNAFNYKIQDDEIPRWKRFTDYHEIIIKDILSILKENNKQGETIEKIKKYLSNPENHYGFENDDPAFKKLYHHSQEVVEKEKSDKISEIENLRNPIVQRAVQEMRRIVNELLAKYGKFDRIAVEMGREMKLSKKGRRKVSQMIKQNFEANENVREILKEYQLAPSRENIQKVLLFNEIQAKAGKVICPYTGKTLNISDLLGKENKVQIEHIIPRSFSLDDSFANKTICDAKFNQLKGNLTPYQFYQKNKDKKLWGVASWEAIEQRAYSVLPFNKAKRFTTRKTEWKTEEFISRQLNDDRYISKKTKEILSEVCNEILVMPGAVTADLRKLWGLNNILQPTIGLPDGDFSIDREKDLNYWAVTDGKRNIKKLYPMDNPRPDVAAEETVVTGYVTKNKFKAHRLNLEFEAPDIPDGKYYVKFQVSKPLKTLRQYVDKPDYGDDEIILRGMINRNKFNHDSLKQRVNAPENIDDGSYWAKFKIIEKRFEEPQKNKRPENKNGICLFGKVKNHVFTSYIYQCETDLDDGQYWVLLDLDFENIEFIATKNEKPEIENNQLLVLGDINEEGTFTALHDIQLQFNWNDKPGRYWAVLNILSEKPEFAAVENKPPKIENDEKLIEGKIWVDHKTGEIRFDPKKNRDDHRHHAVDAIAIALTDYNIINQLNRYNAQKDALEKGIATERPYFEEPWENFFQHAKEAANKILVSHHKDNTVTKKVSMIIEKNGKKYRSEGQAVRGQLHKETVFGKRKPPQKEQAFHVRKPLESLNDKQLNKIVDDRVRSIVKHGREREKFITEQIKALKKDRAKAGDEEEKRIDEQVKLLEEENRQLYTLPNKKGDRVPIKKVRVRENLGNTEMLKPSENTNQYVNPRNNHHVMIYKDSEGQLRESIVTLWEAAERKNQGNPVYQLPNDGVEIVSILEVNDMFLLGLDKEQTNDIRNLDKQILSKHLYRVQKLSSMYYTFRHHLASTVSNPDEEFRIQSFGAWEKVNPVKVKINQLGKITWV

SEQ ID NO: 6296 - protein, 1132 aa, unidentified
  REGION 1..1132: note = Description of Unknown: Cas Enzyme sequence
MRYKIGLDLGVGSVGWAVLKTDEQGNPIKIEDLGSRIFDKAENPKDGSSLASKRREARGIRRRLRRRRHRRDRVLSLLENYNIISKKQVEEMYNNNDYKFEKDVYELRVEGLDTLLTSKEVARVLINFVKRRGYKSNSKSDEAENKDTGKLLKATIQNDNIMKEHNYRSVAEMYLKDSSFVKVLSNGKKIRKIRNTTDEYKSTVKRADLVSEIKLILKKQSELNPKITSEFVDKYLEIFESQRSFEEGPGGNSIYGGNQIEKMLGKCTFEKNEYRAMKATYTFEYFKLLQDINHIRIEYVESVDENRKNVSNVLNEVQRKAIIDIAKRKDTIKYSDIRKAIDMPKEARFNTVRYDYSLSKDYNEAIKLSEEKSNIKEFQSYHKIRKALDKVEKNLIEKYSIEALNKIGYALSVYKSDDKRISYLKANIPNITDEIIEKLLPLSFSKTSNLSIRAMNKIIPFLEQGLTYDKAVDKVYSDFRGNINIKRRAKLSLNNLQEEIPNPVVKRAVSQTIKVVNAIVDKYGNPESVNIELARELSKTFEERRKIEKDNQDRMITNEKVKREIEELGKINVTGQDIVKYRLWKEQGEICVYSGKHIKPEELFSELVDVDHIIPYSISFDDSYNNKVLVLSSENRMKGDRVPLQYLRESNKDDSDYIVRSSSIYQGRNNSKKLKKLLIESISREDIEGFKERNLKDTQYLSKVVHNLIKNNLIFSKNDNIKVKVSVVNGSITSHIRKRLGIEKIRSNGDEHHAIDATIIACVTPRLIQDITNFYKKQEAFYYKNGKDFVDRYTGEIVEFNKLAQENERYFPEPYNGFRKELEIRTLRNEELMHEELKRLKYDTYENILKIKPIFVSRMPRRKVTGAAHKDTIRGLRKYDNVYYSIKKTELKDLKLTKDGNDIEGYPEKQKRDDLYLYKGLVERLKKFDGNAKEAFKEDFYKPNKDGTKGQIVRKVKIESKTSSFVPLNGGKSMADNGSMIRIDIFHVEGEGYYFVPIYTAGVLNDKLPNKGCAANKPQSEWKELDDKDFIFSLYPNDLIYLEKEDNIELTSKNKEKVQVKNIFSYYVKAGISTASITIINHDNSYMLPSLGIKGLLSMKKYQVGVLGDIHEVKLPEKRLKFNLKNKKGGKA

SEQ ID NO: 6297 - protein, 1314 aa, unidentified
  REGION 1..1314: note = Description of Unknown: Cas Enzyme sequence
MLKKDYSIGLDIGTNSAGYATVTDDYKVPTKKMKVFGNTSKKTIKKNMLGVLLFNEGQTAADTRLKRGARRRYTRRKNRLRYLQEIFAPELAKVDPNFLYRLEESSLVAEDKKYDVYPIFGKREEELLYHDTYKTIYHLRSALANNDQPADLRLVYLALAHIIKYRGNFLLEGEIDLRTTDINKVFAEFSETLNENSEEELGKLDVADIFKDNTFSKTKKSEELLKLSGAKKNQLAHQLFKMMVGNMGSFKKVLGTDEEHKLSFGRDTYEDDLNDLLAEAGDQYLDIFVAAKKVYDAAILASILDVKDTQTKTVFSQAMIERYEEHQKDLIELKRVFKKYLPEKCHDFFSEPKISGYAGYIDGKVSEEDFYKYTKKTLKGIPETEEILQKIDANNYLRKQRTFDNGAIPHQVHLKELVAIVENQGKYYPFLRENKDKFEKILNFRIPYYVGPLARGNSKFAWLTRAGEGKITPYNFDEMIDKETSAEDFIKRMTINDLYLPTGPVLPKHSLLYERYTIFNELAGIRYVTENGEAKHFDAQTKRSIFELFKLDRKVSEKMVIKHLKVVMPAIRIQALRGLNNGKFNASYGTYKDLIDMGVAPELLNDEANSEKWEDIIKTLTIFEGRKLIKRRLENYRNFLGEDTLRKLSRKKYTGWGRLSAKLLDGIYDKKTHKTILDCLMTEDYSQNFIQLINDDTYSFKETIKNAQVIEKEETLAKTVQELPGSPAIKKGILQSLEIVDEIIKVMGYKPKSIVVEMARETQKTHGTRKREDRVQQIVKNLKDANELPKELPSNAELSDERKYLYCLQNGRDMYTGAPLDYDHLQFYDVDHIIPQSFLKDDSIENKVLTIKKENVRKTNGLPSEAVIQKMGSFWKKLLDAGAMTNKKYDNLRRNLHGGLNEKLKERFIERQLVETRQITKYVAQLLDQRLNYDENGVELDEKIAIVTLKAQLASQFRSEFKLRKVRALNNLHHAHDAYLNAVVANLIMAKYPELEPEFVYGKYRKAKFKGLGKATAKNTLYANVLYFLKEDEVYPFWDKARDLPTIKRYLYRAQVNKVRKAERQTGGFSDEMLVPKNDSGKLLPRKEGLDPAKYGGYAKAAESYTVLITADEVKKGKTKKVKTLVNIPIIDSKKYEADPTTYLADRGYTNVTNSFILPKYSLLEDPEGRRRYLASFKEFQKANELILPQHLVELLYWVNAKDGKQELEAHKAEFKELFDKIMEFADKYVVAPKNSEKIRRLYEENQDATPMELGRNFVELLKYTADGAASDFKFFGENIPRKRYNSAGSLLNGTLIYQSKTGLYETRINLGKL

SEQ ID NO: 6298 - protein, 1071 aa, unidentified
  REGION 1..1071: note = Description of Unknown: Cas Enzyme sequence
MFFYRLGIDIGETSIGWFILKLNERMEVCDIVDGGVYIFPDGREAKSREPLSVSRRMARGIRRNNDRKKSRKRRLIRLLVETGIWSKSVEEQKKLESLDPFVLRQKAVNEKISLPELGRALFHLNQGRGFKSNRKSDGKESESGKIKQAVQALESQLAEQGCLTYGEYLYRRHEKRVSTKVRPTADSKGYEFYPTREMSEAEFDLIMARQQQYYPELTTEVVAALRDTIFFQRSLRPQAVGKCEFELQEYRASVWHPLFQRFRMLQEVNNLDLVKATKEEVGLTAEQKKKILLMLEDGACLNSKGILLFSKIRKKLDIPSTRKFNLQSDKRDGLQGDWAVWKLADEGCFGKSWFKMLPEKQLEVLELLQGAEDNVELKQKLIEQFGLDDSHAEKVTQVNLPDGYASLSLKAIKNILPYLEQGKVYSEACALAGYNHSDRRTGEIYDYLPYYGRILKSAVIGGRFEGEEPDVYEDIGLQEVYFGKINNQTVHVGLNQLRKVVNEIISRYGKPQQVVVELARELKLGVEGVRKLEKRQKENQKDNERIAEELACAGIPNTYQNRMMYKIWERLSENPAQRCCPFSGKLISATDLFSGAFEIEHLIPFSKSFDDSINNKVIAFRDANRFKAERTPYEAFGSSPGDYKWEEIVARSENLPREMQWRFSPNAMEKFADESGCLARMLTDTQYFARCALQYLEVICEDQSKDRKMAWGVPGQLTAMLRDKWGLNSLINPADRKDRSDHRHHAIDAFVVACTSRSLLKKMADAARLYEKTDEGEYKQIREKREKLIENMPLPFENFNREKLQQWVDGLVIAFKPDHGVQWQLHRDTCYGRIGKGSKKGSSVFAVTKDLLAVVEGSAKDGNKKINEIADVVIRGKLLDLLQGVEDKKQRQQLTEKFIAETGIRCVRCHIEKSDSVMIPVKDNDGRAYKYYESGNNSRADIYCATKGKDAGKWKCEIISTYYANQKDFVPEWRRKDPHAKLIMKLHINDMVAYDILNEETGLVERVIARVKKMTKGLVFLRGHLIAKEEGDKLSWGASANQMQEKNLRKVYVDAMGKVKDPMVKNERKVS

SEQ ID NO: 6299 - protein, 1372 aa, unidentified
  REGION 1..1372: note = Description of Unknown: Cas Enzyme sequence
MGIKGEYYLGLDIGTNSVGWAVTNENYQLLRAKGKDLWGVRLFDEAHTAEERRGFRIARRRRQRETARLGMLRELFSEEIDKIDPGFFARLDESRFQMQERAEENKQTYAIFADKEYTDQDYYRDYPTIFHLRRELLKSKEPHDIRLVYLALANMFKHRGHFLNTSLRAEEDKYSFRDACQFLSDQAEEAGINFPLIEQPGELENLLGERGLSRKNMLERASELTGISKKDKEAYHILKLMCGLEAKLTDIFGKEMIEEEHKKLGIAFRAADYEEKAEEIRIIIGDEKFEMILAVKDIHDKGLLSNIMKGHRYLSEARVELYEEHQRDLKKLKTVLKKYNPEAYHDMFRVMKDGNYSAYVGSVNSSDTVIRRTGKGRTQEALYKTIRSALKELPQDDLDVVNILSRIEAEVFLPKQLTASNGIIPNQVHEKEMRAILKQAETYLPFLMEKDDSDLTVSERICRIFSFHLPYYVGTIGPENRDRIEYHGWAERKAPGRIYPWNLEEKIDMKGTAKNFIERMVRHCTYLTGERALPRQSLLYEEFEVLNELNNLKLNGEKLSVEVKQAIYKHLFETGKRVSMKQLENYLIVNGYIKKGETDAISGIDGDFHSSLSSLGKFKGILGEAVHYDENRKMMEDIIFWGTIYGKDKSFLKESICENYGECLSEKDIKRILGFKFEGWGKLSGSFLNMEGVSTEDGVIRKLITALWETNDNLMQLLSARYTYSETLADKMETVEKPLAEWTIEDLDGMYLSAPVKRMVWQTMKIFKELEMVTGGTPKKIFVEMAREEGKKGVRKESRKKKLIELYQAIESEKALWMQEIEDRPEQVFRSKKLYLYYRQMGQCMYTGEAINFDDLMNDNLYDIDHIYPRHFVKDDSIENNLVLVKKENNAHKSDIYPIEEKVQREMYSRWRFLADKGFISREKFNRLTRRTHFTEEEKATFISRQLVETRQGTKAVTQILKQAFPAAEVVFSKAGNVSDFRNKYKLYKVRCVNDLHHANDAYLNIVVGNVYHVKFTKDPLRFIREAQRYPNMDIYKYNMDKIFSWNVERNGEIAWTASKREGEDAGTILTVRKVLSKSSPLVTRMCSENHGGITRKATIWSAETAKGEGYIPVKQSDPRLQDVTRYGGLTAVAGAGYTLVEYKLKGKKVRSLEQLPVYLGRVDSLTEEAMTTYFYKAICEENKGSDISDVCIRKKFIPYNALLKYNGFFYYLAGKTGSSIIMRSAVQAVFSSGEMNYIKKIEKAAATKYYEEKDQRGGLILSKDKNQELYGRIKSKYQNTIFQNKMGKMGSLIINGEEQFGQLMLSEQCTVLMEIMKNFNTGDGVDMTLIGGKEKTGITKINKVLSKCEECILIHQSAAGLFEAEIDLLKV

SEQ ID NO: 6300 - protein, 1425 aa, unidentified
  REGION 1..1425: note = Description of Unknown: Cas Enzyme sequence
MKRILGLDLGTSSIGWALVNESEDEREQSSIIKLGVRVNPLTVDEQRNFEAGKPITTNAERTLKRSMRRNLQRYKLRRDNLIEILTEHGFITPETILAEQGNKSTFETYRLRAKAVTEEISLEELARVLLMINKKRGYKSSRKLDTNEDGKIIDGMEVAKQLYDEGLTPGQYMLRLMDSGKRYTPDFYRSDLKDEFGRIWDFQKTFYPELLTDELRQELAGKNEKQTWAICAKTFSLVGLKRTAKGEELKRENYKWRVDSLSEKMDLESLTVVLQKINGQINGSSGYLGEMSDRSKELYFKKQTVGQYLMSRLDKNSHYSLKNKVFYRQDYLDEFEMIWENQARYHSELTDSLKHEIRDVVIFYQRSLKSQKGLISFCEFENRQMETVKYGKKRLKTVGLRVCPKSSPLFQEFKIWQILNNIQVSGKVVRKQSVDLFGETVEMANGKRFLYQEEKEKLFRELNIKAKMSKAEVLKLLFKNHKELDLNYKEIEGNRTQAALFAAYQTIIDMSGHGTHDFSKMCADDVMDIVSNVFGGLEFGTDILCFDSSLEGKAFERQPAYRLWHLLYSFAGDNSKTGNEKLISKISELYGFDREYAAIIAGISFQLDYGSLSAKAIRKILPYMKEGNEYSVACGYAGYRHSKNSLTKEELANKLLCNRLKPLPRNSLRNPVVEKILNQMINVVNSVANVYGKPDEIRIEMARELKNSAKEREEMTKAISKATADHEYYRQILKNEFGIENVSRNDIIRYKLYMELKDKGFKTLYSNTYIPREKLFSKEFDIEHIIPQARLFDDSFSNKTIEVRSVNIEKGNMTAYDYVCGKYDADKVSAYKVRVEELFKNGTISKTKRDKLLMSEADIPSGFIERDLRDSQYIARKAREILESLVRTVVPTTGSITSRLREDWQLVDVMKELNWDKYNRLGLTDFVVDKDGRRIRRIKDWTKRNDHRHHAMDALTIAFTKPSYIQYLNNMNARSDKGSSIYAIEKKELYRDNGKLKFQPPMPLDVFRAEAKRHLDGILVSIKAKNKVVTRNTNVSKIKGGTKKKVQLTPRGQLHNETVYGRIKRYVVKEEKVNASFDMQKIDTVANMRYRMALSDRLQQYGGNAKKAFTGSNSLQKNPLYVDDMHIIAVPERVKTVGFEYVYTIRKEVTPDLKIDKVVDSKVRNILKARLEQFGNDAKKAFVNLDENPIWLNKEKGIAIKRVTITGVSNALALHDKRDNSGKPMLDVNGHKMPVDFVSPSNNHHVAIYMDADGKMQDDIVSFYEATMRANQGYPVIDRDKNRSEGWQFLFTMKQNEYFVFPNEETGFDPNEIDLLDPNNYPIISPNLFRVQKLSKTEGRIYMFRHHLETTVDDKKELQEVTWKRINSLDKLKNVVKVRVDHVGRIVSIKLKTLRHDKENTVFRKSGISVAQAGADGYQTAGSGA

SEQ ID NO: 6301 - protein, 1429 aa, unidentified
  REGION 1..1429: note = Description of Unknown: Cas Enzyme sequence
MGKREEQDYYIGLDCGTNSVGWAVTDENYNLVEANGKIKQNHQTKTKKKALWGTRLFDETETAAERRVYRSTRRRIRRAENRLKLLRLLFRDEILKVDPDFYQRLKQSFYLEEDKTGLQHKSKNALFNDDDFTDKDYFEKYHTIWHLRQAIVKAGKDEHFDIRLYFLAIQHILKHRGHFLIEGEMKNGGEDFGALYDEFCTEAEKLGYAMNFGVESEAEKIIKSKTTKTNKKKALAELMFIEGDELDEDQPKGQKELAGLLVGSKVSLNHLFNLEHDEDYKLSFSEGVLEDKMPDIESHVGTDNLDLVLLAKRIYDYGILSHLLGDHTQISDAMVANYELHQEDLKQLKAIFKPHKEIYDKLFRAEIYDEKFPSYNAYIGKARTDKHKPVQLSQEDFNKHLRKLFAEIDYTGELLERTETGEKATKPLLLPKQRGQAKGTIPEQLHHNELEMILTKLAQDYPSFAEVDESENEKYNTKCKKIAQIHSFRIPYYCGPLVNRNKSQFSWADEEISELVRPWNFDRLINKEQRAENFIKRMTNECTYLPSEDVLPKCSLLYQKYMVLNELNNLRINGQRIDNRLKQEIFERGYLAGELHGNITQKKLKKWLQDSCLIGEDDQLGGTSEVKILPKLQTYQDFARLLGQDFSKRYTAAQLESVVQAITILGNDKAMLRTKIAQTLNLPETSSAVDGLSKLSYKDWGRFSEDFLNGIRAKVDGIEMTILDALWQTNHNLMELLSSEFEFTKAIDTYNNSKNPPSNEKVTYEDVKNLYCSPAVKRTIWQTLRIVNELTKTLKHPPKKIFLEVTRGGDPQNKGYSTARKKQLTELYHKLKKDPEVQQLLEELDGKADRDLQQKKLFLYFTQMGKCAYSGDPIDLEELNNSKLYDIDHIYPRSKTKDDSILRNLVLVKAQLNREKTNIYPISTDIRTRMLRIWQKWWLAGLITKEKYERLTRSMPLTDDELGGFIARQIVETSQSVKAIRDLLQRAYPDSKIVMVKAGQVSNFRQLMGDDRKDQDGNIIKPGKPEFIKVRELNDFHHAKDAYLNIVVGNVINSTFTDDPRRWVQQRNMQKTEYSIRPEILFREAYEYRKPGGSTTIYPEVSGWDFANSLAIISNTMKRNDILWTRRSYIESGAISDLQLVPHSEKVDGLLKIKQDKRLDPAKYGGYNSLKGAHFALIECLNKKGEAERRIVQIPMIAKTDIDEYVKNKYGETATVILPVIRYKALIKINGFPVHLAGKSGGGLIYYHAVQVFFKDMSFNKYLKAISRIIVKDRELRGKYEIDNTRDAVSKEKNLNALELICDKLSAFSRMPGLTGKIPEILDNANKFSGLSEKQQIVTIYNFLKILKCNAETGDLSSFVPRAAFIGKASTGEDVVNKVDTICIINQSPTGLYEEIIDLKTVQPKSPKLPQGSKQSKRPRGSQPPEEQA

SEQ ID NO: 6302 - protein, 945 aa, unidentified
  REGION 1..945: note = Description of Unknown: Cas Enzyme sequence
MKRILGLDLGTSSIGWALVNESEDEREQSSIIKLGVRVNPLTVDEQRNFEAGKPITTNAERTLKRSMRRNLQRYKLRRDNLIEILTEHGFITPETILAEQGNKSTFETYRLRAKAVTEEISLEELARVLLMINKKRGYKSSRKLDTNEDGKIIDGMEVAKQLYDEGLTPGQYMLRLMDSGKRYTPDFYRSDLKDEFGRIWDFQKTFYPELLTDELRQELAGKNEKQTWAICAKTFSLVGLKRTAKGEELKRENYKWRVDSLSEKMDLESLTVVLQKINGQINGSSGYLGEMSDRSKELYFKKQTVGQYLMSRLDKNSHYSLKNKVFYRQDYLDEFEMIWENQEFENRQMETVKYGKKRLKTVGLRVCPKSSPLFQEFKIWQILNNIQVSGKVVRKQSVDLFGETVEMANGKRFLYQEEKEKLFRELNIKAKMSKAEVLKLLFKNHKELDLNYKEIEGNRTQAALFAAYQTIIDMSGHGTHDFSKMCADDVMDIVSNVFGGLEFGTDILCFDSSLEGKAFERQPAYRLWHLLYSFAGDNSKTGNEKLISKISELYGFDREYAAIIAGISFQLDYGSLSAKAIRKILPYMKEGNEYSVACGYAGYRHSKNSLTKEELANKLLCNRLKPLPRNSLRNPVVEKILNQMINVVNSVANVYGKPDEIRIEMARELKNSAKEREEMTKAISKATADHEYYRQILKNEFGIENVSRNDIIRYKLYMELKDKGFKTLYSNTYIPREKLFSKEFDIEHIIPQARLFDDSFSNKTIEVRSVNIEKGNMTAYDYVCGKYDADKVSAYKVRVEELFKNGTISKTKRDKLLMSEADIPSGFIERDLRDSQYIARKAREILESLVRTVVPTTGSITSRLREDWQLVDVMKELNWDKYNRLGLTDFVVDKDGRRIRRIKDWTKRNDHRHHAMDALTIAFTKPSYIQYLNNMNARSDKGSSI

SEQ ID NO: 6303 - protein, 1102 aa, unidentified
  REGION 1..1102: note = Description of Unknown: Cas Enzyme sequence
MIEVYKFEDETEEQCRLKCLDELDVYNNEILTKEYEENDKYNMEVVKKEDIKEFIKNYLEKITKDIGLEARLEINEDEDVFSVKMFSDNNAILIGKDGRTLTSLQILIRQTISNQIKFNVKINLDASNYKVKKERFFEKRNIFLMLNLALTILIIVGDCLYMNIGTLAMKSVTSALFVLLGILNLVYLILNKQKEFNNKITTEFIDKVIEIFESQRNFDIGPGQPSPYSAKFEVGNCTFLKEEKRAPKASYTFELYTALSKVNSLKIDDEELSFEQKQVIIEYFKEKKEVSFAQIRKLLDIPENKLFNLCRYQTKSKKNNTDEADDLIKVSEKSILLSMARSYEIRQKLKLENSENNSDLIDEVALMLSLCKSDSTIEEYISKNDLLKNLSQEQIESISSLNFDKFGSLSIKAMKKVIPYLLQGKRYDEACKCAGFNHSNFEYEKYKYLKGEFIQERLQDVTSNVVKRAVNQTLRIVNEIIKKYGSPQFVTIELARELSKSKQDRNKLTAKQNDNFKNNEEVKKKLKELYNLDNPKGQDILKYRLYEEQSAKCMYSGKAFEVGRLFEPNYVQIDHIIPFSRSMNDSYNNKVLVLSCENQNKGNKTPFEYFGSDEKKWKDFVARVNLLRNKEKRQFLLKENFDEKVEKDFIDRNLVDTQYMARFLYNLFNDFLLTTPSRKYKRVIRCVKGAITNYLRKCWNIKKIREDGDTHHAVDATIIATVTDGQIQKITKFNKFKEKFKYDEKADKYINILTGEVLSESEKKEFEQININNIARILEYPYPEFIKELKLRTRTNYNTLSYTDEEKLELARIGYSNEEIEATKPLFVSRMKTVKNTGAIHEETIMSIREYDESKMLIKSVNLSKLKLCNKPEEIILKDDKYPECSIENYYRPKDDRLLYLKLKNYLKENEKIPDNMDFHKPKKDGTDGPLVKKVKVYEKASNCVITPRGGAANDKMYRVDVFEKNNKYYLCPVYKADVYMKKLPNRVIEIGKEWTEIDDSFMFLFSLYQNDVILLENKKVINLKKNFKNENSCKKDEISNNKFLLYYTSTGITGASISVVTHDNCYKIDSSGVKNLKSIEKYYVDIMGNVYKAPKEERKGF

SEQ ID NO: 6304 - protein, 981 aa, unidentified
  REGION 1..981: note = Description of Unknown: Cas Enzyme sequence
MKKMVFGFDMGKASIGYCVREGHNIKCADSVIIDKDYAEVASSRDRRRVSRTKDSHKAREDYFNKLWLDCGLNVLDKNSPLFKKEFPSKGENTIYTSCLLRIALLQNKKLEEWQIYKALYNAFQRRGYDSELPWKNALGDDDKENLELVKKYTEKNGVELIQSDDYKYPCYYDALRLGLWSENESEIFKTAPTGDKVRCTKYVAPRSMVEKELVLLFNNAKKQLPSLSKFSAEEFLYGEYKEAYGSYKNPEFQKYMGKKEDRQGVLGQKIPRFSNRVISKCKLLPKRNVCSANTIENVTLVLLMKLKNLRITTVLGEKIILNHTQINSIYEEWLKKVEKRGGKLDATITCDEVAKVVGCKILNRFDPLKANISGRSSFCRRACNIMNDVILQGVKYPETLDIMPYIDAIGTQNGITEDEVRNMLSKIGNWDNLYIPDNRDKNAEDADDIRQKTDIIIGNVTNPIVRNRLQIFRDLLIDLLEEYGKPDEVIFEFIREGDNSLYGSIKAKKAEAQMKKNEKENNEIRKELEDTDCYSVTNFEKLKLLRLQGGKCIYSGKNISVSDFDKCEIDHIFPRTLGGNDSLSNKVLCYREENQKKAGRTPYECLSNNDEVWADYTSRVNCLKSSLGQKKFELLTSKPEDCMELIDSYNGLAETGHMARVAQQIAACIFGWGLQVEGEERRIFVNNGASTSAIRRRYGLNKLLGDDIKKNRKNDKHHALDAICISYSREFKYDKEKDKDIIEGFNPEYVKKIIDKIIPYPYTHKKPLKGGIRPLETIYGLRIYNGKSYITNKISISTIEPKEKKIKTIIDEVIKNDLLEKLESGMSVKDWANMLENYIHPKKKTKVKKVLTVVSEGSLEKDLNGRERIGEFVDFGTKGVKHQFKHSKQHKGQILYTNEKGNIKVMPVYSNIKLDEIKEKLQKMNCTLYNKGMMFYSGCLINIPNEFEASVYYDIKDEEGNVKTKAVRCEETGSLRIFKMG

SEQ ID NO: 6305 - protein, 1017 aa, unidentified
  REGION 1..1017: note = Description of Unknown: Cas Enzyme sequence
MTRLVLGLDIGITSVGYGVIDIDSEQIIDYGVRLFKEGTASENETRRTKRGSRRLKRRKANRINDMKKLLRENNILDDRYVLFDNPYEIRKKGLTEKLSSHELACAILHITKNRGTCLESNADETQDEESTKSVLSKNDKELQNKYICEIQLERLQKEGKIRGINNNFKTEDYLKELEEILNHQDLSKETIQKILEVVTRRRRYDQGPGNEKSPTPYGSYRVIDGEVIKVNLIDMMRGKCSVYPDELRAPKQSYTSELFNLLNDLNNLTVDEEKISIEDKRKVIDYVNKNGGITIKQLFKLLDTDGDRVTGFRIDKNDKPLLTEFKGYRKVLKVFENYHQEDLLDDKSIADNIIDINTKAKGIDEREQLISEKYPELNKELVHELASLKGISGYHSLSFKAMHLINKEMMTTEMNQMQILHQFDLFDKNRKSTQGHRHVYPNDEAILSPIAKRAHRETFKVINKLRDIYGEFDSIVIETTRDKNTQEQKKRIKDSQKSFENKNKEIEALLKEHGYNPERLNNKVKTKVRLYLEQEGKSAYTLQDIDLRHLIEDEKAYEIDHIIPISISLDDSLSNKVLATHDENQQKENLTPIQAYLKGKFNNCDLNTYRTFIRNNKLLNRKKKSYLLTEKDITKYDTVQEFINRNLVDTSYACRTVMNTLQHYFKDNGINTNVHTIRGQATNAFRKRIDLPKDREEDYFHHAIDALIVASLKKLNLINSYLMKIDFNQMYDETTGEVFQVLPDNQYLDSKYIAFVSSLKNIYKESNKYILGLMTKEQMHYPLIKVSHKIDTKPNRQIADETIYSTRMVNDTEMLVEKVKNIYDPKEKQAITLVNAIVNDETDKYIMAHKDPKTFDKIKDVVLNHFHTYKESKEYYVKDKKGKYELKGENPLTAYYNEFGAITKYSKKNNGPAIRSVKFYSEKLGNHLCITQRYDSKDKNVVMKQISPYRTDFYQSPEGKYKFVTVRYKDVLYSDTKGKYVINEEWYQKQKAIKGIADDWQFICSMHRDELIGIVKK

SEQ ID NO: 6306 - protein, 1216 aa, unidentified
  REGION 1..1216: note = Description of Unknown: Cas Enzyme sequence
MMLHESKEDAIREEFFNAIILSKTNREIAGKYLHMDNAEDPELLEKTEHQDLASAVHWMGTKANYVRWLLKKNRTEELGRLVRLLAAVGGSTAWKALTGYEYGVRPAALEKSLVCLKDPHAEAQKMALRAGLCSLSLLIGRPEDAKEVLRSGQKDPGVFLEAVRYCYNRDLVSGSEQERNACMLLQAMYLYYMEEGTALAAVRDLEERLTASIADVMAFEPGELACIQEFAKTADRETPFPHRILSIYSQRRSGANTSALLSACAFLALRHSVRFEIILRLMAAIDHRYQDRNLMLATCRGVSEEEYYDTHIAKLEDMLPIPDENYIIWCLEYGDTKAVERMAVKCPDGIRAAAEKTEFKRYRELMEILQRSDLELYREMKVNFQKTCREKAASEIVSRVCLGRADAKEYLLGNRPVETLEPYLKEWGTDLYEEREIYERLKLLKRMEPSMYQRGIVLEALRKMAGYFAHYPLFDQEPGVQDAYELLMDARQMEGILQIFEEEGISVRFQMEALGGMGDCLDKKRKVKYLDRCVELFAGRGKEADPKQWEEDMAKTIREGSPSACCLCLRVLEQSGGEAYRDLFLSCAAAATKQVRTLLLEICRAYREWMPEILALLGSRKVKEREFAVRLLEEWGDPSCLEEVQKALEREKNRKLALSLQELAKELEKEADGADAAQSGRARRTEEKLAAEIYKGSKKKKVEWVLGLSLPEVHRKDGEAAAPEYLFAILTAYADMEFPGINKDADRLAAALAPEELSAYMQALYEGWLSRGAEAKKRWVLYAVSIHGGSAMVPALHSQIKDWAEHSRGAMAAETVHALTAGGSPEALRLVDQMSRKFKFRQVKNAAGEALKHAAAALGISREELETLLASSGFAKDVYTLRAEGLDRPLERDEWARVLLHLAQRRGYRSNSTAEAAKDQETGVLKTALSANQALMISKNYRTAGEMFCLDEKFQMPGPNGQVWRKTRNTAGEYSFTVTREMVETEAHTLFAAQRRCGNLFASEELEVRYCEILLSQRNFDAGPGGNSPFRQGDRRGFCAFERDELRAFKACYTFEYFKLLQDLNHIRVLSPDRSSRALTADERERLTALAMKSANLHYGHLRKELALGEEERFNIVRYHTDTVEDAEKKTKFQEMQSYHKLLKALDALGKGYITALPLELLDETATVLSLYKSDERRVERLQKLGLEPDVIKALLPLSFSKAGNLSLTAMKKLIP

SEQ ID NO: 6307 - protein, 426 aa, unidentified
  REGION 1..426: note = Description of Unknown: Cas Enzyme sequence
LIRATEFEPGELAGFIARQLVETRQGTKVVADILKQVLPDTEIIYVKAPTVSQFRQDFKFVKVREMNDFHHAKDAYLNIVVGNVYFVKFTQNAAWFIKEHPGRSYNLKKMFLADRVERNGEIAWIAGEVGTIGRVRRTMEKNNILVTRRSYEATGGLFDQQLMKKGKGQVPIKGNNERLQDIQKYGGYNKESGSYFVLVESEGKKGKKIRTIEYVPIRLKSKVEQNEKEMYDYLKEQRGLKNPKVLLNKIKIDTLFQVDGFRMWISGRTENRLIFKGANQLLLPSKEAETLKKVLKFAARQKQNKELKIFASDKIEKEMLIGLYDTFLSKLQKTVYGRRLGKQEKTLFDKRDTFRDLNIEEQCIVLSEILHMFQCQSGASNLKLIGGPGSAGILVLNNDITKCERINIINQSPTGIYEQVIDLQKL

SEQ ID NO: 6308 - protein, 910 aa, unidentified
  REGION 1..910: note = Description of Unknown: Cas Enzyme sequence
MGQDYYLGLDLGSGSLGWAVTDENYEILRAHGKALWGVRLFESAKTAEERRTFRTSRRRLNRRNWRIELLQSIFAEEINKMDDGFFLRMKESRYLPEDKKNISGECPPLPYALFVDENYTDKDYYRQFPTIYHLRKWLMETEEIPDIRLVYLAFLHMMKHRGHFLLSGDIKEIREFKTTFKQFVEAVKKEELDFVLEIEEEQYFHVEQILKNNQMTRTAKKTELIKSLKAASGCEKAILNLISGGTVKLSDIFGDKQFDESGRPKLAFSDAGYDEYAGEVQSVLGEQYIIIEYAKAVYDWAVLADILAGCNSISTVKVTLYEKHKEDLAYLKKLVKENLPSDVYKELFVKTDEKVSNYSAYIGMSKKNGKKQEIQGKRCGKDDFYKYLRKQVIERIDDEKIVEYLKEEIDKGTFLPRQVTKDNSVIPHQIHLYELNQILFNLQERIPLLKEQGEKIRKIFTFRIPYYVGPLNGIEKGEGRTNWVKRKGEGKVCPWNFEEIVDEEASAEQFIRRMTNKCTYLIHEDVLPKYSLMYSKFMVLNELNNLRLNGEPISIELKQKIYQEVFQRNRKVTQKKLRDYLAREGIAAKTVDITGIDGDFKSSLTAYHDFKEKLTDVKLEQKEKESIILNITLFGEDKKLLKKRLKGLCPQLSDGQLTSLCNLPYRGWGRLSEKFLDSIAAPAPETGEAWTILRALWESNDNMMQLLSERYSFTDAVEEENEKEECKEISYQLVQELYVSPAVRRQIWQTLLIVKELCKVLGKPPKRVFVEMAREKTDGGRTQSRKKRLLELYKKCKTEEKEWVEELNHTDESMLRGDKLYLYYTQKGRCMYSNERIELGELWDNQKYDIDHIYPQSKVMDDSLNNRVLVKKVFNEEKSDRYPIAANIRKNMQPFWKSLLEGDFISKEKY

SEQ ID NO: 6309 - protein, 1132 aa, unidentified
  REGION 1..1132: note = Description of Unknown: Cas Enzyme sequence
MDKLYRIGLDIGIGSVGWAVLENDPITEEPNRILQVGVRTFSPNEVDKTGESTAKARRESRGSHRRNRRKNFRKHRIENLIDRTFGTKFQEELKEISNVDVYMLRSDALDRKLSEIELVKVIFNLLKRRGFKSNRKNQSQSKDEGKLKSSISENIKFLEDKGYRTWGEALYKDEKFKYVQDGKVFYNIRNHEGDYRNCVSRDMLKDELLLILNNQKEFNNTINNEFNNKITTEFIDKVIEIFESQRNFDIGPGQPSPYSAKFEVGNCTFLKEEKRAPKASYTFELFTALSKVNSLKIDDEELSFEQKQVIIEYFKEKKEVSFAQIRKLLDIPENKLFNLCRYQTKSKKNNTDEADDLIKVSEKSILLSMARSYEIRQKLKLENSENNSDLIDEVALMLSLCKSDSTIEEYISKNDLLKNLSQEQIESISSLNFDKFGSLSIKAMKKVIPYLLQGKRYDEACKCAGFNHSNFEYEKYKYLKGEFIQERLQDVTSNVVKRAVNQTLRIVNEIIKKYGSPQFVTIELARELSKSKQDRNKLTAKQNDNFKNNEEVKKKLKELYNLDNPKGQDILKYRLYEEQSAKCMYSGKAFEVGRLFEPNYVQIDHIIPFSRSMNDSYNNKVLVLSCENQNKGNKTPFEYFGSDEKKWNDFVARVNLLRNKEKRQFLLKENFDEKVEKDFIDRNLVDTQYMARFLYNLFNDFLLTTPSRKYKRVIRCVKGAITNYLRKCWNIKKIREDGDTHHAVDATIIATVTDGQIQKITKFNKFKEKFKYDEKADKYINILTGEVLSESEKKEFEQININNIARILEYPYPEFIKELKLRTRTNYNTLSYTDEEKLELARIGYSNEEIEATKPLFVSRMKTVKNTGAIHEETIMSIREYDESKMLIKSVNLSKLKLCNKPEEIILKDDKYPECSIENYYRPKDDRLLYLKLKNYLKENEKIPDNMDFHKPKKDGTDGPLVKKVKVYEKASNCVITPRGGAANDKMYRVDVFEKNNKYYLCPVYKADVYMKKLPNRVIEIGKEWTEIDDSFMFLFSLYQNDVILLENKKVINLKKNFKNENSCKKDEISNNKFLLYYTSTGITGASISVVTHDNCYKIDSSGVKNLKSIEKYYVDIMGNVYKAPKEERKGF

SEQ ID NO: 6310 - protein, 907 aa, unidentified
  REGION 1..907: note = Description of Unknown: Cas Enzyme sequence
MNEQEYFLGLDMGTGSVGWAVTDTDYNLIKINRKKAWGSVLFETSEGAKKRRVNRCARRRLKRQKERLSLLRELFEEEMQKVDKGFFLRMKESRYVYKDKRDENGEKPQLPYALFVDENYTDVDYHRDFPTIYHLRRNLIQEENKEFDIRLVYLAIAHILKNRGHFFANMGSEDVNLDFKESFKDLLKCWNDLMADDEARIRVEEKSLADIEEKLKDTKTVKSKKKQEIIDVIGNSDKKFNELVSLIVGGKVSLSKLFGRGEYESLDINKICFDEASYEENEEYYIANLDDYYDIIARAKVIYDWRILSSILKGDETGLISAAKVKDYEKHKEDLKILKKAILEDGIGTKEERKKLYKKVFGVPQKNENNYSSYVGLVSTNGQKRVIKNKKCIRADFYKFIKSSVLPELKEGDRKNYIEKEMELEEFMPKARVKENSVVPYQVHEKELKKILCNAEKYLPFLKNTDETGKSVSDKIRMLMTFRIPYYVGPLLGNNAWVEREALGKVTPWNFEEKVNVEKSAEKFIEKMTSKCTYLKNEDVLPMSSLIYEKYMVLNEINKLKIYSEPISVALKQDIYRDLFERKQKVTVKKLIDYLKAEKGYADLKREDISGIDVEIKSSLKSYHAFKEKFTQEALSEKEKEDIIKDMTLFGAEPKLLKKRLTAKYPDYENQISSLIKSFKCNDWGRLSYKLLNGIAVDVPGQGEIGTVMYRLWNTNDNFMQIIESGDSLYAKLIKEENGEVKKNGIEYSMVDDLYVSPAVKRQIWKALQVTDEIMGAMGKAPKRIFVEMARERAEKKRSVTRKDRLKELYKSIKDEKVLYDKLCDTDNDALRSDKLYLYYTQLGRCAYTGRRIEIDELFDNNIYDVDHIYPRSKTADDSMDNRHWYISRSMKTRMIFILLTVKFKRI

SEQ ID NO: 6311 - protein, 1360 aa, unidentified
  REGION 1..1360: note = Description of Unknown: Cas Enzyme sequence
MNLRNVGDYQIGLDIGTASVGWVAIDEEGRLPHFKGLPTWGSRIYSNAEPASAARVYRGARRRYARRRWRLDLLEGLFQEAVAEVDPTFFTRLRQTHLLRNDRDDAFREQAGMLFADSDFSERDYFKRFPTIYHLRQWLMDTGEKADIRLIYLAFHNIVKHRGNFLHQEAENLTSANSGVRNAIERFCAALQEYCDDREIPCDAQGGCEDIVDALSDSGSRRSHVAKRIAPLLGIREGASLDKKGVNKMAEALAKAIVGLKAELADVFFQEGESPEGAATKIYLSNDENVEGFREVCPVEGAPLFEALLAVHSSYVLQEILSSKPGESLSANKVAEYDRYGEDLRQLKELVKHYVPERYDEYFRGSFCRPTPLHPQRRVYDKYGKDSIRGYTRYNEIRKTRYEDFRKETEVLFKGTPAGDDPRYRDMMERFGEERFLRRLKTSDNGAIPFQLHREEMLAIIDNQAQHYPFLEQERAKLESLVSFRIPYYVGPLTLRNAPETASGKLRFAWAKRQEGKEGERIFPWNWEEIIDKDASATAFIQRMASTCTYLRNEPVLPKCSLLYEEFCVLNELNGAKLTQDGDHEHRLDYQDRVDAVAQLFRCGRVSRRKIEDWLRKRGVSNPHVSGYQGENGFESKMSSYIFFAKDVFGVDEIPPSDFPMVEEIILWSTLFEDRDIFREKLERAYGDRLTTQQIKKIVRKRFTGWGRLSRKLLSELKVETDCGPRSIMDVLREGNPNSDKPSQAMVFMEVLHDDKLGFERCIDAYNNEQMAEVGLVLEDLPGSPAIRRGVKQALDIVREIIGIAGHPPTRIFIEVTRDEDTRRKGRTKRRYEALQDAMRALKEQSPELWDKAVAEELSDRAKAAADLDEKLTLYFMQGGRSLYSGQPLEIGRLSEYQVDHIIPQAYVKDDSFENKALVLASENQGKSDQMLISADVRHKMKPYWDALHEAGLIGDKKHRNLLRDHIGDQQMKGFIARQLVETSQILKVVQAFLQEEYAETQVVPVKAALSSELRKQLGLVKCREANDFHHAQDALLAAEIGRFVLKRHAGMYDNPIGYAHVVHNYVRNESEQMRRGKAPSDASFLIASFMKSGFDEDTGELFKDDWSASEEIGRLRKYFDYRQCFISRMPEETSGAFWDETVYSPRDAGKNMTLPLKKDLEAEKYGSFSGEQFAYFFVYSAFKKGKEVLEFAPVPVRVVSRIKEEAGALEDYARKLAEGKGLEFNAVVRKKIYKYQLMEIDGSRLYLTGIKAARNATQFAFDGREMAWLKAMYDGGVVDEEVLDKLYERILGSFERYSARQYSALGVEEWRKDFASLSSEEKKALLKALIAIGNGKANTADLSSVGKGKNAGYIQPTYS

SEQ ID NO: 6312 - protein, 1366 aa, unidentified
  REGION 1..1366: note = Description of Unknown: Cas Enzyme sequence
MVLRQFQYIIYKEVCQHMSEINCNNYNIGLDIGTSSVGWAVVNSDTNKIVKKNGKQLWGVRLFDSGKVAAERRNFRSTRRRFDRRRKRIKLLQEMFYDEIMKVDKDFFIKMKESFYRQDDELNKTKPLSKEEKNAIKMYYREYKTIYHLRKHLMENVEEDIRLIYLAIHHIIKYRGNFLRDGDDFSVKNLNVEKELENLFEMFYTQCEEINFNIIDISEIDYVKLANSILFHTKNDKKNLVKEVLQSAVDKQFITEFTKLIVGNEFSVSKLFNIELDENITIKFEGTKYEESRDKIEQNIKDKIEILDLCKNIYNVIFLKEMFNGEENESLSCEMVERHKRHKDDLRKLKEMFKHDDDLYKSMFKTKKDKKGDKLCTYDKYIHNQISLDEVRKEIEKLIKKINIQSVTDEYNNDICKRIENGKFLPRITDVDNGKFPYQLNKIELRKIIEKQGEMYPFLLEKYSDNEYKLERLLSFKIPYYVGPLNNTTNKRSKENENAWMKPKINVKQITPYNFEDVIDKEQVAEQFILKMISHCTYLIDKHVIPGNSILYSKFKVISELKQIKINNQKLPLDVQKKIIEELFMRVEGTITDKVFRNYIISHDLFPMYDRDFKITGYSSDKGFASNMSSYVFFFGKDGVFKNTDYKIKDAENIIKWITIFEDKSILESKIRNEYKNLSDDVVKRILSKKFKGWSRLSEELLTTKHYINKENNTKMSILDLMEETDKNFSQIINSRKYKFQEMINSLNNKLEINKVNYELVENLQTSPATKKGIYQALKVVEEIVKYMGSNPKNIMIEMARSDEEKKRSERKKNYLTNLYEINSDKIFDYNNLYDQLSNCEKIDSDKLFLYFIQEGKSLYSMEPIDIDELFTEKYEVDHIIPRSLVKNDSIENKALVLRVENQEKAANFVLPAKFRNQNNIKWWDHLRDIGLISTKKHDNLIRYKYSDDDIDGFISRQLVETRQITKHVVNILSNLYKDTSVVSLHANLSHNYREKFELYKYRNLNDHHHAHDAYLAAVIGNFTKNYLKKVNFEKLREINNKLFESKQYDDAKYGYVINSMDSRFLCDYDTGEMKYDIDEFNKIVSNTLYNNYDIKISKKTEIKTGKFYHQNASKKGNPGAKLKDNLPTDKYGSYNNVESSYTAIVKWMENSKEKQKLVGIPIYLDVKLKSNPKIIDEYLHNLLKLDANIDIEIVKSHIPINQLLNWDGKICYLIGARTLLPYVEVCNAKQFIIDKKHLIEWKYVLNRLFNKKEKDFLTDDLYSEKLDDVMQYIIEKIDKEYLLYKDNIVEIKKIFGKDNFHNFSILDKEKAILETFKLLKCDRLTANYKIFNNKESFARKNSKTISNVKLISKSVTGLWEHENEF

SEQ ID NO: 6313 - protein, 1322 aa, unidentified
  REGION 1..1322: note = Description of Unknown: Cas Enzyme sequence
MEQRNYNIGLDIGVGSVGWCVTDENNTILKRNGKNMWGATIFEEAQTAKSTREYRGARRRLDRRRERINILQSLIKEDIEEDYPNFLPMLRETSKIEADKTISESILGKKYNLFSDENTTDEKYYKKYPTIYHLRKYLMEETEKVDIRLVYLAIHHIIKYRGNFLYDGDFANDTTAIEENLDVVLSFLEERCGIKLREDKKTIIETLKIQNKSKSQKKDILISLFDYEKENKQLVVNMVNSMIGYAFELKNIFNIDIEKTKITFSSEIENEEEIKNALGEDAKIYESMNSIYSWFILQDILNGEEYISKAFTKKYDKYNQDLKLLKQIYKTYFKESYKSMFRIVGQDNYVAYNGKNQGKECKKCGEEKFFIALKKQIEKLPDECEDKLKILDEIKDNNFLRKLNVTDNGAIPHQLHKKELEKIIENQCKYYRTLLENKDKIMELFSFRIPYYIGPLSRKEEGWSWIVRKSDEKIRPWNFSEVIDKDATAEKFIRRMTNKCTYIINEDVLPKQSLLYSRFCVLNELNNIRVDGHRLSKDTKRNIINDLFKKNKKVTLNQLKKFYEIQGLPKVNIEGLQETGCFMSSMSSYIDMNRILGEIDESNYEQCEKLIYWITIFEDKKMLKHKIEKEYGEKSLCSDNLKLNENQIRELVKKRYTGWARLSKRLLTGLKANDGETIIEKLENTPLNFMKIINEKEFGFDRQLEELMPKVSKEIKYSDIEDIPTSPANKRAIWKSMCIVKEITQIMKHEPKNIYIEFARGEEKKVMKDNRAKELLKKYEEISKQIKYVKDYDSKVYEQLKAHQNDKILNEKLYLYFIQNGKCLYSGRPLDIDNLSLYEVDHIMPQSYIVDNSIDNKALVLKGENQRKADSLLLSDDIIDKQKEWWKSLLDSNLISQNKYYRLIKRKMFETDEDREKFVKRQLVETRQITKYVTNLLKNKFESTDIFTIRGELTSLFREKYKFYKNRNVNNYHHAQDAYIISVIANILDKNWKGIEQFKYAEYVKKYFKDERSKYQKNGIIINTINKYLDIEKVRRTMNYKDCYITKMLIENTGEFYNQTLYSPTDKNNKPVIRLKEDLPAETYGGYSGENKAYFVVFSYINKKGNKEYQLTGIPVKTAYDVKLGKITIEEYIRTSYLKDIEYSDFNIERNHILKNQQYLDENNELMRLCSDTEIRPDKELILSYDMNELVYLINLPEDRLDDEEKRKVQDGYEKLFDYLICKIEKEYKSLAKSGDKIKSKKDVFLELSDLDKKSVINLIIDMMQTRRVDLKLLKLGSGEGRMAGKNFNTSKLLNMIFIDKSITGMYERRYKINGMENSSSK

SEQ ID NO: 6314 - protein, 1343 aa, unidentified
  REGION 1..1343: note = Description of Unknown: Cas Enzyme sequence
VQKGKKNYNIGLDIGTTSVGWAVVNPENFKIFKKGSKQLWGVRLFDEACTAESRRGFRSTRRRYDRRRQRIKLLQNEFREEINKVDPLFFIKLKEFFYNEIDTKNKTVLLTPDDKKIFNGYKTIYHLRNELINCDYKFDIRYIYLAIHHIIKYRGNFLYQNSKFNAENLNINESLKSIFDEIYQCCDKLEFDIENIDYEFYNKLEEAITTTSINDRKVLIKKILNDNINKNFVGEFTKLILGNKFSISKLLGIELDTDICISFKDSSFDDKYSEIEKNIGDKISILDLLKELYDKIFLNSMFEGNSNANISSLMVQRYKDHEEDLKFLKKLLRCDKIIYKKFFKDILGKKEEFCIYRKYVNNQISYDEFKKELNKALENALNLIDKDISIEYVIKYKKRIEEGTFLPRITSTDNGRYPYQLNQDELIKIIKNQGKYYPFLQKTINSKDESDYKLVKLLNFRIPYYIGPLNTTTNEKCVQNNNAWIEKLDSKVQINPYNFNNIVDKELSAEKFITRMVSHCTYILEEEALPNNSILYSKFKVMNELKQIKINGYKMPIEFQHKVYENLFLKTKGTITEKKFIDYLKTTEEYKIYNEYIVEGYSSDKKFANNMQSYIDFFGENGIFENSNYNIENAEEIIRWITIFEDKDILETKIRKNYLNLSDNVIKLIISKKYSGWGNLSKKLLNEVLIEDKITKIPKSIIDLMYDTEENFMQILNNKEYKLQNKIDKLNKIENLSEINYSLVEKLATSPATKRGIYQALKVVEEIVNYMGYAPDNIMIEMARSEEKKVRKDNKRDYIIKLYEKIKNDASNYNKLKNELKEIDKIDSQKLFLYFIQEGKSLYSGVPLDINKLDEYEIDHIIPRTLIKDDSIDNKALVLRIENQEKAASFVLPYSYRTNDIKKWWKRLKDNGLISSKKYNNLCRDHYSPKDIEGFINRQLVETRQITKHVANILNNFYKDTKIIYLHADLSSNYRKKYELFKYRDLNDYHHAHDAYLSAVLGEYKEKYLNTTTDFNKLKELSKKLYDEGNYNVLSYGYVINSIDNELSTFDEETGEITFDADLFNKTIEDTLYRNDIIISRKTEIKTGEFYNQTKSKKGNNGVQLKNNLKTELYGSYTSLNTSYLTLVKYKNKQKIVGIPIFIDLQSQKNNNIKFNYIKNHLNIKENETFEILKDRIPFESLLNYKNHLIYLKGYSVAHKNCELCNAIELKIKKNDLIKWKYVLNKIFNGIKLPKNGKFTDLYILELSKDILNFLFKQKENYPLFFDKIKNIEETIDINSLNQENIEKLILELVKIYSCKSITANLKDFNLGDSIGRLGGYNIDHAILINKSVTGLMEYRNEF

SEQ ID NO: 6315 - protein, 1094 aa, unidentified
  REGION 1..1094: note = Description of Unknown: Cas Enzyme sequence
MSNFIKTQKSYYVNYNLTEDNNLKANGNDKVTGNYYLGLDVGTNSVGWAVTDEEYNLARLCGKDAWGVRLMDEGQTSAARRLYRTNRRRMQRKKWRLSLLRELFAEEIGKIDAGFYQRMDESSRIADDRKSSTKYTLFVNGGYTDKDYYNQYKTVYHLRKELYESKDPHDPRLVYLAIHHILKSRGHFLYSLTSDEDMSFKQLWQEFATQVKERFDLDISVSDIDSIKDILCNTNLVKKDKYIELNKICKLNNETDIDIKTFKKIQESLIKLCAGNTVELNKMFFDREFEDKESISLCDGEEKLAQVCDMLGDDAEIILAAKAMCDKAILDGITKNFNTFSEYKVEQYDEHKRDIDLLKEYVKKVLNDKALAREIFNVQPIKKAKKSNVDDDGDGSDVKAVPNYAAYSKYKKGDVAGSVSQENFCKFLKKKLGDLPDGVDKKYIDMMNKISNGIFAPKLRTTDNGIIPNALHRKELEVILSNASEYLPFLKEKDESGLSVADKIMAIFDYKLPYYIGPLKGGKSWAVRISGKENEKIKPWNFKEIIDSEASAEKFIDRMTAICTYTGEKVLPFDSLLYSEFCVLNEINNIKVNGKAIDVDTKRRIYEELFVKSRKKVTKKSIFQFLKAEGLAKATDIIDGVDDQLKYSLSSHHDIKRIIDKTSYETAESIIRRVVLLGNDKKMLADWVRKNTSLGEDDIKYICRLKYKNWGRLSETFLTGIYDVDKTSGSGEMLSIIQAMRDTNENLMQLLSDRHEYAEQAARCKADNLGVSGNPREMVDDLYVSPKIRRSIWQSMRIIDEIVDIKKSAPKKIFIEVARDVNDESKKGKRTDSRKKQLIDQYKLCEREGKQLLEVIGKSRFAELKEKLESEDDSKMGKHLYLYYRQFGKCMYSGESIDISQLNNKKLYDIDHIYPRSKIKDDSFDNTVLVKAELNRDKTNIYPIEEKIRTKMYPFWKHLSDIKAISPKKFERLTRHTPLTQDELSEFINRQLVETRQSTKALAEILGNIYGKGKIVYSKAGNVSDFRDYFKMLKCREINDLHHAHDAYLNIVVGNYLDTRFTDKFRKNIANETYNLKTEKLYAFNVKGAWTAGG

SEQ ID NO: 6316 - protein, 1091 aa, unidentified
  REGION 1..1091: note = Description of Unknown: Cas Enzyme sequence
MGYRIGLDIGSTSVGWAVVEDDKYGNPIKILDLGVRIFGTAKLPINGISSSEERSLKRRSRRQNRRKVHRISRVKKLLVDKNILSFSELDRLYLDNNFNIYKLRVDAIDNEVSKFELSALLINFVKKRGYKSNSKCESLNQNSGKVLSSIEENRKLIKGKGYRTVGEMYLRDDKFKYKLEDGTFLIDENGNKIIKIRNDIGNYTSVVDREELLKEIKLILDVQREYNKNITEEFINEYLDIFTSQRNFDEGPAYPSKYSGNMIEKMIGKCSFEKDEMRAAKSTYSFEVFKMLQDLDKIRIIKINKKREILNCYNIKDSRGLKKEEKEIIFREFNYASKLSYFKIRKIINLPYNYIFNTVKYDLYNMSMQNDIESLIDNAELDKEAFLCEMESFHILRKVLDKYELNYIYKLDEDILDYIFTILTVYKSDEKRKEYLLKTCLSEDIINLLLNLSFSNFSHLSIKAIRKIIMLLNDGLSYDLAINKLYNNFSGKLEESKNKKISLKDLENITNPIVRRGVSQSIKVLNAIVRKYGRPEIINIELANKFPKNYNKRSNVRKNKLEKKLEIIKEIKVTFKKEIITETDILKYKLWLDQDRICIYSGEEILPNELFTDNIVIDYIIPYSKTFDDSYNNKVLVRNIEAKKKSEKLPIEYIKSSKKGVRDYKKRVFMYCKNKEKINNFLTDKITIKDEIECRERNLKDTQFITRNVLSLIKNNLVLQKNEYINNDRMVVALNGKITYNIRNFFDLKKSRDSDIHHAIDAVIIAITSSEIISEILSNNTLSNNNINKYISVKYFKDKLNEIINKNFENIGLIANNSIFVSRMPKRNVTGMAHRDTISGVNNKGNIIVKRPITKLKLDKNNEIHGYYNKKDDKLLYEALKNRLIEFNGDAKLAFDKPFFKPKSNGERGPIVKKVKLEIKSTSNVNLNKIGGVAKNGDCIRIDIFYIENEGYYFVPIYVSDTIKTKLPNKACISKTLQNKWRKVEDSEFLFSLYPGDLIYIKSNTGINLSTISGEKIVVDEMYGYYIKCGINSNSIAISTHDRMYFQLSLGIRNLSVIKKFQVDILGNCTEVKLPEKRMSFNIKKYNSHAL

SEQ ID NO: 6317 - protein, 1257 aa, unidentified
  REGION 1..1257: note = Description of Unknown: Cas Enzyme sequence
MWGSRIFKEAQTAEKTRIFRGTRRRIDRRRERINMLQSLIIEDVEKQYPNFFPMLRETSLDYEDKNISEKILGKKHNLFSNEKETDIDYYQKFKTIYHLRKYLIDTTEKVDIRLVYLAMHHIIKYRGNFLYEGDFSENSNEISEKLEEIIKFLEDRYEITLKANKEEILNIMKQKNISRGNKKDKIISLFEFDKTDKTIIANVVNGILGYSTDINKIFGTNIEKSKISFATEIENEEEIKIELQEDANIYDCISSLYSWFILQDILKGKTYISEAMIDKYQKYQNDLEILKNVYKEYFKDEYSEMFRKEGKCNYVAYNGKSSGKKYKKCEPKEFFDQLKKKINTLPDQCEYKDIILRQIEEHNFLSKINVTDNGAIPNQLHKKELEKIIENQSKYYKTLEENKDKILKLFEFRIPYYVGPLISKKENINKRYSWAIRRTEEKIRPWNFENIIDIDETAEQFIRRMTNKCTYLINEDVMPKQSILYSKYCVLNELNNIKIDNHRLGKNEKKDIIEKIFKNNKKVTEKTLRNYYKLNGHEIKTITGLTDQTNFNSNMASYIDMKNILGKVDESNIEQCEEIIYWVTIFEEKKILKRKLKQKYKELTDEQINKICKLKYTGWSRLSKKLIAGLKANDGDTIMDKLEKTNLNLMQIINEKSFGFDKKLEELMPKTSDKIQYKDIEEIPTSPANKRAIWQSICIVKEIEKIMKKEPKNIYIEFARAEDYEKNITNKKIKQLLIKYDEIENQIKYLKNYDKNVYKELKKQQNDKTLTEKMYLYCLQNGKCLYSGKKLDIENLSLYEVDHIIPRSYIKDDSLDNKALVLREENQRKTDNLLLKDEIINSQMEWWKSLLDNDMMTQSKYYKLIRRKMFETDDDREKFVKRQLVETRQITKYVTNLLKNEYKNTDIYSLRAELTHDFRDKYKIYKNRNINNYHHAQDAYIISVIGNILNNEWRGDKAEFKYGEYVKKYMKDSKTPWEKHGMIMGFIKNRVNIEQVKKCINYKDCFISRMLEEQTGEFYDKTIYSPNSNKSKLISLKNNKKVEKYGGYSGEKKAYLTIYEYINKKGQKEYELIGIPIKISYDIKNKKTDLETYIKETSLKDKEYSEFKIIRNKILINQEYLDENNENMRLCSDKEIRASKELIVSPKIQELVYIMNSEDKKITDEQKEKLQSEYVYMYEYLLEKIQKEYKIFNNIYIKLKENTNKFKELEEKDKKSIINGIIDLMATGQGNLKAIGLTDREGRKSGQSFKTDKLLKQ

SEQ ID NO: 6318 - protein, 916 aa, unidentified
  REGION 1..916: note = Description of Unknown: Cas Enzyme sequence
LKLQLSFQMKLLKVKKKIICETTLETLKVGEEAELELLIKRGTSKKNKGQIISKYLSLPFKSNWRKSMEELEEELDKLSESKGSEAFLCEYFLNKLLSDKNYKIRNKVILRKRYQAEFDAIWDSQLKHNPQFKLIVENRDLLSTITSFVFPGNSLEKRQAEYRNTAIEKGLKYLIKDQIIYYQRELKDQSDLTGFCRYEKDQKVVAKSNPIFQEFKVWEQINKISINTKIFKGFNKKGEQKFEYNDVPLPASYKQWLFNELQNKKEVSGKGFYTKLEKEGIIIRNESFLNGIHRDAKFKGNETYLFLKSQLKEWFEKLGLTDTNTLISFWDILYNAKGNEYDLDSERCRKIKKFITFQCGEVADIDKTVIRFAKIKFARNYGSLSLKAIENMLPLMRAGKYFNEKLPQSIHDNLLKILNEHQEDPFLKAVEQELENHKETLLTQGGMKPSYAAILVYGKHTTESYSGKNIQSPKDIKPIPQGELRNPLAEQLINEAIKMVAEIWAANGEKPDEVRIELARELKNSADERNKIYKANDANRKVNERVKQRLRELNKETSLGNIERYRLWSSQASEPFPVPEKVTEPTKVEIEKIRLWEEQKCLSPYTMQPIPLSKLFDKGLYDIDHIIPKSRYFDDSLSNKVVCERSVNEDKGNRTAWEYFEIGSTNIPNLLTKEQFTDHINQNFYGKKRKNLLATKIPQDPIARQLKDTQYIATRVREEISKIVGSDNVKTTTGGITDYLRHNWGLTDKFKEITKERFDRALLKIKDEENRNELKWTKRLDHRHHAMDALIVACTDQSHIQRLNNLNKELQTELAKNKDLVKKGFEGTDEELLSEFVNLGLKERKAILDKLPSFRVFAHPWTAFSDEAKSKLETIIVSHKPKEKLLIQKIEKGEDAGKKDTLRIRGKLHDATLYGL

SEQ ID NO: 6319 - protein, 235 aa, unidentified
  REGION 1..235: note = Description of Unknown: Cas Enzyme sequence
MNKKILGLDLGTNSIGWALIEKNTENFTGRIIDIGSRIIPMGAEVTNFEQGNPQTKNAERRSARSIRRMGKRYKARRNKLLYILSKLTMLPEQFKFSTQFNDPLKIQKVNLLPIKKGISQLTAKELLQLKVKALSKPIELQELGKLIFNYNQLRGYSGGGNDDEEINDEENKEPAEESDDFKKIEKIIDIIKVIELPENYSIKIEKDNLKSKKQKFEITIELSNETVEGEKKNNM

SEQ ID NO: 6320 - protein, 1506 aa, unidentified
  REGION 1..1506: note = Description of Unknown: Cas Enzyme sequence
MGRILGLDLGTNSIGWAIVEAEINSEGQVKQYHSILDSGVRVFPEGLEPDTIGKGENEKSRNAKRREFRQKRRQFYRKRLRKIKLLEILIDQNMCPLDIEDLNKWKIYHKNETTSKREFPSSSKFNKWLKINPYELRAKALNEDLSLEELGRIFYHFIQRRGFVSSRKEQDSESGALYKGKDEKVGISETQEKMEDKLLGEYLYSIIPAKGEPYKEYRDEDGKILRARSRYTLRDMYIEELYHIWQRQAEHLKLNNQKAIQKKIRILKGSLSSKRNVEKINYLERKYGKENISIEKNIVTSVNEISLFRYLAGKIWIEDGLLVHKNTHESILFWQRPLKSQKNLLSKCRYEHQVSYVDGKKIETGKTPCYVSHPEFELFRAYQLINNIEFGTKQKLNTEQRKVVLELINSKKANFKFKDIPKKLKLTSERFNYDDDFSIPCNKTIANLRPLFDTEIWEKNYCEIWHCFHFYTDNDKLYEKIKKDYSSKCKSADDLKKIHLSADYGSLSLKAIRNINPFLAKGYSLSLAVILAGIKNVFGKEKWDMFSKEHKLIENTIKHFMKEKNAEGELIEKIKVFLSSGYKEIDFEFASNDKRFKKLYHPSVDLKANDGDLKDKVPTIPNLRNPLVQRALSETRHVVNALIKEYGKMDIIKVEMGRDLKNNSKSRREQTFKIRDNQKKNDAARDKLSEFGLAHTRQNIRKYLMFKEIEEHMSPVICPYTGKTIRINDVLGTGNLFQIEHIVPYSVSLDDSFGNITLCESNFNREKGEKTPYEFYKSNPDPLLWGGAKSWDDIERRAFSLLPYNKAKRFTSTKQLDNESFISRQLNDMRYISREAKNLLMEICDNVQILPGRLTAELRRLWGLNNVLQPAENLTDADLNIYVHEKYKVPHWAIVREDGSFVSVHKKQNDKPAVTRGVCIFPGTINKEVFKSISSYDIAVPEYPNGKYWCKTSVNTTPTFYRYYNDKPKSTPRTIVVKGSVYNEKFNYEKNGSNINADTKPNGKYWATFDVLKTTFIDKERPKPKKGQLAIWGKIKEGYFTSYNYSCPTDHVDADIWVVLDLDICDITFTRVLAEKPSFLSNQIILSGSTDKDGSWISDENPDQAYATDLSRGKYWAVFDAYDDELDFYPIVNEEPKAKKNEKVIEGSIWIDKQGEVRFDPKKNREDQRHHAIDALAIACMERGFLQKLSTYNAQIRERYEGERGTRPEFEKPWENFRSDVQKSADKILVSYFKNNRAFDRGKKFVSKNGEKHLVQVSAVRGQLHKETVFGKRTAPDGRTAYHVRKSITSLANKTQVDKVVDKTIRKLIETYLQEEFGIDTSTKYTVPTDAFLKEGTFMIKLPNKNGEDVPVTKVRMREEIGNARKLKDNINQYVNPRSNHHVMIYKDKDGELKESIVSFWDVSQRLKNKEFAYQLPEDGKEIMTTMEINDMFLIGVPGSVQLDNVEMLSKYLYRVQKISSSYYTFRHHLASTLNNEDEEFRIVSFKAWGTYKPQKVDICLDGHIK

SEQ ID NO: 6321 - protein, 1012 aa, unidentified
  REGION 1..1012: note = Description of Unknown: Cas Enzyme sequence
EENDKKPTALCNLGVRIFQKAVEEKTPTPKNQKRRDKRLARRVIQRRARRKQRMLNYLVKLGLLPEEIQGHAQPEIILNDLGAPYQLRARALDKKLENYELGRILLHLVQRRGFLSNRKTLLGDMIDDPDVIAILAEDDTAEDSSSERAKEETAFKKDISQLRKTIEENGFRTLGEYLASLGHHDCKRNRSREGGHLKTDRRMYREELDLIWKKQSEFNNQLTDELKEQLEEIIFYQRPLKLRSDRVGKCSLEPGRKRAHVARLEYQQFRYLQDINNLKYFDHYKEQWQDLTQDDREKLIVLFESKAHPTFKTDVRNALGLPKGTEFNLDTDNKKLKGNITACEIRQVLPAWDEIPTEKQKPLMEDLLTINKKSVLKNRLIQFWKFDIETAINLCLIEFENDHANISLKAINNLLPHLRQGKTYSDARVAAGYGYETKEIKTKDNLGMPPEIANPIVNKALHEVRRVINAIIKEHGKPDIIRIEMARDLEMNTKKYKAFIKQQSANTKANDEAVQKYQEMGRKNPQLKLSKYPSRADKIRYRLWKDQDGRCAYSNKQIDLTTLFSSEVDIDHIIPYSQSLDDSYMNKVVCYAGENRLKGQRTPVDTWSGNEERWLQITQSVNRWARNLSAKKNRFYMKQEDVMERDFISNQLNDTRYISKIALDYVKQLGVDVSVSKGQTTAWLRHMWGLNSLIGETDKKERTDHRHHAIDAVVVGCVGRTFYKNLTGLAKELEKSRSGATIKDMNIDPPWDNLRNDLNDRLNTMIVSHANQRGISGALHEETGAGYIEGIGTVYRTDLNGEFKTTQVKKIIDDTVREIVEAHLLKHNNNPREAFAEGTMVYHRDGKTPIKRVRIVQAKTTPDKLKKSKFGARDITGKVFKWLPYGNMHHVELIKHRETGKYSGVFVTMMEAARRVRGIGEKKCPPINKNHGKEYEFVMALHINDTVSVMVNGCKRYFRIQMLDSPNKRVKLRNHAASTLSNDQDTFPDRELTIPALMEKELELCNLNCIGR

SEQ ID NO: 6322 - protein, 992 aa, unidentified
  REGION 1..992: note = Description of Unknown: Cas Enzyme sequence
MKEKILGLDLGPNSIGWAIVEDEDNSPKSVLGTGVRIFQEAVEAKTRTPKNQTRRLARSARKRIKRRRMRKETLKNTLIKHCFLPSDKDECNAILQNTAEMNPYEIRAKGLYEELMPYEFGRALFHMNQRRGFLSNRKTKDDKADGPVYSDISRISEEMNENGYRTLGEYLNSLDKQRGVYTNRAMYADEFEQLWEAQKFFKPEIFTSDLKLKLYKIIFFQRPLKSQRHLLGKCTLEPNKHRCEKARLQSQRFRYMQMVNNLRILDPKGIKDRELNREEKEKIYSKLEKKKSYSWKAVRKDLGLHDGELFNLEVSETDKLIGNKTAFDIRIAFKNWDLLSEEKQEQLFEDLFTIENESGFMRRMTEHWKFDEQTAEALGKVDFEKGYDNLSLKAINKLLPFLKDGLIYDKACEAAGYLHSDPNKHVDNLNFLPDPPFLPNPVVNKALWEVKKVVNSLIREFGKPEKVRIEMARDMKQSKKQRIEDQKNQTKRKNENNNARKILEEDFGISYPSRDDVIKYKLWDECNQMCPYTGQAISKEMLFSPEVDIEHILPYSLTLDDSYMNKTLCMAKENRQIKRNRSPYEAYQNQTEKYDTIKLRLRSMTKMPHRKKERFLEEEIKIDDFIERQLNDTRYISKEVKNFALKLGVKVDVSYGNATAALRSKWDLNTILAPRGEGEKNRMDHRHHAVDAVVVALTSRSLFIFLSKRSQEMPFGEGLSNGRFSVEPPWYGFRDDVKEHILGIIVSHAPLRKLSGALHEESALGLAYIEENGKNAMMVKRVRLDALSPPQLDKIRDDRTRELVKNHIREFGDKLDKATMKKAFAETLYSDRAGTVPINSVRILVSMKTSTLFAVENMDAKKYKYYRYGNYHHVEIIENVETGKRKGVFVTTMEATRRSRINKEKIVQRNHGPEWKFILSLAINDMVVLNDNGDRHICRVQKLEATNSNLVFRHMKAATLDNKEELYNRSPNKLNCRKISVDPIGKVSNCND

SEQ ID NO: 6323 - protein, 1378 aa, unidentified
  REGION 1..1378: note = Description of Unknown: Cas Enzyme sequence
VIRCNLDFIPLQIYYKCFVLQNKIITFITKSRIKVYKSENIMARILGLDLGTNSIGWAVVDKDGDKFKLIDKGVRIFQEGVKIEKGIESSKAAERTGYRSARRIKYRRKIRKIRTLEQLSKFGYCPNLSEEELKLWRFKKVYPENDSFKDWWRTDENKNITPYYFRNLVVTEKLDLDVEGNRFMIGRALYHICQRRGFLSNRLEGTKESDGAVKKAIKNITEEKGELTLGQYFYDKYLNGEKIRDTYTHREEHYLSEFNKICEVQDLPKEFVGAVKDAIFYQRPLKSQKELIGKCVFEKNKQRCAISHPLFEEYRMLCFINNIKVKTPNDEKLRFLNSGEKQKILPQFFRKSKDHFDFEDLAKQIAPKKQYCFYRDRNKKPEYYQFNFSMKTTVSGCPVSARFKSLFGDAFFDSEFNYKLNDDGNLPKSIQEAWHVLLTFDSDVKLNEFAVEKLNFDDEQQKEFSKIKLKQDYSSLSLKAIKKILPYLRVGMIYSHSVFMANLDTVIPKEKWSNPSIQKDISDEIKNLILTQNEEKQIVEIVNGIIKNCRENGECWSSEAKEYFVKDIPKHLKLFYGANKYQGFSEDKKRWIESSLLKLLEVQMRKNNDRGEFAKVETIDEKLKAYIIEKFDVSKKGLENIYHPAAIEVYKKPLRSADGNLYLGSPMVSSVRNPMAMRALHQLRKVVNELIKSEIVDSNTKVNIEMARDLMNANERKAYQRWQSDNEKQRKDYFDRIKEYYVSQNINTEPSSDDILKYKLWEEQNHKCLYTGKEICISDFLGANPKFDIEHTIPRSLSFDNSQVNKTLCDSSFNRSVKRNKIPFELSNHSEIIARIEKWKELYEKLEVQISIAVRQSKNALDKETKDRAIQKRHKLVFEKNYWREKYRRFEMEDVPSGFKNSQLVDTGIITKYSRMYLNTVFDKVYTVKGNTVADFRKIWGLQDEYEKKARVNHIHHCIDAITIASISKENYERLAKFYHDYEEMNIRGAKTKPDFEKPWPTFTEDVKKVEKEVFVSHYTADNLPKKAKKKLRKRGVIQKNSKGEIKYQQGDSVRGSLHKETFYGAIERYVVNKKGEEEKKIRYVVRKPLDSLEDSNLKNIVDDRVREIVIEARAKEKELRKERDKLDKRLNKANKEDEKLIQDDINEINAQIKSLYSLENRNGAPIPIKKVRIYANSVTNPIYLKEHRDKAQKNRKSHKEQVHVVNDSNYAMALYEGVDKKGKIKRDFELCSNLEAISLFNDLSKNGLKDQKIFPQTKEQANEECYLKSIIKIGTNIILFEESPEEVWDCLIEDINRRFYKIIGLSEQLIQGRYRYGTIVLRHNNEARQSIDLKVLDGAFFCGEEYKAMRKMNHNQLSALVENIDFYINSIGEIKRI

SEQ ID NO: 6324 - protein, 1069 aa, unidentified
  REGION 1..1069: note = Description of Unknown: Cas Enzyme sequence
MIYTLGIDVGTNSVGWAIVENECKVIDAGVRIFSEGVNEEKYKKSYVEESKNIRRREARSARRRYFRFQIRRELLSRKLETLGMLPSTFIETPLELYGLRAKALNEKIPLEKLGRIFLLINKRRGFESNRKSMLSESAKQRSEYYSAMEENKKKIEESGARTIGEYFYNELLRGNFLNDNPYEPAERIRDRFIYRTHYKEEFDLIWKKQAEYYPDVLTQENKRVIRDEIIFYVRPLKSQKHLVSKCRFEPLKRVAPKSSPWFQKFRIWQVINNIRVDDSGGLYRELSIGEKQALFDQLNKSKELSHSGIKKALGLSKTSGLNDLPPNIKGNTTYSGILGIIGVENYNLLNENDLYLLWEKLYYADNREWLYNNLIQKFGYTENIIDKLCNLSLEDGYGNISTKAIRKILPFMETGEGYDKACENAGYRHSDFFRQDEELPELTELISTGDKDPVLSFILNPLVKKSVSEAIKVINAVIRKYGKPSRLRIELSRELKMPKQKREERLRKNRQVRELRESYVKFLSERFHFTKVTRGDILKFELWLELEHSPEELKKLSPALSESDFRKFALNVNPKDKTKFRLWLECGRKSPYTGKIIPLYKLFSNEYEVEHILPYSLSLDDSFSNKTLVEREINRLKGNKTAAEYFSSSQAEFDLFEKRISGFSKNKKEKLKMVEVPEGFRANQLTNNSFTGIALKRKCMEAIRNVEVTNGQTTSKLRRYWGLNTILNLDETDVKNREDHRHHSIDAIVIALTTPRFIQLLSTAYKYNVKDEFVKTKIPLPSTTFREEVKAITNLMLVSHRKEKRLLTSKNNKYVHRNSSSNKFQKVSSVRGQLHEETFYGKILNPYSGVEEFVYRKKLSDLDEKQIAKIVDKPIQKLIAETSNSSGQSLKEVLKSDLVQKNKSGRGVAVKSVRITAKDKNLYPVKVKGVNGDSFTRYVKPGNNYMANIYKDEGGKLQIKVLSLMEAVSRKMKGEPLVEVMDGWQYIHSISQDDMVILYDSKDESEELINDPHYIFANLYKVTKFSIDKSLGVLKHYFVNNDDRVEKSFRQLPLVKVKIDILGKVAGIG

SEQ ID NO: 6325 - protein, 1068 aa, unidentified
  REGION 1..1068: note = Description of Unknown: Cas Enzyme sequence
MSKIIGLDVGIASLGWGVIDLDSQQIVDAGVRIFTKAETPKTGASLALPRRIARTTRRRLRRRRHRLQRIRNLFVEKGLITEVNRDTVFAYTKNNLSPWQLRYEALSRKLTSEEWARVLFHIAGRRGFKSNRKSELDDKEVGKLLAGVNANSQLLDEKKYKTVGEMFYKDPKFSDKKRNHPASYAHTVARDLLVNEIETLFKRQRTLSNLDAETSFEAEFLEIFSSQRSYDDGDQINRMRGFCTFETDQARAPKCSYTAEYFVATSKCNNLTISEEGKRRRHLNLEQKQLLIQLSFKNLKVTYAQIRKELDIANNVRFVGLDYDQAQQKGKNSEAETFLELKGFHRLRKAVEKTCGKTEWNNLAGRPELLDSITEILTCWKTDDNRQREMEEMGLSKKLIDALLPLDGFSQFLNLSLKALNKLLPLMLDGQRYDEACTQVYQDHSRPSQKQKQTLLPPIPAEDIRNPVVFRALTQARKVINAIIRKHGTPDRLHIELARDVPKSYKKRREIIRAQGDFRSQKERAREHFISLYGTPPKGQDLLKFRLHKAQNGCCPYSGEAIDSTRLIEPGYVDIDHILPWSRTFDDSLNNKVLVLTAENRRKGDWIPFEYIAREDPNHRDWQLFKARVAHYPYPKRWRLLKERLDDKDAKAFKERNSNDTSYIARYLKNFIENNLSMARDDTQSVQTSNGVLTNYLRVRWGLLKDRSESDLHHAVDALLVASITRSMIKQLSDASRRQELWASDKPKDVEELGDTRTNEVSSSPFQDNPRLQLPQPWENFSQQARKYVESKVFVSRMPIRKITGAAHQETIRSAKYLGEGYATVKTALADLSLSKLEAMHDKERNKSLYEALKERLLEHDGKGKKAFEEPFFMPPGKKSQADKSIAPRVHSIKLRIMMNEGVPVNKGIAANDRMIRTDVFKKDGKYYLVPIYVADRVKAALPNRAIFQGRQERDWPIMDRSYRFCFSLFRNDLIEIKHKTKGNLLGYYAGCHRRTGAINITLHDRSLPLRSNNWINDAKLLTMREKGEKEISGIGVKTGLDHFHKYEVDVLGSISRVREGGARLGLA

SEQ ID NO: 6326 - protein, 1040 aa, unidentified
  REGION 1..1040: note = Description of Unknown: Cas Enzyme sequence
MPARRLGLDLGTNSIGWCLLDLDSHGDPVSIFRTGVRIFSDGRDPKSLGSLKATRREARSARRRRDRFIQRQKFLINELVRLGLMPEDDDHRHALAFKDPYAIRKKALDEQVHPHDMGRAIFHLNQRRGFKSNRKSGDNEAGVVKQSIAELEVRLMEKKARTIGEFLADRNASKDTVRARRLGPKTADLYEFYPDRSMLEHEFDTLWSAQAAFDPSLYNEEARNRIKGVIFFQRKLKPQEVGRCTFLPEEFRISKALPSFQRFRIYQELSNLAWIDRDGAGHSITASISLRDRLFNELETKKKLTFKAMRAILRKEGVVDYPVQFNLESDLRDHLIGNTTSCIMRDPKKMMGEAWDKLDEEEQDQFIIMLQDDGMSDDEVMSLMKTKYGLSENVAEACLDVRLPDGHGALSKKAIDRILPVIRDQGLIYYDAVREAGFGEANLYDPNAPLSDRLEYYGKALAGHVMGASGKPEETDEQRYGAISNPTVHIALNQVRAVVNELIRLHGKPEEIVLEIARDLPMGADGKRELQKFQREGLAKNERARDELTKLGHIDSRESRQKFQLWEQLSSDPTERRCPFTGKMIALADLFSDKIEIEHLLPFSQTLDDSMANKTVCYREANREKGNRSPFEAFGSSPAGYDWQEILERSNSLPYSKRWRFLPDAMKRFDTEGGFLERQLNDTRYISRYTTEYLSTIVPKNKIWVATGRLTSLLRGFWGLNSVLRGHNSDDDQPVKKSRDDHRHHTVDAIVIGMTSRGLLQRVSKAARRSEDLDLSHLFKDRIDPWDGFRDEVKKHVDEIIVSHRPRKKSQGSLHNDTAYGIVEHNESGASTVVHRVPITSIIKTTDVEKVRDPIIKSALLNETAGKTGKPFEEAVQNWCGSQGIKSLRILETVSVIHVTDQSGRAYKGYKGDGNAYMEIYEEPGSGKWKSEIVSRFDAQPNRDFVPDWKRVYPTAKLIMRIRKNDLLKLRSGPNAGLFCIHVISGSKITMASHVEANVDARNRSKDDQFIYTTTSATSLQKAGAVKLNISPTGLILEAQ

SEQ ID NO: 6327 - protein, 1359 aa, unidentified
  REGION 1..1359: note = Description of Unknown: Cas Enzyme sequence
MSKEKKAYYLGLDIGTDSVGYAVTNESYDLMKFRGEPVWGTTTFEGASTAEVRRMSRGARRRNERRKQRTQLLAEIFAPEICAIDPNFFIRRKESALFAEDSRHGVKIFDGGMSDKEYHKRYPTIHHLIFDLMNTEEPRDIRLVFMACSWLLENRGHFLFDSSMEEKQDFAVAYKEFEEHLFQEYSCGLPWSEDISADIIAEIMQSEAGVTRKQSMFTEKVFGGKKPAKKADEEFPLSRDAMVKLLSGGKAAPKDIFPNETYADVESVSLGIDQDNFERILEELGDDAALLNLMRDMYDCALLRAILKGFDSISEAKIAVYKQHAKDLKWLKYFIRKYKKSEYNKVFRKAEAENYVAYSYNTKNCKDEDVKKLKQKADKEVFSKFLKKIVENIQVEESDEEKYNNMLERLDSFTFLPKQKDSDNRVIPQQLYRRELAEILKHAKAYMPMLEEKDEDGISNEAKILSIFDFKIPYFVGPLNPQSPFAWLERKAGKIYPWNFEKMVDFDKSEQQFIRRMTNTCTYLPGEDVLPACSLLYSRFAVLNELNNLKINQNSIPVEVKQEIYNNLIKPAQGKISRKKIENYLQSRGYINPGDEISGIDITMTSSLKSYQSFEKLISSGILTEEQAEDIINHAAYSEDKNRMARWLELNFPSLLENDRRYILRLKLKGFGRLSKKFLTEIMGCEKVGTGEASSIIEALWETNENLMQLLSEKYRFKEQIEAFTSEYYSNPENKKTLSERLSDMYISNAVKRPILRALDISSDVVKAMGCAPQKIFVEMARGGAPEQKGKRSVSRQNQIIELYKKIKDEEVARLKNELEAMGEKADNRLQSDRLFLYYMQLGKCMYTGEPIKLSELSSKIYDIDHIYPQSRVKDDSILNNKVLVLSTANYSKKDVYPIEEAIRVKMSGFWEHLKNNSLITAEKFRRLTRSSGFSEDELRGFINRQLVETRQSTKAVAQLLKEKYPESELVYVKAGMVSDFRNEFDMLKCRSLNDLHHAKDAYLNILVGNVYHEIFTKRWFDVKSKYSVSIKAVFGNVQEPRGKLVWRGEEDIAKAKKTMAKNAAHLTRYSFCRSGGLFDQLPLRANAGLIPRKKGLPSEKYGGYNKPTASFYLLVSYAIGKKKDIIFAPVELRFRDRVLKDKEYAVEYLTEVISEINGGKKITDVNVLLNGRIIKINTVLSLDGMLVTIRGKGSKGAVVVVSSQLPLTMSLEDERYIKRLESFSEKKNKNPKIVLNEEYDHISSEENLKLFGILKEKLKDSVFAKCPGNIYDILEKGEKSFASLDTEEQVNCLMNIVAWFNGAPTCDLLSIGGSKQSGKRQPNSRLSAMKKRYNDIRIVDMSSSGLFVSRSENLLNLL

SEQ ID NO: 6328 - protein, 949 aa, unidentified
  REGION 1..949: note = Description of Unknown: Cas Enzyme sequence
MNAAIVNGRTRLGLDMGSNSIGWCLLGIDANRNPTSVIDCGVLLLTPNQEAGRDPQSKATLAADRRVKRSMRKRRDRFLRRQERLMQALIAVGFMPPNEKERKALEKLDPYELRARALDERLEPSELGRALFHLGQRRGFKSNRIADGDDNEKGAMRAGMRALEAELEKEIDGKHPRTLGEWQFLTLCEQNRIINDKKATKEQKQEALKTREGVRFRPRKNGAKIEYPLYPNREMIAAELAAILEKQANYHSKIDEALRKKLARIIIEQRPLKPQPVGKCTFRPGEDRAPKALPTFQRFRVLSDLASLRIEIPGVGSRRLTLQERDALASKLMTARSSMKIEFEKLRKALKSIPEGARFNYEKQDRKGFDPDLTTAAIVVRFKKHGLDKGAEAWWRALPRGRQTEIVERLITEEDTSTLTEWLVSSLRVSSEVAEALSDARLPQGYGSLGRSMLTDLIDVMENESIEAVDRSTGEIFAAPLGYDEAVARLDLHHSDHRQDGNLARLPYYGDVMKRHVIERPSAPEDSQERRGRVPNPTVHIALNQMRKLVNAIIETYGAPDEIVLELGRELKWNQKRKDEYKRELNENTAANDRRKKEVQALNDEYRLGVEFNGETKLRLRLYDELPADERVCVYTGKPIGRQDLFTGEIEVDHILPFSKTLDDSFGNKVLCTRDGNRRKGVRSPAGAFSGAELTEIAERAERLFKSKAWRFQPDAMEKFEERRDFIDRHLVDTQHLSRLAKDYLGYVCDPDKVWAVPGRMTAMLRGLWGLNQGLLPDHNAPAGKKNRNDHRHHAIDAFVIACTHRGLLQEIARRSARNEELDGARLLDRDTIPEPFDGFRPALQEKLQALVVCHKADHGIDPKAKGKAPKNRFGVSAGRLHEETAFGLVKEAISGKEFNLVTRKPVAALTPNEIDQVRDKELREALQSLRDSVGGDKKSLADALAAFG

SEQ ID NO: 6329 - protein, 1060 aa, unidentified
  REGION 1..1060: note = Description of Unknown: Cas Enzyme sequence
MNGMRFSFDIGTNSIGWAVWRTGEGIFGSDTALELARTGVLIFKDGRNPKDGQSLAMMRRVPKQSRKRRDRFVLRRNDLVKALRTAGLMPTNEEDAHGLFESDPYFLRAKGLDEPLTSHEFGRVLFHLNQRRGFRSNRKTDRKDSDKGKIADASKRLQVLLEETNSRTLGEFLWSKHRGTPRTRQATRIRVEGEGAKSLYAFYPTREMIRAEFENLWSVQAGFAPERYSEALHDQLSKIIFRQRDLKPPKIGVCTFEPHERRLPKALPSVEARAIYEKLAHLRLSTGPVDERPLTKPERDVVASALLAGKNLTYKAVRKALKIPAHTRINFEEADENGIDGAATAKFLSKPDHYGPGWLALTFERRDQFVAKLLDEVDEDRLVARLAAEDDLTDDAARRCATIPLADGYGRLGATANREVLEALIRESDARGCVVTYAEAVRRAGERIGRPWHHSDERDGEIMDRLPYYGRILQRHILPGSGDPDEKDEAARYGRIMNPSVHIGLNQLRKVVNGLVAEFGPPDQIAVELARELKLNREQKERLDRENRANRGLNEKRSAELARLGERDTPENRVRLRLFEEQARANDGIAECPYTGRKIGITELFTADIEIDHVLPVSLTLDDSMANRVLCRREANRSKRRQTPFQAFGSSPEWPDILARVARYAPNRRWRFKPDALERYAKDGDFLARQLNETKYLSRLAKIYLGKICDPDRVWVTPGTLTGLLRGKWGLHSILSDDNSKNRADHRHHAVDAVVIGALTRGVVQRIAHEAGRAEDRDLEKLFTEIPAPFDDFRDHVRNRIRSVTVSYKPEHGREGALHEDTSYGIVPESDPDYALGNVVLRKPLKGLTLNEVERIRDRGIRERLTALAAPFRGPSGKIADAKGFAQMLESFAVENGIRRIRILKPEASVEPISDRETGEPYRAVAPGENHHVDIVQMRDGSWRGFAASVFEVNRPGWRPQWERDRLGGKLVMRLHKGDLVEVDDSDGERRVKVVHRIEISANRIRLAAHHEGGKLQERHAEPDDAFRWDLATIPLLKDRNCRAVRVSATGSISRRVRNV

SEQ ID NO: 6330 - protein, 1067 aa, unidentified
  REGION 1..1067: note = Description of Unknown: Cas Enzyme sequence
MGENYRLGLDLGTNSIGWALLRLDEHGVPCGLLDFGAHIFHDGRDPTSQQSLTADRRVARSARRRRDRYLQRRRLLQALLLDYGLLPISRDERKDLGRQDPYTLRARALDGPLEPYELGRTLFHMNQRRGFKSNRLSGEEDEKERGKIAERIGKLREEIDPGTPGRRTLGEWLHRRHARHKPVRFRPESATFYPTREMYEEEFDAIRKMQEQNQTLTPSQWDALRTIIIHQRPLKPVEVGRCSLDPSEPRAHKALPLAQEFRIYQEVNNLRICEPGQRKERPLREDERETLVQILLGGTDVQFSSLAKKIGVDERTRINLASEKRKKLDGDATAKKLGNKNIFGRRRWNQLSGESGVREDTRHRQNEIVKALLDQNRNDDELIATARREWGLDEEAASGLCRVRLPQGTVHLGETALRRVTPELARGLRYDEAVRLHYPHHSDLSGDGQSSELPYYGKFLPRYVVGGGKEGDEAARHGRIGNPTVHIGLNRVRKLVNELIGVHGKPDSIVIELARDLKNSLEDRKEISKRQAEAQEANEEREKTITGAKVQPTPLMMRKIRLWEEQAVGSTKQCPFCGGNISINQALSEKTEIEHLLPFSKTLDDSMANKVLAHTECNRRKGNRSPIEAFGAEKSGKYEYAGILERARRLPGNKAWRFNEDAMERYEREERGFLNRQLNETRYISRVAREYMTSICPKEKVYVVTGQLTAMLRGKWGITTGKLLGDGDIADERSKNRNDHRHHAVDALVIALTSRSLLQRVATLAGQNREAGIERLLANFPKPWEGFSHEEIRQRLARVVVSHRPEHGLAGQLHNATAYGMIRRLEEGKEPFSNDKYQVVVTKPLASPKPQPKLLDAVRDDGLKKALNKLWNSVDKTESGKPAEKWKKFTKRAASPGELGKFGFSGAKHGVRRVRVTENLTVHPLPRKGLYKAVKPDSNAFMDVFEMPNGKWQAVTITRLAANAPDFQRRHNKLRPHPAARRIARLFAGDMVAITENGEGNIYRIQKLSGQQVIFAPHNEANADQRNRDGDDPFKLTGKSVNALRSLGFRKIHVDILGRVRDPGPRS

SEQ ID NO: 6331 - protein, 1129 aa, unidentified
  REGION 1..1129: note = Description of Unknown: Cas Enzyme sequence
MFSYRLGLDVGANSLGWSVLELNEQGDPCAVRDAGARIFSDGRVEKSKATLKADRRAARSARRRHDRYKQRRTFLLAELTKAGLFPESQGERRELQKKDPLELRARALKEKLEPYEIGRALFHLNQRRGFQSNRKDRSKETTSGMVSNSVTALLRAMQLMEEGYSAEAFKALPKEAKKEAREKEQQQKKDALGKLQQQHALTFGSFLWERRARKETTRARPNSDSKIYDCYPTRDMLKHEFDAIWKAQAGHHPELLTDPRRDRIRTVIFTQRPLKPAKVGKCMYLPDEDRMFRAMPSFQRYRIYQEVNNLEWTTNRGKHRLIDHPEARDEIVDMLERPGTQKGNVTFSKMKNVLQKRKLATNDCRFNFETPKRNGFDGNLTSNLMQDESRVGKQWHTWSLEKQDSFIEVILDGTPEQKQRRAEDERRGLRVIRDGTRDDEEVQAYLRRTYNLSDTSAEQCMSANFVQGTASLSKKAAAVLIEKMRDDRLIQPNAVREAKDKEVFPCDEEVTRKDQLPYYGKAFLDGRHIIPGDRHPADKDDDLKYYGGVTNPTVHIALNQIRHVVNELIDRYGRPASIAIELGRELPAGQEGRAEINKAQKANQDNNERLDNRLREQGQSTIPDNRLRLQLWEELDKDPNGRCCPFSGQKIGIADLFNGQAEIEHLIPFSQSLDDSRANKVLCTRQANRDKGNQTPYQAFGHSPGDYNWNEILRRSKSLPQNKQWRFQKDALEIWHRDHDFTERHLNDTRYIGRLAKEYLCNICQSNRIDVLTGRLTALLRGHWGLNSVLNERNQTQEKKKNRNDHRHHAVDAIVIGMTSRSMLQKVATAANHAEELDLGRLFYKSQIDPWDGFRDDVKKVMNGITVSHKPKRKPLDKNATDGQLHNDTAYGIISGPDDQGHFMKNAKVVVRKPIEAFEKRDDVASIRDKHLQCEFLQAFDDEVAAGGKGSDGVARLAKDRNIRHLRRTETLSVIPIRDKSGKVYKAYKGDSNWGIEIYEWPKDHKKAGKWEGVVHSRYEANQKNFLPGQTRKPHPAARLVMRLHVNDCIEIEQDGLKPIMRLQTLSQSLGFVPHNEANVDTRNRDKNDPFKYLYKTADTLRQCSARKVHVSPTGRVSYAKRPKPRRKK

SEQ ID NO: 6332 - protein, 1173 aa, unidentified
  REGION 1..1173: note = Description of Unknown: Cas Enzyme sequence
MSKLIISPIAIDLGAKNTGVYFAHYPAGSSLDEIEKDGKVYQLEKDSYTLLMANRTAARHQRRGYDRRQMAKRLFKLIWCKHFGLEWGKDVQQAVGFLLNRRGFSFLTEEYDADVLRQFPKEAFDELPDNLKIQQNDSGYYDFAGALTEWGNEGEAKVKSLYESLNKEPKRVRARLLFISRTDKLREYCLRRKEGNKIPKEKQANLSRLSRWILEEWIKEGVHGLPGIPAENTVDLVEYLNNKSATTSGEILHSLPSESSLKQKKSELKKSNWEFEPEKFQMGKANFGEPENPDVKTHLYHLAFAIHKIHDELRSGGRHRSKYFEEVKNVLKSKNWVEKEEDRKTLSYLDRFCKKLQTGDFPRLQVDGLTNLIGHISNLELKPLRKYFNGKRHGKGDYWDEARLTRLFDRWILREWRVGEKDKDKTDDGKWSYPELKDRWNGRGRSIVNFWLETPPEYTIPPYQDNNNRRPPRCQSLLLNVDFLSLKYADWRKWLNELKGIESIRNYLDGYEKQLKGLKSGKRGRYFSDEQKGKLRNDSGRRSMAELDARVLQFIFDRVKAEDRLNLNEIYSHSKKIKQDMHKQDDQSVKAVDQAKRELDESIRNSGLPQELKIAPDYGRDDLFPESSFFHLICKYYKLRQRARDGRIFIHPEYRYTKESGYKNTGRFNDKEHLLTYCNHKPRQKRYQMLGDLAGVLQVSPHDMEQVAGKHAGETMDDRLFNWLCDVNGLRANCARAAKEQKERRGRLKLDIQTVFGLIGHRKKTESPSIKEVKEILKSSTINEAQALYDFCERAKHVCSTLTESLYNDSRQQEWQQELDKNPATAVYLLAQISNIAFKERSGNANTCAVCSMDNAHRMQMASANEGENTTAKAQRLPAIPTRLIDGAVMRMARIVGGAIARDKWEKIAAELAADKHVCVPIITESNQFEFEPSKDELVRSQRTKPRKGKPLERGGELTIAASKDERIRAAGKGVCPYTGEGMTESGGDKDHIIPRSSKRYGTLNDEANLIWASDRGNKEIKKDREFSLADLDGGYKSDVFGGKSDDQIMRWIVEQIGDGSSEDFAFGKYRSFINLEPEQQTTFRHALCVKGHPLHERVINAIDNKNRAFGNGTQRYFAEVLANQLDHRAKSEGRERLLSFEYFGVEAKPNSAGDSIYDRRKLHEEYDGQIAG

SEQ ID NO: 6333 - protein, 1186 aa, unidentified
  REGION 1..1186: note = Description of Unknown: Cas Enzyme sequence
IIDAGARVFPEGVENLGEGQNEQSKNATRRDKRQARRQNFRQKLRKWNLAELLVEQKMFPDIDPIYKELTGKDPSGKKFREKFKKVVRKVQLPEELRNYFSIDPYEARHKGYEGEKLTLFEIGRIWYHFAQRRGYKETLQDNDKDKGVIYEGKPKEGKTGIQETKEKVEEYGTLGNYLYHEDPHETRLRNRYTLRKMYEDEFNIIWENQQEYYPKLLTEELRQKIGGSKRRGDDRDGILFYQRPLRSQKHLISNCTFETQKPRSKKSIIPFELFRTYQLVNSIRVDGYPLIDQDREKIVDYLHSRKRNPKFSSIRKKLSNPDGNYNFSDDKRFPTNNTIYHFRKIFGKRRWDNFTLEEQEEIWHIKYMADDPEWLEQYAKEKWELSDEKIEKLKSFKLDDDYANLSRKAMMNILPYLKRGLLYDKAVLLGGLKSAYGTQKWEQMDDDLKEEIEQKVLDIANDNEHSEKTIDRIKQLLVEEYGLPKKKTPNLYHHSVTDEIDEIKEKLPVPESNKIRNPIVEQALHEVRTVVNAIIDKYGKPDEIKVELARELKSSKEHRKRIRDRQQDREDENIEIKATLDEYGLKHTRRNIHKVKLYNEIVDKAGRAVNPFNPEQTFGIEDLLRQDGFVQIEHIIPESISLDDSLANKTLCGANTNRAKGNKTPYQYFMSQGMSQQEWENYKDRIFKILPFYKAKKFVSEEEPELDDFIQRQLNDTRYISKLAKTYLQHICSKVNVAQGSATAMLRYHWGMNGILSGKYEVGNLQDGEYLAAVDSEDKIIEIVEWDEESLEKDKKRLEDKGQFLQGNVSNGIFYPFKQRDDHRHHAVDAIAVACSKEKYLQQISRFSAKGWDNKTMKENFEVEQPWEGFWQDAKDAIDEILVSHKQNDRILTKVKKQLFDYDGNPKTDDEGNELYAEGYAARGQLHDDTIYGKHIGEDGNPYYHTRKKLEELTSSMIDDIVDTKIKKLVKKAVKKADPGIDFNSSFSVPNNAFFKYDEETKKRKPLVHLPNKNGDPIPVKKVRIRKIKETAVKLKNNINQYVEPQNNHHLVVYEDQEGQFDKEILTFWEVVERQKQGQPIFKLPHEGKRIITTVQKREMFLVGLDDVLLKDHIDDPSYLKDHLYRVQKISVSGYKIVFRDHRASTIDDPTQKVGISSMGETKSGWKTHNPTKVEISPIGEIEIMD

SEQ ID NO: 6334 - protein, 1065 aa, unidentified
  REGION 1..1065: note = Description of Unknown: Cas Enzyme sequence
MVKSFLQEGKLEKNNKLNEYSIGIDMGTNSIGWSVVEEQNGEPKKLIDCGSRIFIRSVEDKTPTPKNQKRRKMRLMRRVIERRHRRKMRLRNYLISKGFLPETLKGKLNPEVELNDLGDPYDIRAKALDGELSPYEFGRAILHMGTRRGFLSNRKTGFGDLREDAEVQKFLESEDKDKNAKSSDKEESDFKEDIKKLREEIEKSGMRTVGEYFATLTRKRNRGIFHDRRTERKMYQDELDKIFEKQSSLNPNLYTKDIKEAIEKIIFFQRPIRWDRKTIGECSLEPKRKKAHIGRLEFQQFRYWQDINNLSWFDVETGELDVKPSLEEKKLIAETLEKEINLTWAALKKKNLLGLNKKTKFNLEKVEGKSRKGIKGNTTACGIREIIGDEWDSWNEEKQKQLVEDLISYKSKKGLKKRLQRHWNLDLQKAVKLAVLELENGHGNLSLKAINKILHYLKEGRVYSKESELTEEKGAVQLAGYEDITTPKTANKDILGKIPFIPNPIVTKALFEVRRVVNAIIKEYGKPKAIRIEMARDLEMNTEKYKRTLKTQKDNTKANEEAEEQYKNIRETNPHLSLRERISYEDKLKYRLWKESGERCSYSGDTINLTTLWTHDVEVDHILPYSRSLDNSYMNKVVCLARENQKKGNQTPQEAFGKTQQWATIEGIINNDNYPAKKRKNIQAKKIDGDFINNQLSDARYIAKETGKYMRTLGCDVTFTKGGATSWLRHQWGLNNIISDTEKKERTDHRHHAIDATVIALTNRSLYKQIVHLASKADDDSISPEHGMEVPPPLDDIRDALENTVKKIIVSHSTNRKLTGAFHEETAYGIRKENGNTGIVVRKNLTAMTDKNLRNIVCPVIKEGFETYVNMRGGLKTAQKKLENDPFRHPKTGDIVRRTKVWVFQNFNEKSYWQHKDKTTGKLLRLLPYGNNHHVEIIKNLKNGKYETKFVTTMEAARRIRIYKEPIAKTKHGEDFKFVMSLCINDMVSVEQNRERKFYRVQTLDPTENRLVLRFHAAATLDKSVEKIMTRVHKLMTDYKMRKESLNALGHLIYKNLVPNDQTNY

SEQ ID NO: 6335 - protein, 1042 aa, unidentified
  REGION 1..1042: note = Description of Unknown: Cas Enzyme sequence
MRFSFDLGTNSIGWAVYQTVESETGESLAPVALCDAGVRVFPDSRDPKSQQSLAADRRKARGMRRRRDRYVQRRGYLMNALVECGLMPKDEARRKGLESLDPYDLRARALDEALPPAHIGRALFHLNQRRGFQSNRKTDAGDQEAEGMKAAIEKLAAQLQGEGARTIGEWLAGRHQGAVDVRFRGKQVGNKMEWEFYPQRAMLEHEFDAIWAAQAAHHPALLTDAARGRIRGIIFSQRPLQPVPAGKCTFEYDEDRAPKALPTAERMRILQDLNHLHARAFPTAQLQPLTLEERNKLFRRLKTGSPMNWKAVCKALRLPDTATFNLQSEKRTELKGDETARRLGAAKRKNIDAADLIGKRWHDLPLEAQDEVVLKLLGDDDDDTVCAWLMDKLNITDTQARHMAGTSMTPGYARLSKKAMDKILPHLEGEVITYDKACDKAGYDHTGQVEETGEVFNRLPRYQEIEAFNRQLAGSGDPNDPYDKRYGRYPNPTVHVGLNQLRRVVNALAEKHGVPSEIVLEIARDLKNSKKARDDIQKRQKQNQDANEKRDAKLRELGLPASGENRMRLRLWEDLNPDDPLDRRCPYTGKQISSTMLFSGEVDLDHILPWSRTLDNSAANRTVCLREANRLKGDLSPAEAVERGIFRQDDINRATANLPGNKKWRFAGDAMERYENAERNFLDRQLHETAWLSRLARIYLSNMCHKDHVWVVTGQLTAMLRGKWGLNGILGAGERKHRNDHRHHAIDAAVIGAIDRGMLNRAARENARKESDAELKLDIAPPLDDFRDHVREAVERIVVSHKPDHGTGGQLHEETAYGIVQDPEAEGGMTLVARKPVVGLTKAEIKRIRNPRIRDELLALTEDASAKELPEILAEWSRDNGVRRLRILKKEQSFIKIDDRQTGAAYRAVIAGENHHLDVFEMPDGKLAFRVATVFQVNQPNWQADAPQDGRLVMRLHKGDMVKIDGADGARKVMRVQQVKVMAKQVVLVPHNEAGDFQKRHDDPNDSFRWEFFGFGNFIKRRLRPVIVSPTGKVKRRRPPAK

SEQ ID NO: 6336 - protein, 1070 aa, unidentified
  REGION 1..1070: note = Description of Unknown: Cas Enzyme sequence
MYRFSFDLGSGSLGWAVFELDEDKSPIALTDLGVRIFPTGRDPKSKESKAMGRRQPRQQRRQIDRRKKRRIELEERLVDAGLVPPASDKEARHAFFQIDPYEARGRAAHGATDLQDIGRAIWHMSKHRGFKSNRKTDRQDDDEKGKIASASSKLQRMLNDSGEPTYGAWLANRHRNDDPVLVRPSSDEAQIAYDFYPTRAMLEHEFDHIWEIQEKHHSALTQVAHDDIRDTVFFQRPLKPVEPGRCTFFPDDARLPKWHPLAQEFLILQQLNMLRIIDDNGAERSLDLGERNQLAEHLMGGTKLTWTTSRKGVRGILQLSADAEINLERDGLNELSYNAMIGRLAGKTQKKAGPLAGIWYQWSEEQRLQLLSILDKSATPEVACERLQNECGLEASLAEQVEKISLPDGHLRLGERAVGAIVQVFRENVIVYSEAVKQASDRGLFGDDAVIHHSDLRDEGDQGITNLPRYNELPALRRMIGTGTENPDDPSDKRYGRITNPTVHVALGQFRRVMNALISRYGKPDQVVIETTRDMAKSARELNEIEREIKKNTSRNDKWRKELEEAGILKPGERVGDRFMRMRLWEELGTSNADRLCPYSGRPISLHQLHSDEVEIDHILPFADTFDDGPGNKTVCFRAANRVKGKCAPADAWSEDELGAIIARVRGAPGMQRKLWRFRAGAMEEWHEQKSFEDRQLNATSYLGRVVRAYTEVLFPKDGTSNIWMPPGRMTAIMRRRWGLHLPGHNAKTRDDHRHHALDAATVGMIDRKTIQKLQDYARQIGAEELSRVLPNPPEPFEGFRQQVRDRVKDIHASHRPDHSVSGRLHEDTAYGLIRDVPENETARRETGNVVVRKPVADLSENEIKQVRDKKIRDLLIAAINDSESDVQKREALKVWSRNTGCKRVRIIKREATVREIVDRKNHPYKWMIPAENAYLDILEDVDGNWFCHKIDIWDAQSAETGSWEKAHPDARFLMRLFKGDTIQLFEADNSGNPISGSNEIKRIDSLQPSVPRLRLAGVNEAGDLMKRHNDDSDPFRWDLARIAKLRHRRVRRVSIDALGRVKTVPHGKV

SEQ ID NO: 6337 - protein, 1116 aa, unidentified
  REGION 1..1116: note = Description of Unknown: Cas Enzyme sequence
MKTKHRFGFDVGTNSLGWSVLKVDDNKPVSLVAAGVRIFTDGRNVKNRATTLKAERRDARSARRRRDRYLLRRQQLLDCLTDNGFFPKDKQERLDLQKEDPLKLRAQALDGTKLKPQQIGRALFHLNQRRGFKSNRKDNSDEVRDGKVSQSIVELLGEMKLMGKPVSKKDFKSLSPDEKKAEKERQFEERKNATEKLAADPAFSFGVFLYRRHESGKPIRARRRADDKLYDFYPSRELLKDEFHKICNAQKKHHPALLIDEVVKKLEHIIFYQRPIKPPKRGKCSFINGEERAYRALPSFQRFRILQQLNELSWTDSDGEILLVRENKAAWEAILGLLEKSQKVTFASMKKCLRKMEIVSGNVKFNFESDKRKDLPGNSTAALMQKDTFIGKDWLGWDLEKQNGFIALLLGSEEDEIVLNKLRGQYGLSEATAGECLNARLEDGAAHLSLRAADLLANKMHNDRIQLSEAIKEIDGDGKVKDFKSPYNRGEGNLLEELPYYGKAFQDGGHIIPGSFEEKDKCDDLKYYGGVSNPTVHIALNQIRRVVNELILRYGLPESIAIELGRELPAGKEKIEELRKEQSENEKRNDRLNKKLEESKQLQNRANRLLLRLWEELGESPTDRHCPYSGKLISPTDLFNGNVEIDHILPFSYSLDDSYANKVLCSRQANRDKGEHTPHEAFEKNPGKYNWEEIHARAENLPPSKRWRFTKTAREKWEQGEGGDFTARHLNDTRYIGRLAREYLANICPQGKIDVLTGRLTALLRRHWGLNSVLSDNDSDIQKKNRDDHRHHAVDAIVIGMTTRSMIQKVATTAKEAEVWNGDIDQIFRRPNGKSNIDPWENFRKEVKEKVGNIIVSHKSDRKRSGALHKETAYGIYNMAEFLEQEKKQNGQTPIKKVRVVWRKPAAKYESKKDLESIRSPVLREDLLKICEQVGVEGVQSEIQQRGIRAIQCITKASVVPVRRKESGKVYKAYEGRNNWAVEIYEMPKPGSKAHGRYKAGQWKEVMISLFDAAQETYKPGHTFKPHPAARLVMRLHANDYIEIEEAGCRKIMRLHKMTKGDLTFAEHYEANVAKRQEKKKFSFLRTSVPNLKKLNPRQVYVSPSGLVRYQEHKKS

SEQ ID NO: 6338 - protein, 944 aa, unidentified
  REGION 1..944: note = Description of Unknown: Cas Enzyme sequence
ELGRALLHLVQRRGFLSNKKTLLGNEMLDDPDVLAVLEEMREDEPDPEQKAPDKDDKQAKEAADEETAFKKDISALRKEISDQGFATLGEYLHSLPPGTCKRNRTHAGGHLRTDRKMYREELDKIWEQQEKHHSVLNDRVRENIERIIFHQRPLKFKADRIGKCSLEKNHTRCRMGRLEYQKFRYMQDINHLSWREPATEDYRKPNAEERQQLWELFETDPSPSFAKIRKKLKLDRKTEFQQISDVKKFKGNRTACAIREALPQWDEFPEEKQYALVEDLITIRKKTALKKRLMNHWQLDGKTAVRLCMLELEDDHGNHCSKAIKKLLPYLQEGMVYSDARIEAGYGYETKEEQMQRQVADRLGPPPEIPNPIVQKGLHELRRVVNAIIAEHGKPDIIRIEMARDLQMNTKRYQAFLKQQKENTAANDKAEEEYETVRSRNPNMSGLSKKLGRKEKFKYRLWKDQNHLCAYSARPISATDVFTDETEIDHILPFSQSLDDSYMNQVICYVGENRIKGNRTPRDAFSGEKWDRISQALAKWDKKLQSKRNRFYKTEADLQERDFIGNQLTDTRYISREAGQYLQSLGAQIDFSRGAMTAWLRRLWGLNTILPRRDDAETGKKGREDHRHHAIDAVVTACVDRGFYQRLVKNAEALEQEQKRNILDLHTSSSGMDHPWATFRDEVNTRVNEMIVSHAPQTKISGALHEETGAGFIEGIGTVYRKTLGQGFGLTQVKKIIDPAVKEQVRRHLAKYGDKSKEAFAEGVTVYHKDGKTPIHRVRMTQQTQVKELEKLKKTNFGIHDQQGKPFRWMTYGNLHHMEIIQDRQKGSYKGIPVTTLEVARRARGINGAKAPLIQKDHGEDYEFITALHINDIVRVQRNGKPVLFRIQKINSNGNLTLRLHTAATLDNAEEELTRSVPPLMSQYQMQKVKVNAIGKLLDDQTHG

SEQ ID NO: 6339 - protein, 1286 aa, unidentified
  REGION 1..1286: note = Description of Unknown: Cas Enzyme sequence
MPKQQLISPVAIDLGAKNTGVYFAHYPAGSALDQMDKSGKVYQLDSTGYTYLMANRTAARHQRRGYDRRQMAKRLFKLVWCKHFNLDWNERVQQAIGFLLNRRGFSFLAEEYEADVLAKFPREAFDELPDNLKIQPSDNGDCDFAAALTKWVNAGEAKVKSMYESINEEPKRVRARLVAISQTEKLREYCLLRKAGNQIPQEKKATLSRLSKWVLEEWASDGVQGLPVIPAENTVDLVEYLNSHSAATAEAILRSLPSEEDLAQEKSELKKSNWQFETAKFQLDKADFGQSENPDVKTHLHHLAFALHKVHNELESGGRHRSKYFEEVQNVLEQKNHAPDYLKGFCADLQSGRLDGLTVDGLSNLIGHISNLELKPLRKYFNDPKHKGGDYWDESRITRLFERWMLREWRVGGKDKDKADGGKWSYLELKNRWNARGGSIVDFWLETPPEYTIPPYQDNNNRRPPRCQSLLLNVDFLNRKYANWREWLGALKGVASVRKHLGDYEEQLKELQSGKGLRYFSDQQTGELRTESGRRSMAELDARVLQFIFDRVKAEDRLNLNEIYSQAKKIRQDRHKRDDKSVKAVKQAKEKLAAAIEGSALPQGLTVAPDYGRDDLFPAGGFLHLVCKYYKLRQRARDGLIFIHPEYRRAKENGYKNTGRFDGKELLTYCNHKPRQKRYQMLGDLAGVLQVSPHHLEQLAGEHAGETTDDKLSNWLCSVTGLRANCERAAKEQKERRGRLKMDIRTVFGLIHYRKQAESPSKEEVKSILKSSKVTDAQKLYDFCERAKRVCFALTESLYDASKRQAWQSELDKNPATAVYLLAQISNIAFQERTGNANTCAVCSTDNAHRMQMVSAADGEDAVARAQRLPAIPTRLIDGAVMRMARIVGGAIARDKWETIAAELAADKHVCVPIITESNQFEFEPSKDELVRNQRTKPRKGKPLERGGELTIAASKDERIRAAGKGVCPYTGEGIPEKTGDKDHIIPRSSRWGTLNDEANLIWASDRGNKEVKKDREFSLADLAGKERLLSFDYFGVEAKPNSAGDSIYDLRKLHEEFDGQIAQYAKSGDSKQQAYSHLIDAQLAFVIVADAHRGEGGLKLQIDDALGKAPYNAETGEIDDGILGAVRVSDDDFELKSLSRRKAYEVETHHRELLDGGNKRAVHISYRIHRSNLIAEKFMPLIRLETGEVRMGFSAKNSVEYKSDDFEAIKGFLCASKSNQSVWLVNRKDALNFLMDAGRNGLDKAGQKLAKLLDGLVYQTIKKPVSSVLTLGAKEPQTVSDALEN

SEQ ID NO: 6340 - protein, 1653 aa, unidentified
  REGION 1..1653: note = Description of Unknown: Cas Enzyme sequence
MPKQQLISPIAIDLGAKNTGVYFAHYPAGSSLDRVNPEGKVYQLDSAGYTYLMANRTAARHQRRGYDRRQMAKRLFKLIWCEHFNLAWNERVQKTIGFLLNRRGFSFLAEEYEADALAQFPRDAVDELPGSLKIQQNVDGDYDFADALTEWVNAGEAKVESMYESINKEPKRVRARLFTISQTEKLREYCSLRKAGNQIPKEKRAAFSRLSRWVLDEWVKDGVQGLSAIPEGNTVDLVAYLNGRSAATSEEILRSLPSEKDLAQEKSELKQSHWKFETEKFQLDKADFGDSENPDVKTHLHHLAFALHKVHNELKSGGRHRSKYFEEVRNVLEKKDHAHDYLKGFCADMQSGRFNGLTIDGLSNLIGHISNLELKPLRKYFNDERHKGGDYWDESRITRLVERWMLREWRVGEKDKAKADGGKWPYSALKSRWNERGGTIVDFWLETRPEYTIPPYQDNNNRRPPRCQSLLLNVDFLNRKYANWREWLGELKGIESVRKHLRDYEEQLEFLKSGKGARYFSDERAGKPCADSGRRSMAELDARVLQFIFDRVKAEDLLNLNEIYSHAKKIRQDRHKRDDESIAAVKQAKENLAAAIEGSALPQGLTVAPDYGRDDVFPAGGFLHLVCKYYKLRQRARDGRIFIHPEYRHTKESGYKSTGRFDDKDHLLTYCNHKPRQKRYQMLGDLAGVLQVSPHNLERVAGESDGETTDERLFNWLRGVKGLRTNCERAAKEQKERRGRLKMDIRTVFGLIHHRKQTESPPAKDVNQILKSSRVSDAQKLYRFCEQAKQVCFALTEPLYDASKRQAWRNELDRNPATAVYLLAQINNIAFKERTGNANTCAVCSTDNAHRMQMVAAADGKDTVARAQRLPAIPTRLIDGAVMRMARIVGGAIARDKWEKIAPELAADKHVCVPIITESNQFEFEPSKDELVRGQRTKPRKGKPLERGGELTIAASKDERIRAAGKGVCPYTGEGVPEGGGDKDHIIPRASRWGTLNDEANLIWASERGNKEVKKDREFSLANLAGGYKSAVFGGKSDDQIARWIVEQIVDDSGEDFAFGKYRSFINLEPEQQTAFRHALFLKGHPLRDKVINAIDNKNRAFVNGTQRYFAEVLANALHKLAKSAGKERLLSFDYFGVEAKPNSAGDSIYDLRKLHEQYDGQIAQYAKSGDSKQQAYSHLIDAQLAFVIVADAHRGEGGLKLRMDDGVGKAPYSAKTGEVNGGILAAVQVSDDDFELKSLSRRKVYEVETHHRELLSGGNKKAVHISYRIHRSNLIAEKFMPLIRLEDGEVRKGFSAKNSVEYKSGDFEAIKGFLYAGKSNQSVWLVNRKDALNFLMDAGRHGSDKAGQKIAKLLDGLVYQTIKKPVSSVLTLGAKEPQTVSDALENWDKCIAEAKFKKGGVVLPVFGEWSKLKAELEKADPEQPLQAFLRSSAMFSDQHGGSIRSHNKRRKVYSLPVIATIGIIRLQRRAWSGQNIIQTAAEESIARYGLDSKQRPHTVLSKNSIPVKHYSGIPERLRPAPSEWKEIPEESIAKHNGDGAVRILSGKVKYRDANRCRVRINVDDIRQLSLPQDKMNWKGKLFRHERVATLEERVENEKGDNHHCLSSEWRWFSAPFKLPENRNEVTVKSIGGVYVVEFTVQKTAEIKRWLLS

SEQ ID NO: 6341 - protein, 1070 aa, unidentified
  REGION 1..1070: note = Description of Unknown: Cas Enzyme sequence
MGENYRLGLDLGTNSIGWALLRLDGEGEPCGLLDLGAHIFSNGRTPEKGLPLAAGRRIARGMRRRRDRYLQRRRLLQALLLGYGLLPISRDERKDLGRQDPYTLRARALDGPLEPYELGRTLFHMNQRRGFHMNQRRGFKSNRLSGEEDEKERGEIAKRIGKLREEIDPGTPGRRTLGEWLHRRHARGKPVRFRPESATFYPTREMYEEEFDAIRKMQEQNQTLTPSQWEALRTIIIRQRPLKPVEVGRCTLDPSEPRAHKALPLAQEFRIYQEVNNLRIFEPGHRKERPLRKDERETLIEVLLGGRDVEFAKLSKMIGIDDRSRINLASEKRKKLNGDETAKKLRKKDLFGNRWNQLPGEFQNEIVKTLLNEQYNNKLVSTAQREWGLDKETAQKLSHARLPQGTVHLGDTALRLVTPELARGLRYDEAVRLHYPHHSDLSGDGQSSELPYYGEALPRYMMPVRKGDGSPEEQDHGRIGNPTVHIGLNRLRKLVNEIIKCYGKPASISIELARELKNPPEIRRMIEKQQAERQEKNEQIKSDILGAKADDTPANVRKIRLWNEQKIGCKNLCPFCGDPIPFRQALSNDTEIEHLLPFRRTADDSPANMVIAHIKCNRRKGDRSPFEAFGSESSGKYEYSGILNRARGLPGNKAWRFDENAMERYEQGRGFLDRHLNDTRYLSRIAQEYLTTICPKGKVDVVTGQLTFMLRGKWGLSPNNLLRDGESTDGRGKDRTDHRHHAIDALVIALTSRSLVQRVAKLAGRNRKARGTGIDHLLSGLPRPWDGFSHEEVRKRLANVVVSHRAEHGLAGQLHNEKAYGTIGDRTEEGEGLFSNDKYQIVTTESLEFTKRAPSKVLDAVRDARLQEALKELWAFIEKTESGTPAAKWKEFTKRAASPGELGKFDFSGAKHGVRRVRVTENLTVHPLPRKGRYKAVKPDSNAFMDVFEMPNGKWQAVTVTRLAANAPDFKKRHNELRPHPAARRIARLFAGDMVAITENGDRQIYRIQILSGQRMWLSPHNEANTDHRNRDRDDPFKLTQKSVNALRRLGFRKIHVDILGRVRDPGPRS

SEQ ID NO: 6342 - protein, 1158 aa, unidentified
  REGION 1..1158: note = Description of Unknown: Cas Enzyme sequence
MKKYRFGLDVGTNSLGWSVLELDEGGSPRAIAAAGSRIFAEGRDSKSKATLAATRREKRSARRRRDRFKQRRNFLLHELTKAGLFPESKEERGDLQGLNPLALRARALIEPLKPHEVGRALFHINQRRGFKSNRKDRSEETIRGTVSSSARLLLQQMGLIEQELSSEEYKKLSREGKKHARQAEKDARIAALRKLAEQDDLTYGSFLHRRHRKRKPTRARPGAAGAGKLYDVYPTRELYEDEFKKIWRAQSPHHPKLMTEEVRERVRQAIFSQRPLKPQQRGKCTYLPREDRTFRAMPSFQRYRIFQEVNNLEWWDGYQKKRVRDYPDARNAIARLLERETTKNGQVTFGKIKGVLKKLNYAEGDFRLNLETRKRKGLDGNLTSNLMQHEDRLGEQWHDWPLEKQDELIDILLNGTPEQQERDRKRLDKAGNSPPADGAADDRDVRNCIQERFGLSGRVADNCLNAPLKDDTAHISLKAARLILVKMDDGLVDQKTGELTLPLQNEAAAAVAREVGEFIDPFRSKGDDGKYQQLDRLPYYGKAFRDGRHIIPGTGKKEDDEKTRWGGVTNPTVHIALNQIRLVVNELIGRYGHPHSIAIELGRELPAGAQKRGEIEREQKENQDRNQGFTKKLMELGQKPNGDNRLRLFLWEELSEDPNGRCCPFSGDKIGIADLFNGNTEIEHLIPFSDSLDDSRANKVICTRRANRDKGNRTPYEAFGDSPNDYDWGGIAARAEQLPASKQWRFQKDARDIWQQGEDADFTSRHLNDTRYIGRLAREYLENICPIDRIDVVTGRLTGLLRWHWGLNSVLQDGGESAGRKNRDDHRHHAVDAIVIGMTSRSLLQKVATEARKLEEAQQDGAQPAGRLLLSVNGRKSAIDPWDEFRADVMETVQNIVVSHKARRKKREPGSTTDGQLHNDTAYGIIEKTDKGSLHEVVTRKPVSYFTNLERIGRIRDARLRKEFRHAFETAAVGGKAKAIQDWANRRGIRGLRYTEPLSVIPIKDARGKTYKAYKGDSNWGIEVYEFPPGDSKAGKWEGVVISRFEANQHDFKPGQTCRPHPAAKLVMRLQINDCVEMENNGARKLYRLQLISQRGAMFFAELHEANVDSRNRSKEDNFKYLSVSPNPLKKRNARKVHISPAGQVSHEQRRPPRRRSG

SEQ ID NO: 6343 - protein, 1301 aa, unidentified
  REGION 1..1301: note = Description of Unknown: Cas Enzyme sequence
MPKQQLISPIAIDLGAKNTGVYFAHYPAGSALDQMDKSGKVYQLDSTGYTYLMANRTAARHQRRGYDRRQMAKRLFKLVWCKHFNLAWNERVQQTIGFLLNRRGFSFLAEEYEADALAQFPREAVDELPGSLKIQQNVDGDYDFAGALTEWVNAGEAKVESMYESINKEPKRVRARLFTISQTEKLREYCSLRKAGNQIPKEKRAAFSRLSRWVLDEWVKDGVQGLSAIPEGNTVDLVAYLNDRSAATSEEILRSLPSEKDLAQEKSELKQSHWQFETEKFQLDKADFGDSENPDVKTHLHHLAFALHKVHNELESGGRHRSKYFEEVQNVLEQKNHAPDYLKGFCADLQSGRLDGLTVDGLSNLIGHISNLELKPLRKYFNDERHKGGDYWDESRITRLVERWMLREWRVGGKDKDKADGGKWSYLELKNRWNARGGSIVDFWLETPPEYTIPPYQDNNNRRPPRCQSLLLNVDFLNRKYANWREWLGALKGVASVRKHLGDYEEQLKELQSGKGLRYFSDQQTGELRTESGRRSMAELDARVLQFIFDRVKAEDRLNLNEIYSQAKKIRQDRHKRDDKSVKAVKQAKEKLAAAIEGSALPQGLTVAPDYGRGDLFPAGGFLHLVCKYYKLRQRARDGRIFIHPEYRRAKENGYKNTGRFDGKELLTYCNHKPRQKRYQMLGDLAGVLQVSPHHLEQLASEHAGETTDDKLSNWLCSVTGLRANCERAAKEQKERRGRLKMDIRTVFGLIHYRKQAESPPAKEVKAILKSSKVTDAQKLYDFCERAKRVCFALTESLYDASKRQAWQSELDKNPATAVYLLAQISNIAFQERTGNANTCAVCSTDNAHRMQMVSAADGEYAVARAQRLPAIPTRLIDGAVMRMARIVGGAIARDKWETIAAELAADKHVCVPIITESNQFEFEPSKDELVRNQRTKPRKGKPLERGGELTIAASKDERIRAAGKGVCPYTGEGIPEKTGDKDHIIPRSSRWGTLNDEANLIWASDRGNKEVKKDREFSLADLDGKYKNAVFGGKSDDQITRWIVEQIGDGAGEDFAFGKYRSFINLEPEQQTAFRHALFLKGHPLRDKVINAIDNKNRAFVNGTQRHFAEVLANALHKLAKSAGKERLLSFDYFGVEAKPNSAGDSIYDLRKLHEQYDGQIAQYAKSGDSKQQAYSHLIDAQLAFVIVADAHRGEGGLKLRMGDGVGKAPYSAKTGEVNGGILAAVQVSDDDFELKSLSRRKAYEVETHHRELLSGGNKKAVHISYRIHRSNLIAEKFMPLIRLEDGEVRKGVSAKNSVE

SEQ ID NO: 6344 - protein, 1199 aa, unidentified
  REGION 1..1199: note = Description of Unknown: Cas Enzyme sequence
MNRSAPSTPIASKLTQSAQNSAIMHAGTEREAGERMNRRKYRWGFDVGTNSLGWSVLGLDEKGEPCEIVAAGSRIFAEGRDAKTKATLAATRRQARSARRRRDRFKQRQRFLLSTLTQAGLFPESEADRKNLQEQDPLRLRAKALTQRLEPWKVGRALFHINQRRGFKSNRKDQSEEGKSGGKVSKSARLLLEQMGLIDPEISSEEYKKLSSDGKRQVRQQEATARIEALKKLEEEKELSYGSFLYQRQNEGKPTRARPESAGDKGELYDIYPTRELYEDEFSKIWQAQERHHPGLMTEAVKERVRRAIFHQRPLKPQKRGKCTYMPEEDRAFRAMPSLQRYRIYQEVNSLEWSDESGEKKLLRDFPPARNAIVNLLEKPSAKEGRVTFGTMKKEIKKLNIAEGNFKFNFETEKRKGLDGNLASKLMQGEDRIGKEWHNWPLEKQDELIDIILNGTPAQQQRDREWLEGGGKSPQGTGALDDEEVCGYLMQHFELDRTVAESCLNASLEDGTANISLRAAKFMLEKMQGGIVDCETGELSLPLQNEAASAVAQEVAKFIDPMRARGDDGGYKTLDKLPYYGEAFRDGRHIIPGTGCQEDDDKTRWGGVTNPTVHIALNQIRLVVNELIERFGHPQSIAIELGREFPLGAEKRREIEKEQSANQKKNEELDNTLRKYKQKENAGNRLKLFLWQQLDEGPTGRCCPFSGDSIGICDLFSGNIEVEHLIPFSRSLDDSRANKVVCTRQANREKGNQTPHEAFGHSPDGYDWQQIFARAESLPDSKRWRFKPEAMEIWNREEGGDFTSRHLNDTRYIGRLAREYLENICDIDRIDVVTGRLTSLLRRHWGLNSVLDDRTDRKNRDDHRHHAVDAIVVAMTNRSLLQKMAKKARELEKIDQDPARNLDRYFPPVDGKKSAIDPWESFRSDVADVVERMVVSHKRCRKELRGESTDGQLHNDTAYGIVRELKGDKYEVVSRKPVNKFKNLKTIESIRDARLREKFMSAFEIAEENEEGAGEKAVKKLGEYLKIKRLRCMETLSVIPISGQDSENPYKAYKGDSNWGVEIYSLPSGHKNAGDWKAVTISRFDANKKDFKPGETFRPHPAARLIMRLQINDCVEMLDPKTREERKLYRLQLASSSMIFAEIHEANVDKRNRDRDEKFKYTRVRASSMQSRRARKIHISPTGRISYEQRRSGRRRQQE

SEQ ID NO: 6345 - protein, 1058 aa, unidentified
  REGION 1..1058: note = Description of Unknown: Cas Enzyme sequence
MAYRLGIDMGTNSIGWAVLELENGTVSGLVDAGVRIFSDGRNPKDGASLAAQRRQPRSARRNRDRKLVRKRQLLTALKDYGLLPRDDEQAKSLQHLDPWILRAKGLDAPLTPYELGRALFHLQQRRGFQSNRKTDRGDNEGGAIKEGAARAEQMLLEKGCRTLGELFGKRRLEAQSENAERPEGQRDPQPPARVRPTAKGNKISYDYYPTRALIRVEFEALWQAQAPHHPELLTDKAKEKVADAIFFQRPLKPQVVGKCTLCPDEDRAHKALPSLQRIRIYQDVNHLSYRLPGEKAQTLTLEQRDAVVRKLLSTGKLSFDALRKTVLKLPPGTRFNFEVNRKDLKGDETAANLASKKRWGPDWRNLPLDTQDAVVERLLEDEDEDKLVQDLMSEHGLSEEIARNVCSAPLPITRASLSLKAARTLLPALKSGVISYDKAVNDAFGQSHSQLDHHGEILDRLPYYGKVLHRHTVGGSGRAHDRPEVRFGKLANPTVHVALNQLRRVVNDLTDRFGSPEEIVVELARDLPLSAKGKSELKKQQGDNEKANDKRRELLKELGQDDTYANRLRVRLWEELNPDDPLERRCPFSGEQISKARLFSDAFEIEHILPKSRTLDDSPANKTLSARAANRYKREHSPYEAFGQNREGYDWEDIVQRGAILPPNNAWRFGPDAMDRFENEETDFADRQLVSTQYIARLAASYLVWLVGDPVKVWPIPGRMTSDLRHHWGLNTLLSKPGKAAKNRDDHRHHAIDAIVVGLTDRSLMQALARDAGREREEGDARLIERIAEPWPDFRSTVGEQIGKIIVSHKPDHGIQGSLHNDTAYGLASEADKDGRHDVVRRVPLESLKTFDKLDLVRDDTIRQHLKDATEGLSGTSFTNALIKAGETMTPPVRRIRILERMKVIPISHGRLHPFKAYKGDGNYCYDVWMGPKNKWTGEVISRFDAHQPGFDPQSSFSRSGGRLLMRLRVGDMIEIGNKYGQQEIMRVQKMTAPSGGAPTLTLAEHNEANVDARNRDKGDLFTYRNCTPSALQKHRAVQLRISPSGRVYRDRRYGLTS

SEQ ID NO: 6346 - protein, 1164 aa, unidentified
  REGION 1..1164: note = Description of Unknown: Cas Enzyme sequence
MKIGWGIDVGVGSLGFAVIELDAENRPAGLIDGISLVSPAPTGGAERTRYKSMRTQNERRADRMKALRSELARIFGLEPGFDSEHAHPDLRDGASKKDGKPRRNTSRIRLRAHGLSHGLSAGDLARAILHIAKNRGQRLTRGLKDNPKADAKEREKERQSMADTAKNTERRLKELGERLGLDGPAHPSQLSMHEAGETGTTRLKKDREGMPVFTRAMVQAELDALLEVQKQYHEAALPDSVCESLKETVFGQAEPKAPPIGKCRYDPSETRLPRGSDLFQQKRIYEEVNNLRLISPRTAAERPLDLPQRDCLASLLLDGHDLSAAGVRKTLKLGNGALADRTSLDISGGRKGRKTAGKLQGHPLAAAMRKAGALEHWQTLDETEREKIAGLVRTEDDEEVLRADLKALGLPPEAIEALSSARLPAAYSAAGETATRKLLRELQAAVVPHHEAEKRAGLDSLDPESRRLDRLPYYGEVLPGWCVGGDGGSTGSDEARLGRIPNPVVHVALNRIRKTANAYLRLYGKPERICVELARDLNKSAEARDEIKQENDRNRAANEKYIETLGAHTRKIKPKDLRRMKLHEMQGGECLYTGQPISMEQLFDDSSIEIDHILPIADTNETRPSNLALVFAEANQFKRKRPPFEAFGSGYKGQDYEHILKRAAKRGRSVLWRFREDAMERFKDREEFQSRFLNDTRYIARMAKHYLACVCNDPNGVVSLNGQITSALRREWGLHTLIRDIMVAEGRLDDADAKPPDEGETLEEIQARRKRMDKIRLDHRHHLLDAIVAACTTRSDVQRLQTLAAQDTHGESAGEILARIRRASSDFENPGICWQPDRFPAIVRAFLEGRKHGGAAGAPPVTSVVVKADHDPRGQLHEATNYGLICEAPGKPGQYVARDHVAISGLTAEQIEGLCVPETAIQAVEKAMKSGAPVWWGGNDPVSALRHNLARDLAALSERLLKLMDETPQEALAKARTERGRKKARANWATSRYIEETGRRRFTRVQILSLRVLRGPLRPGQKPRQANPQGGNDRLIYYIDGKEDRKIEVVSTLDANRPGFRECWRREGGRLLFVLRKNDLVEMTVDPKDQASPRRIYRTASFSDAAGLDLKFLPVEEARSFMEAPNNVKTRARIRNVRAFRERRPVMVLCDPTGRLRWRGPRLN

SEQ ID NO: 6347 - protein, 1415 aa, unidentified
  REGION 1..1415: note = Description of Unknown: Cas Enzyme sequence
MSKTILGLDLGTSSIGWALIKEANLENEISSIEKIGVRVNPLTADEQTNFEKGKPITTNANRTLGRSARRNLQRYKLRRSELIEILKENRWIDDESILCEISNHSTFETYRLRAQSCVSKISLVEFARVLLMINKKRGYRSSRKVNNTEEGQLIDGMAIAKQLYNDNLTPGQFVYNLLKEGKRKVPDFYRSDLYNELEIIWDFQKVFYEEIMTDTLYESISNKGKVQTWASLKTPFELVGIKRDKKRDELRLENYRWRTQALTEKLSLEQLAIVLQEVNGQLYNSSGYLGAISDRSKELYFNQETVGQYLYKKLQDNTHFRLKNQVFYRQDYLDEFEKLWEVQSQFHKELTPLLKTKIRDVIIFYQRKLKSQKGLISFCEFEQREVTIDGKTTTIGSRVAHRSSLLFQEFKIWQQLHNVRLRNKNTKEIVELSEEAKEVLFDELNVKGKLSAAKVLKLLDNGRSYELNYTELDGNTTNAALYEKFLEIIDIEGYDVRDELRIKLNKDDISIVDLDISALDIKEMIIRIFKILNIDTTILIFDGELENKAFENQQSYQLWHLLHSYEEDDSTTGMDTLYRLLHEKFNFSIEQSKILGSVVLSRDYGSLSSKAIRNIFPFIKSNEYSKACALAGYRHSKESLTTEEISSRVIKDRLTVLPKNSLRNPVVEKIINQMVNVINTLIDTENDKLEKVGLPRSFKFDEIRVELARDLKKNAKERAELTKQINTGKSVHEAIVKILQREDGVENPTRNDIIRYKLYQELKNNGYKNLYTQEYVERKDLFSNKYDIDHIIPQSRLFDDSFSNKTLCPREINIKKGSKTAYDFILDAYGQDKANLFETRIKNLGELKEEGISKAKCQKLLMRGKDIGEGFIQRDLRDSQYIAKKAKAMLLEITPVVVTTSGAITDRLRNDWGLVNVMKELNLPKYRAMDRTQIMEIKGAKKEIILDWTKRNDHRHHAMDALTIAFTKRSFIQYLNNLNARKEENQTISNTNRRNSLEINDLKISTKEVLGIQQKETIKIKDEQGHSKRVFKEPIPHFRHVAKELLDQVLVSHKAKNKVVTKNKNRVNGSGKMQETLTPRGQLHKETVYGKIKQYISKAEKISSKFDEKTIEKVSNPHYRALLLERLNAFGNNPKLAFSGKNTLIKNPIYIDSSEQETIPEKVKLIWLEDNYTIRKDVGPDLKIDKVIDQGVKRILQSRLDEYGGDVKKAFSNLDQDPIWLNKEKGIAIKRVKISGVNNVEVLHTKKDHLGKIILDTDNNPIPVDFVSTGNNHHVAIYANEKGNLEERVVSFFEAVTRVNEGLPIIDKVFNQHLGWKFMFTMKQNEMFLFPAEDFNPREVDLFNRANYKVISKHLFRVQKFTIRDYFFRHHLETNVEDLTTTKGITWRREGLAGIKDILKVRTNHLGEIIQINEY

SEQ ID NO: 6348 - protein, 469 aa, unidentified
  REGION 1..469: note = Description of Unknown: Cas Enzyme sequence
  MOD_RES 397..465: note = Any amino acid
LHRVLNILGFLPKHYAKEIDFTKRLGKFINHAEPKLSFYKEFLFKDSFNEMLKDFQQKQPDFLINKHGEEALVPYDWAIYYLRKKALTQKIEKEELAWIILNFNQKRGYYQLRGEEEEENPNKLVEFYSLRIIDVVADDEVNKKGEVWYSLHLENGWIYRRSSKISLVDWKDKVRDFIVTTDVNDDGSEKLDKDGVVKRSFRAPSADDWTLLKKKTEQDIDNSNKTVGTYIYENLLLNPKQKIKGKLVRTIERKFYKEELKLILEKQKEFHEELQNEQLLQDCVRELYKYNEQHQQILESKDFVHLFLNDIIFYQRPLRSQKSLISNCTLEKRVSRDGIVFPIKVISKSNPYYQEFRLLQWLQNLAIYKTDDDVNVTSDYISSVEDKEALLRFLNTXXXXXXXXXXXXXXXXXXXXXXXXXXXXXXXXXXXXXXXXXXXXXXXXXXXXXXXXXXXXXXXXXXXXXKNML

SEQ ID NO: 6349 - protein, 958 aa, unidentified
  REGION 1..958: note = Description of Unknown: Cas Enzyme sequence
LKQKNEGKKLAKGETDKYRWNYVQDKKYPMNETRYLIQDKLKKVENVPTDFLSFDNEMALWHIIYSVNDKIEYEKALAKFASKHNLDETSFVESFKKFPPFKSDYGSFSEKAIKKLLPLMRFGSVWNKNNIVSSVLDRIDKILTGEYDEKIKNRVREKAEQFQLNQIEDFQNLPLWLVQYVVYDRHSEAEIAGKWNSVKDLENYLKEFKQHSLRNPIVEQVITETLRVVKDIWQQYGNGVQNFFDEIHIELGREMKNTADERKRITNSVTENENTNLRIKALLVELKEDTNIENVRPHSPMQQEILKIYEEGVLNAVENIEEDILKISKTAQPSKSELIRYKLWLEQKYQSPYTGEMIPLNRLFTSDYEIEHVIPQSRYFDDSMSNKVICEAAVNKRKDNQLGLEFIKNHHSEKIELGNGKTAQVLEVEAYESFVKKNYDKNRGKRNKLLLEDVPEKMIERQLNDTRYISKFITHLLSSIVRKDEANSKDDGINSKNIIPGNGKITTQLKQDWGLNDIWNELILPRFERMNTLTNSTDFTSTNTNGKTIPTVPLEYSKGFSKKRIDHRHHALDALVIALATRDHVNLLNNESALPKKGRTKDEQKSFRFDLQVNLRNKEKYFNVKEGREKEKFTTFKKPWDTLTQDTRDALENVVVSFKQNLRVINKATNYYESYTDENGNLCLDKNGNPKKELISQKGTNWAIRKSLHKETVSGQIYLDRVKVAKGKIVTATRKYLDSSFNEKSIESITDTGIQKILKNYLKAKDNKPEVAFSSEGIEELNKNISVYNDGKNHQPIIKVRVFEQGSKFPVGETGNKTVKFVEAAKGTNLFFGIYQDKTGKRSYDTIPLNLVIERQKQGLSPVPETNEKGHQLLFHLSPNDLVYVPNIDDNEQLDSSRIYKVVSFTGSQMFCIPSIVSISIVNKMEFSSLNKMERAIDNTMIKDVCIKLKVDRLGNNF

SEQ ID NO: 6350 - protein, 1403 aa, unidentified
  REGION 1..1403: note = Description of Unknown: Cas Enzyme sequence
MSKLIISPIAIDLGAKNTGVYFAHYPAGSSLDEIEKDGKVYQLEKDSYTLLMANRTAARHQRRGYDRRQMAKRLFKLIWCKHFGLEWGKDVQQAVGFLLNRRGFSFLTEEYDADVLRQFPKEAFDELPDNLKIQQNDSGYYDFAGALTEWGNEGEAKVKSLYESLNKEPKRVRARLLFISRTDKLREYCLRRKEGNKIPKEKQANLSRLSRWILEEWIKEGVHGLPGIPAENTVDLVEYLNNKSATTSEEILHSLPSERSLKQKKSELKKSNWEFEPEKFQMGKANFGEPENPDVKAHLYHLAFAIHKIHDELRSGGLHRSKYFEEVKKVLKKKDHTHDYLKKFCRDLQSGRFHGLTVDGLSNLIGHHRLGHRRVARRDLTVDGLSNLIGHISNLELKPLSKYFDDKRHRKGDYWDESRFTRLFDRWILREWRVGEKDKDKADGGKWPYPELKGHWNRRDRSIVDFWLETPPGYTIPPYQDNNNRRPPRCQSLLLNVNFLNHKYGGWREWLVELKGVESVRDYLGDYEGQLKEPKSGKGNCYFSDERAGKLRADSGRRSMAELDARVLQFIFDRVKAEDRLNLNEIYSHSKKIKQDMHKQDDQSVKAVDQAKRELDESIRNSGLPQELKIAPDYGRDDLFPESSFFHLICKYYKLRQRARDGRIFIHPEYRYTKESGYKNTGRFNDKEHLLTYCNHKPRQKRYQMLGDLAGVLQVSPHDMEQVAGKHAGETMDDRLFNWLCDVNGLRANCARAAKEQKERRGRLKLDIQTVFGLIGHRKKTESPSIKEVKEILKSSTINEAQALYDFCERAKHVCSTLTESLYNDSRQQEWQQELDKNPATAVYLLAQISNIAFKERSGNANTCAVCSMDNAHRMQMASANEGENTTAKAQRLPAIPTRLIDGAVMRMARIVGGAIARDKWEKIAAELAADKHVCVPIITESNQFEFEPSKDELVRSQRTKPRKGKPLERGGELTIAASKDERIRAAGKGVCPYTGEGMTESGGDKDHIIPRSSKRYGTLNDEANLIWASDRGNKEIKKDREFSLADLDGGYKSDVFGGKSDDQIMRWIVEQIGDGSSEDFAFGKYRSFINLEPEQQTAFRHALFLKGHPLRERVINAIDNKNRAFVNGTQRYFAEVLANQLYQLAKSEGRERLLSFDYFGVEAKPNSAGDSIYDLRKLHEEYDGQIAGYAKSGDSKQQAYSHLIDAQLAFVIVADAHRGEGGMKLQIDDGVGKEPYSEETGEIGGGLLEAIRVSDDDFQLEPLSRRKAYEVETHHRELLNSGNKKAVHISYRIHRDNLIAEKFMPLIRLESGEFRKGFSAKNSVEYKSNDFEVIKGFLHASEANQNVWLVKRKEALDFLMDAGRNGLDNNGQKIAKLLDGLIYQTIKKPVSVVLTAKLQEND

SEQ ID NO: 6351 - protein, 975 aa, unidentified
  REGION 1..975: note = Description of Unknown: Cas Enzyme sequence
MRLGLDLGTNSIGWWLYKTEDGEITDVIDGGVRIFSDGRDPKSKASLAVNRRAARAQRRRRDRFLRRKAALMKRMAEVGLMPANPGEAKALETLDPYQLRAEGLDRELPLPHLGRALFHLNQRRGFKSNRKTDRGDNESGKIKDATARLDQAMMAQGARTYGEFLHKRRATAPDPKRVPTVRTRLSVARRDTAEKEEAGYDFYPDRRHLSEEFERLWTAQAAYHDALTDDLRDEISTIIFYQRPLKAPKVGLCLFTDEERIPAAHPLNQRRILVETVSALRISARGESSRGLTREERDQIVHALDNKKHTKTLAGMTMKLTALGKIIKLRPDQSFTLETANRDDIKCDPVRASLSDPRRFGPTWSTLGADAQWEVVRRIRAIQSETEHDALVSWLMTSHGLDRDHAEDTAHAPLPEGYGRLGLTATTRILAALEADVIPYSEAVARCGWHHSDGRTGEVLEALPYYGKILTRHVIPGSYDDNDDEITRYGRITNPTVHIGLNQLRRLVNLIICVYGKPDEIVVELARDLKLSPDRKREEQRKIRENTDAAIKRGDKLDELGVPNTGANRMILRLWEALGTDVMTRKCPYSGQQISAAMLFDGSCDVDHILPYSRTLDDSFANKTLCLKEFNRQKANKTPWEAWGGTDQWAAIAANLKNLPGNTAWRFAPDAMELFEGENDFQARALKDTQYLSRIALAYLSALYDGSDGKSHVWVVPGRLTEMLRRHWRLNTLLSDGKAAVKIKNRTDHRHHAIDAAVVAATDRALIKRISDMAGRDELAGAEEVAKSVAPPWDTFRKDLAARLDRAAGGLVELSGLADHEMAAVRGRELGYVSQFLRAQPRRTPFDIVVRAAISRGMDRSTAEAAAADALERLRLDRELWDVHASVLSGGERQRVNLAAGTVSPPRVLLLDEPVSALDPANRDAALALIGDLTDHGVAVLSVFHDMDAIARLASRVVVLRDGHLEREGTPDDVP

SEQ ID NO: 6352 - protein, 1223 aa, unidentified
  REGION 1..1223: note = Description of Unknown: Cas Enzyme sequence
MAKLDKYRLGLDVGTNSLGWSVLKLDEKGEPCAIKDAGVRIFADGRDEKSKATLAATRREKRSARRRRDRFLQRQKDLLNALTKAGLFPDEKGGGRKALQKLNPLELRALLLSESAADILEKIKKRKDKAGKAASAADLKPEYLIGRALFHINQRRGFKSSRKDRSEETVSGKVSNSARKLLEDMQLIAPPMLVEEYKALSKEDKKQQRQKEAEDRIEALGKLKEQKELSFGKFLYERQKNKKQTRARSSADGKLYDVYPTREIYEDEFDKIWAAQTKHFSNVMGDEVRETIRDEIIFHQRKLKPQERGLCAYMNKEKRAFRAMPSFQHYRIYQEVNNLEWRTSDGPHCLRDNRAARDPIIDLMEKPTNKRGNITFGTMKKTLKNMKLAEGTFQFNFETPKRTGFDGNLTSNVMQHEDYIGPDWHKWALDKQDAFIDIILDDELDDEEVKAHLIKTYGLSETVADNCMNASLQDGVANISLKAAQLMLAKMRDGVEDENGETYLPLQSEAAEIVAEEVAEFVNPMRRPKTEEDKFEPEASLPYYGEWFQNGSHIIPGKRKPEDKHDDRKYFGGITNPTVHIALNQIRQTVNELIRRHKLFSDENPTSIAIELGRNLPEGADGRREIEREQKENQDRNEKLDKELNERGQETNRENRLRLRLWEECEGFCPYSGDKIGKAELFNVTTQIDHIIPWSKSLDDSYANKVICTQQANQDKKQRTPYEAFHNHPNYNWDDLFERVKILPKSKQWRFQENALKLWDGDNEEIEKAAQKMTEHKDANVQKIGKQILELGVSSLNDEQKKIAAEHGIVDADFSQRHLNDTRYIGRLTREYLESICHIDKIDVITGRLTALLRGHWGLNSILRELENDDKPPKDHNLPEEVQEEKSQKKNRDDHRHHAIDAIVIAMTNKSTLQKVATAANKAEELKIERLFPKDKKGHSAIDPDWIDTSGEKVNFRGAVKEAVKNIIVSHKARRKKLRKGTTDGQLHNETALGLVECLNKEKNEYRTVVRRPIDYFKDLKHVKAIRDDKLRAEFLQAFGENGIKGIEKLAKDKHIRRLRCFGPKQAIPIKDKNGNAYKGYQGDSNWGMEIYAGHKKDIEEWEGVVISRFEANHPKFKPGTTYRPHPAARLVMRLQINDCIEIEDKGKKQYMRLQLMSQSGQLVFAPLHEANVDGRSRKGEFKYLRKNANPLRELKARKIHISPTGQVSYEKRRKPRRKPRRK

SEQ ID NO: 6353 - protein, 1107 aa, unidentified
  REGION 1..1107: note = Description of Unknown: Cas Enzyme sequence
VKYRLGLDIGTASVGLVALELDGDGRPVKPVHRSVRIFDEPLLPGKGGGVGETKKSARRVHRSQRKLHMRRARRLQRIAQLVRPLGLDPKTIPADKGQRVHKLRAQAATVEIPLESLLLVFLKMAKRRGYHGEFRVKKSGETGKDAGMVEAGISKLKAEMKTAGCRTLGEYLLHRIQNGQHLRLKEDGLFAHREMVEEEFDRIWEVQKEHHEALRGEHNGRPLRERFHKAIVLQRPLKSPAHMVGNCSLEPMLPRAPMAQPIVQAFRIEKQLADLRWGGTSRAKHLSPQQTQVIRGLLRVKKEVTFPACYKALEKAGCPAPQGLELNYAHGDRQAMTGDRTAAAMKWLELLDDWSALDAGHQISVINLLADMGSPEAFDDLQWDKKLVGANNTPRKIKPEVKRFIDQMVDSGKFDRLAKMGFDGGRASYSIKALNKLVPVMREEGVDEHYAVAAAYPGDVDDENLHAKRERELSPHRATGNTVIDVVLGQVRREVNAAIKALGAPPAEIIVELSRDMKVGLKKRGEINRNMRKNEKRRREAAAKVEECTRKTATESQIRRYLLWQEQGEKYCPYCERHINLSAALNGSETEYEHILPRSLTRIGKKRDFLVLAHKSCNQEKGNHTPWKAWGHDEARWSVIERRAAQFEKGYKVTVDGDNGKERTFKHRGKARQLLMKDFEDEVLSDDIIGNFTDRQFQETAWIAKASGNWLRSVCADVAFSRGLLTAHLRRNWKLDTVIPEVRYAEGMPVFDEDYRPNANESGQQDCAVSKEDFDEYRAYWEGHRGDGVARTNRRLNKRIDHRHHLVDALVIALTTRGLYQRMARHYKQVTDDGESKLRLYAQPGLKDVRDHALALVRECRPSHRPDRWLGGGFFKDNPSVVVEDGGQKFYAQRKTLVDLALDRGGKVLPADKARKRLDDILPEKTREHIRKEFDARAGQGIDSRQALENILHPHWKTLIRRVLVRGYKADDAVLIKHGDPRRIQIKRKGGDADANPGLHKYLEPDGYAYLEYTPGDSTVEPRLVRLHEAKPASCKTVRLYKNDTVRDSNDGRHYVVYQFSAHNTALYLAPVTEAIADIGKVRGKRRRKISGKQIAKRLTPVQDERA

SEQ ID NO: 6354 - protein, 1151 aa, unidentified
  REGION 1..1151: note = Description of Unknown: Cas Enzyme sequence
MPKQQLISPIAIDLGAKNTGVYFAHYPAGSTFDRINPEGKVYQLDSAGYTYLMANRTAARHQRRGYDRRQMAKRLFKLIWCEHFNLAWNERVQQTIGFLLNRRGFSFLAEEYEADALAQFPREAVDELPGSLKIQQNVDGDYDFAGALTEWVNAGEAKVESMYESINKEPKRVRARLFTISQTEKLREYCSLRKGGSQIPKEKRAALSRLSRWVLDEWVKDGVQGLSAIPEGNTVDLVAYLNDRSAATSDEILRSLPSEKDLAQEKSELKQSHWQFETEKFQLDKADFGDSENPDVKTHLHHLAFALHKVHNELKSGGRHRSKYFEEVRNVLEKKNHAHDYLKGFCADMQSGRFNGLTVDGLSNLIGHISNLELKPLRKYFNDKAHKGGDYWDESRITRLVERWMLREWRVGEKDKAKADGGKWPYSALKSRWNERGGTIVDFWLETRPEYTIPPYQDNNNRRPPRCQSLLLNVDFLNRKYANWREWLGELKGIESVRKHLRDYEEQLEFLKSGKGARYFSDERAGKPCADSGRRSMAELDARVLQFIFDRVKAEDRLNLNEIYSHAKKIRQDRHKRDDEFIAAVKQAKENLAAAIEGSALPQGLTVAPDYGRGDLFPAGGFLHLVCKYYKLRQRARDGRIFIHPEYRHTKESGYKSTGRFDDKDHLLTYCNHKPRQKRHQMLGDLAGVLQVSPHHLEQLAGEHAGETTDDKLSNWLCSVTGLRANCERAAKEQKERRGRLKMDIRTVFGLIHYRKQAESPPAKEVKAILKSSKVTDAQKLYDFCERAKRVCFALTESLYDASKRQAWQSELDKNPATAVYLLAQISNIAFQERTGNANTCAVCSTDNAHRMQMVSAADGEDAVARAQRLPAIPTRLIDGAVMRMARIVGGAIARDKWKKIAPELAADKSVCVPIITESNQFEFEPSKDELVKSQRTKPRKGKPLERGGELTIAASKDERIRAAGKGVCPYTGEGVPEGGGDKDHIIPRASRWGTLNDEANLIWASERGNKEVKKDREFSLANLAGGYKSAVFGGKSDAQITRWIVEQIVDDSGEDFAFGKYRSFINLEPEQQTAFRHALFLKGHPLRDKVINAIDNKNRAFVNGTQRYFAEVLANALHKLAKSAGKERLLSFDYFGVEAKPNSAGDSIYD

SEQ ID NO: 6355 - protein, 1041 aa, unidentified
  REGION 1..1041: note = Description of Unknown: Cas Enzyme sequence
MAKILGLDLGTNSIGWALIDDKQNKILGVGSRIFPMGVIDLGNGESEMSKNSSRTGARGVRRQFFRRRLRKKVLLKALSENKMCPLTVKDFEDWKKTKLFPTSKLSEWFAINPYALRHKALNEKLTLEEIGRILYHLIQRRGFLSNSRKGGSDDGAIFKGNIKEGKIGIDDTVESIEGQTLGSYLYSIYPKESQPFQNGLERIRNRYTTRKMYVDEFEMIWNKQAQFHSTLNEDLKQLFGGRKQDGFKEDGILFHQRPLRSQKHLVGNCSFEPNKSKCPISAIPFELYRIHQWVNTVEYNGKRISDEERDKMIDLLLLSEKIEFKKLRKAIGKESAEFKFNYKDDDKIVGTHTISNLANKKFFGKKWFDFTTKEQEDIWHVLYFFDSKSNLKDYAIKNWGFDEEQATLISKFNVKDGYASLSRKAIENILPFLQEGVVYDIAVALGGIKNAFGDGWSNLSEEQKNFIVDNIPEIVRSKISGGYIDTIKDLLRKEYNLTEKQLKKLYHHSASIDVKKTLDKLPVGKDADKQIQAIKNPIVITALFELRKLVNQLIDEHGAIDEIKVEMARDLKISKMQRNKIRREQKRLERENDRVISRLKEEGQRVTHDNILLYKLWEECKNTCPYTGKHIPLHKLFSGEVQIEHIHPWSRSLNDSFNNKTLCYADENRKKGNKTPFEFYGSDEQNWSAIKERALKLFSDTKEYPNAYQKFKRFVQQKFDDDFSSRQLNDTRYISKEAKEYLSQICATVMVSPGQATSNLRQKWGMNNILNDENEKTREDHRHHAIDALVMACTKVSYVQELSKWNRYNRNSELKDFPLPWESFRRDAEIAVDKILISHKRTINDITVRTHTVEKNGIKYKNTGVAARGQLHKETVFGKRNFNGEEAFHVRKPIDSLTTEKQLDKVVDETIRMLILKRIQELGGFIKGTIPANTFFIVDEKGIKQPQIFLPNKNGNPVPILKVRVKENIGSAEQLKSNVNQWVNPRNNHHVLIYKDDKGNLKEDVVTFWTVVERKRTGQPVYQLPPDGKEIVTTLHINDMF

SEQ ID NO: 6356 - protein, 1066 aa, unidentified
  REGION 1..1066: note = Description of Unknown: Cas Enzyme sequence
MAKKILGLDLGSTSIGFALVEEIGDKKKIVTMGSRIIPLNVDDKNQFSQGQAISKNKDRTTQRTARKGLDRYQQRRLKLGKELKKLNMYPNLELWKLPTFELFSLRDKAVKQQISLQELGRILMHLNQKRGYKSMAKEENAEDKKATEYVAEVKGRHKTIQEMGLTIGQYFYQGIANDIRYRVKNQVFPREAYIEEFEVIWKKQASYYSEILTDETKKIIQNETIYYQRPLKSQKGLVSVCEFEGKQKTVSSSDGKTKELFIGPKVAPKSSPLFQLEKIWETINTLTLKSKRGEDLKITIEQKQAIFNHLDTNEKLSQADLFKLLKINKDEYYGNKQIGKGLQGNLTKTAFIKILGAQHPLLAFEMEIHTEENGLGHRFDRKTGEVLDTKARKHISPTVEQQPLYQLWHTAYSIKDEIECKNALISKFGLFEEQAKAIAKIDFAKSAFGNKSAKAMRKILPYLMDGYVYSDACSFAGYNHSNSKTTDERLSQNLKDKLDLLPKNSLRQPIVEKVLNQLFNLINALTDKYGKPDEIRIELARELKQSKEERNDAFKYNTQREKENEGIVKRLAEYGLRPTRNNIIKWRLFHEISNEESKLNATCVYCGKAFGISDALSGNEVDVEHIIPKSLLFDDSQSNKTLSHRSCNLAKNNNTAFDYMKSKGEEAFNVYVERVNTLFKNRIIGKGKRDKLLMPQNKIPTDFIERQLRETQYIAKKSKELLEEFCPNVWSTSGSVTEKLRKLWGWEEVLMNLQYEKYKAVGQTETKEWETNNGQVHKKEVIKDWTKRDDHRHHAIDALTVACTQQGFIQRINSLNTQHTRDEMYAVVQAANAGRAENSSSVYGEKRTLLENYLLTKKPFSTSEVENAASEIFVSFKAGKKVATLGKRKIKKNGKKTVVQTGIIVPRGPLSEESVYGKIKVMKPACPVKLLFENPQAIVKERIRNLVLERIAKYEGDSKKALVSLKKEPIFLNEAKTQTLEYGTMFVEEYVIKYPLGSIDSKKAEKIVDKHLKEVIQQRLKEHNGDAKKAYATPLYHDKAQTIPISTVRCFTGLSVVEPIKVKDET

SEQ ID NO: 6357 - protein, 1008 aa, unidentified
  REGION 1..1008: note = Description of Unknown: Cas Enzyme sequence
VLGLGVRIFPEARDPDGTPLNQQRRLSRQMRRQARRRKQRRRMLNELLTDQGLLPVYGSDEWTRVMVLDAYQLRAEALKRELTTQELGRTIYHLSKRRHFRGKDLEEADETDAAKEAADEKEAKSAREKLVKALKDSGETLGSYLATLPAGERKRGHHALRENVSNEFQAIIGKQAKFHPKLRDAAFVSALEETIFAQRPVFWRKNTLGECRLMPGADLAPKGSWLSCQRRMFEMLNNVEIVGGNRRPLLLEEREAILKGLQTQASMTWAGVRKVLEPIFKARGESAKRLRFNLEEGGSIKLEGNAVEAKLSSIFGDAWAAHPHKQAIRDAVSERLRAADYGEVGKNRIVVLREGERKARRLAAAESFAVDFGATADQVVQLQAMTFPAKWDSFSAEAIDLLLPELEKGARLGALLVGPEWAKWRDENFPAREQPTGEILDRIPSAKDKEEAARLRAVRNPTVVRVLNELRKVVNNLISVHGKPDLIRVELARDVGLSKKDREDKSKAMRANEKRRNEAVKDLKSHGIQEPTRRDIEKWLLWKESSERDSYSGNHISFDALFRNNEFEVEHIWPRSRSLDDSFANKTLCRRDLNLLKGQRLPFEVFGHDEDNWTAIKNRLVEMTAAKGGVGMSRGKVKRFLAQTIPDDFASRQLNDTGYATRQAVASLKRLWPDVGPQAPVYVQTVSGKVTAHTRRLWGLNNILSDDGEKTRADHRHHAIDALVVACTDPGVTQRLSRYWQEKDGPDGDARRPALLPPWPNLREQVAERVDKMVVSHRVRKKLSGPLHKGTIYGPTDLSERSAKVTYDFFTVRKSLTAISKGELDDIRDPHIREVVADWVENRGGDPKKAFPPYPRVSEGGPEIRKVRILVKQQKALMAPVTTGFADLGSNHHIAIFRTSKGKAYFEVVSLFEAVRRHSRREPVVQRYREGMQFVMSLSQGDSLMLPNAQGESIMIVTSIWSGGQVVLEHCTDAASSTTTRPTVGTLLNQGAKKKNVDPIGRVRPAND

SEQ ID NO: 6358 - protein, 1145 aa, unidentified
  REGION 1..1145: note = Description of Unknown: Cas Enzyme sequence
MPVKIIEPFTFGLDIGIASVGWAVLAPHRIVALGVRCFDKAETAKEGESLNLARRQARLMRRRLRRRAWRLTKLARLLKREGLIASVDTLKEQPAKGFKTPDLWQLRVEALERKLESGEWARVLYHICKHRGFHWISRAEEKKAESDTKGEGGKVKQGLAGTTKLMSEKNYRTAAEMVVHEFPEAKRNKQGEYSKALSRVLLSQELTLLFEKQREFGNPLATVPLQEALLGNGDRKSGLFWAQKPALSGQDLLKMLGHCTFERTEYRAPKASFSAERHVWLTRLNNLRIAVNGEVRTLNSSERQLALPLPYQQASDFTYKQLRAALVKSGLLPDTFKFMALRYPATGQKEEGKTKDPESEKLVKLPAWQEIRKTLKDHGLETEWQSISGAAQSGQSNLLDQIAWVLSVFKDDEEVERELQKLHLPQAGKMIPALQEIRFDKFSNLSLKALRKIVPEMENGLRYDEACEKAGYHHSQLHKAGSGEHKYLPPLYSGRDKSGRMIFNENMDVPRNPVVLRALNQARKVVNALIRSYGSPYAVHIEMARDLSRPLDERRNIEKEQKEFRERNDRDRDEFATEFSITGNPKGGDFEKWRLYREQHGKCAYSIQPIDLNRLLEPGYVEIDHALPYSRSFDDSKNNKVLVFANENRNKGNQTPYEYLGGAENSERWRNFAVYVEGNKSYRLAKRSRLLRKDFGGKESEGFRERNLNDTRYICRFFKNYVEQHLKLSDDSTSKRCVVLSGQLTSLLRARWGLLKIRGDSDRHHALDAAVVAACSHGMVKRMSDYARRKEPAQVREGFVDMETGEVVNPAMFQQLREHFPEPWPHFRDELKARLYIDDPVQLRKEIELLGTYPVDSLANLKPLFVSRAPQRRNSGAAHKDTVYGQPERLKKEGGVTQKIAVTALTLKDFDNLIDPHRNERLYAALRLWVEGRDDREKRVKEIEKSARENTRTLTRDEKLEIDRLRALPRKPDKNGNPTGPVVRTVTAVIEKLSGIPIRGGIAKNDTMLRVDIFRHKKDHKYHLVPVYVHHAVTKELPNLAVVAHKEESEWTQIEDTNFIFCFSAYPNDLLKIAQKNANFLGYYAGCDRGSGNMNLWAHDRNQSVGKEGLIRGIGVKTALSVEKIHVDTLGNIYPAPPEQRRDLA

SEQ ID NO: 6359 - protein, 1055 aa, unidentified
  REGION 1..1055: note = Description of Unknown: Cas Enzyme sequence
MNGLVFGIDLGIASCGWAVLRLPAGDDQPGEIVGMGSWMFDVPETAKERTPTNQVRRSNRLLRRVIRRRAQRMSALRRLFRDSGLITEARADALAFANLNPWELRVQALERRLTEEELAVALGHIAKRRGFKSSAKGKSANTAGDDQKMLKALEATQERLARYRTVGELFVRDPGFSGRRRNRDGIFDRTQSRDDLAHEVAEIFRAQRRLGNPAASNDLEAAFTEIAFTQRPLQDAENLVGMCLFEPAEKRASRFAPSFERFRLLTRLVNLRVLSATGERPLTPAELAAVLANPGKTAKLSLKEVRKRIGLPSDQRFSAFRPDEEDRDVAVRTGEAMAGTRKLREALGETLWEALLKSPALLDEVARVLTFFETREVIHRELGRLSLPDGAVEALVRGLESGAFSKFRGAAGISAKAARALVPHLEAGLRYDQACEQAGYDHAASKWAGREQVTDRAAFNRLVADLTADVANPVARKSMTEGLKQAWAMRNRWGLPDAIHIEMARDVGNSAEKRREIERDIEKNTASRERERQEARELLGIADITGDTLLRYRLWKEQAGRCPYTDQAIPPAAINANDNSHQVDHILPWSRFGDDSFANKVLCTASANQQKKGRTPFEWFQASKNEEDWQKFVKRIEGNAAFRGAKKRNYVLKNAKEAEERFRSRNLNDTRYAARLLAEAIKTFYPPGQRQDRGGIRRVFTRPGALTAALRQAWGVESLKKVDGKRVDDARHHALDALVVAAVGEAEVQRLTRSFQEWEQRGLARPLRQVPPPWGDPAGFRREVEDAYRDIFVARPERRRARGEGHAATIRQVRHRDGAAVVYERKAIADLKESRLEDIKDADRNEGVITAIRAWIARGRPADDPPVGPSGQVIREVRLRTKAKPAVEVRGGAADRGEMVRVDVFSKPNRKGKDEFYLVPIYPHQVMNPRQWPTPPDRAVVAYKDEEDWVRIDDAYAFQFSLYPRSLVQVVKGSGEILNGYFQGLNRSTGAINLANHRDTRSLIDDQGNSTQGIGAKTLVSLEKLSVDRFGGRARIRSEVRTWHGVACTSPAPPV

SEQ ID NO: 6360 - protein, 1327 aa, unidentified
  REGION 1..1327: note = Description of Unknown: Cas Enzyme sequence
MKKILGLDLGSSSVGWAFILEDEMQSKILGAGVRLVSLSSDESNDFQKGNAISINKDRTLRRGARRGLQRFKQRRDAILRKFKSIGFITNEFKQAEDSTLFTHYSYAIRSKAATEAVTKEEFVSVLLMLNKKRGYKSSRKDAPLVEGSQENDVIFDGMDVARKLYQQNLTPGQYALSVLEKGGEVPAFYASDLTNELKRIVTFQLGENENLPADLLDLVLNKSRNATYYFFDKILNIPIAENKGSKEDIKKQRFIWRAEAVSQKVDASVLAFIIGDLNDQISKSSNYLGKISDNSKELLINNLTVGQFQFQALVENPHASQRNVVFKRTDYLNEFEQIWEVQKKFHPELTEELKKEIRDVTIFYQRKLKSQKHLISFCEFEPRNRVAPKSSPIFQLFRMWQNVNNLVSKNNLVIDEDVREGIIEILSYNGTLNEKELLKLLGLNHSIDKLNFEKINGDQTRTNFLKVFIQLWEKQGNSKKNLGTPLTRMDVALILKDLGLPGDLLDLNLNLKDNAFDKQPYYQLWHLLYSLDDDALVKRTLINRFGFSESLAQAMLYVKLESNYASLSVKAMRKILPHLMDGLKAPDALKYVYHSESTASETIVLKDKLDLVKKNSLRNPVVEKVLNQTINVVNAIIASDLYGRPDEIRIELARELRASNEERSAMTKNLMDGTKKNETIRKQLQENFRIQRVTKNDIIRYKLWEETGGISIYTGNTIQASDIFGGKYDIDHIIPQSRLFDDSFSNKTLCERALNIEKGNQTAYSFLKQKYSPAEFEQYLSRVKDLEKSEKIKKTKAFKLTLTNEKIPDDFITRQLNETQYISKKAKEILTTICDKVYTTTGSVTDRLREDWGLVDMMKELNFEKYKALGLTYEDKGKNGERLLKIKDWSKRNDHRHHAMDAITIALTKQAYILYLNNLNANIGGIIQGNIENKYTERIGGKIVFKSPMVNIRDEFKRTLDAILISHKAKNKVVTKNKNKIKTKAGLVIQHTLTPRGQLHKETIYGSQNTYETKWVAINAKMDTDLISKVANKKQREALTARLATFDNDPKKAFSGKNSPSNNPIYLDENKRYTLNDKVKLVNLVPQFTIRKNIGPDLDVKKIEKVVDVGIKNKLMERLHAFGGDPKKAFSNLDENPIFLDKAQKISIKTVKMQGVSNALALHSYVDNDEILKPKDWVSSGNNHHIAIYEDENGDYQDEVVSFFTAVTRATSIPPLPIIQKHHEKGWKFLFTMKANELFIFPSEEFNPTEVDLTNPANYSQISKHLYRVQKLALKYYVFRHHLETNVEDTKELCDIAWKRIQSNNHLKGIIKIRVNHLGQIVKTGEY

SEQ ID NO: 6361 - protein, 997 aa, unidentified
  REGION 1..997: note = Description of Unknown: Cas Enzyme sequence
ICFSNNMENDKYKLGLDIGVGSVGFALIKESESGETSIVRMGVRIVTEDPDFHGNFYSGNSASKNAARTLARSARRGLDRYQLRRDQLIRILNHLNMMPDEDMLTRISSLELFELRDRAVRERIDLKELGRIFYHLNQKRGFKSSRKSASEEENKTEYKKMLAENHEALGTQTIGQYFYQKLLQDPFFRVKDNIFYRTDYQNEFDAIWKQQKKYYPEVLTGGPDESENRGTNYRRIRNETIYYQRKLKSAKHLVSKCTFEPLKRVMPKSHPLFQEFRIWNQINNLRAVSEKNQTRIPNSEERIKIWNALHGIKVLDKSDKTLDDVGNLSAAKIKKILGLPKDYTLNYEKLEGNKTWRTLTRAIADAGVSLNLTPLGEEDLHDMEQADLVRLWHCTYSLENERETKIALMNNFGFSEEAARLIASSTGYTSDYGSISAKAAKKILPHLWKGLTYDKAVIEAGYQHHSHFETTTFLKKLPPVKSNTLKNPVVEQVLNQVVNVVNGIIEQYGQPDEVRVELARELKSNAKKRSKTSQQQRQLEQLNKGIAERLTTEHKFKRVNGRDLLRYRLWEETDQKCLYCGQPISFSDVYNGKAEIEHIVPRSRLFSNAMSNLILAHVHENREKGQLTALDYLKQQGTKAEENYIQRVNELYNAKKITYSKHKLLLTVGEEIENDFLDRQLNDTQYIARETIGLLKLVFPKVYTTTGSVTDMLKERWQLNRLLEEINLPVYREYGLTEHVEIKDKQGFPKTIEKIKDFSKRSDHRHHAVDALVIALTRQSYIQRLNTLNQHFKRYQDLKESAYEFPAPSPTLRDDDKQHLERLLISFKKPGAKVLTRKTNRVKTNQGIKEQITWSPRGSLHEDTILGRIKRYKKAEWKDALAEPNNIIDAQVKLAIQELVAREGDVKKALSYLKKNNLELDGIEVSKPLMWEYRFTKRVKLNDQLSPAKVSKIIDPKIRDLVEARIQEFGSIKAAFKEYSANPIWLNKDRRIPRAHV

SEQ ID NO: 6362 - protein, 1057 aa, unidentified
  REGION 1..1057: note = Description of Unknown: Cas Enzyme sequence
VSTDRNRILGLDLGTNSLGWAIIETDDDGVPVRIVDAGVRIFPAGVEGNLAAGKDEPRNLARRQKRLMRRQILRRQRRRRAVLRHLQTGGLLPREIPPKAAEIDRFVRELDSRLGEQAAFPPDRRSLLPYLLRQQALDRDLRPEELARVLYHLGQRRGFRSSRKDVPKPDEKPGEVASGINTLAAAMQESGARTIGEWFASIDPREVPLRRRWTSRAMYEAEFDLIQARQASSHPSLSPSWWSQLKRTLFDQRPLRSQSGLVGRCSLEPEKRRTALAMPLAQRFRILQTVNHMRIVEGIDSRPLDPEQRASLLSALERSEELTIAQARKAVGLRRGEAVLSVELGDEKKLPGERTNSKIAKAIGPAWATMPERDRSRLLNDLLSFEDEPALASRLQRAYGLSEDIAAAAVKIRLEPGYARHSDRALRRLVPLMEKGMSYSEARKQAYPESFRGGEAIDTLPPLRASHKLRRPAAPGMEDLRNPVVERSLTELRKVVNALVRAYGKPERIHIELARDLKNPRKVRQAITKAMRKRGDERDVAADALRRLGCTPNRDLIERLLLAHECSDIEDLAKLAWESTFRCPYTGRQFGMRDLIEGRVDVEHIVPFSRSLDDSFANKTLCDPEFNRRRKGNRTPFECLSSSPEEYEQVLDRVSRFRGESSRKKLRLFSLTEIDESFAQRQLQDTRYASRLAADYVRLLYGPEGQSRVVTLGGSVTAHLRRQWGLNGALSGSSEKDRSDHRHHAIDAVVIASCTRSIIKRMSDAAARSEAMHSRDLLLDFKPPWPGMADSVKERMASVVVSHRANRRVNGGLHDETNYGPPGRRRGGAEGVPHGHVRKAVAGLKPGEIDRIVDPAVRAAVSGWIEKHGGGALSKLDPSRPEQFPFMVARDGRRVPIKRVRIRAAVRTVAVGQAERTRYVAPNSNHHMAVFEVAGRKGEPTWVGRMCTRLEAMRRAAAGLPVVDRSAVEGGRFLFTLSSGDSIEFDAEGGGRSIGVVSGVSESMVEWREVSDGRPATEIRKAGAAGGRLTRSLSGLRELKSLRVTVSPVGVVGSAGD

SEQ ID NO: 6363 - protein, 953 aa, unidentified
  REGION 1..953: note = Description of Unknown: Cas Enzyme sequence
  MOD_RES 17: note = Any amino acid
  MOD_RES 254: note = Any amino acid
VERLSVSVLGCLTCRKXQLRREHRGQRRVIGRRRQRMIAIRALFRESGLIEAHGKDALKVPGLDPWALRVAALDRKLSGLELAVALGHIAKHRGFKSNSKRDRGANAPRDSSEMLRSIGATRERLARYRTVADMFANDADYSKRKRNRDGDYSRSVLRDDLEDEVRLLFARQRQYGSALATEEFEQRFVEIAFFQRPISDSEEKVGFCPFEEGERRAAKNSYSFELFRLLSRLTALRIRRSRDERSLTAGEISXGVSTEEEAKRDIVARTGDAAPGTHALRKTLGDTWRVMLSSPAQLDRIAEILSFREDMTSIHGGLQEIGLDPLVLGAIMKGVEEGAFSTFRGAGHVSAKACRAIIPHLQRGLVYSDACKEAGYDHTRRPATQLEEIGNPIARKAVSEALKQVRAIVQEYGLPGRIHVELARDVGKSKEEREEITRGIERRNKEKERLRRQFKDDVGVEPGSAEDLLRYELWKEQNGRCLYTDQPIPPGAIVASDNSVQIDHILPWSRSGDDSFVNKTLCFAQANQNKKGRTPFEWFGQDMPVAAWDSFVERVETNKQMKGRKKRNYLLKDASVLEERFRARNLNDTRYAARVLAGTLRRLYPADGKARIFARPGPLTDRLRRGWGIQDLKKDPAGRRLDDDRHHALDALVVAATSGSALQRLTLAFQEAEKRGDHRDFRDLPLPWPGFVQEAREKVKNVFVARNERRRARGEAHGATVRQMVEREGKIVVFERKAVEALKLGDIDRIKDPERNFKLVEALRNWMEAGKPKDRPPLSPKGDPITKVRLRTNKKPDVLIRDGAADRGDMVRVDVFRKSKRNGAWEFFLVPIYPHQVMDAENWREPPNRAIQANSDEGAWPLLDHPYKFCWSLYPQTLLEVVKPDGEVIVGYLRSVDRNTGAFTISPHHTKSEIRKGIGSRTLRDIQKYHVDRLGRRFKVGLEPRTWRGAVCT

SEQ ID NO: 6364 - protein, 1088 aa, unidentified
  REGION 1..1088: note = Description of Unknown: Cas Enzyme sequence
MTSCIPLRFAFDLGTNSIGWAVYRITHFPDPNLAPPTVAELIACGVRIFNDGRNPKDGKSLAEMRRVPRAARRRRDRYLQRRTDLIALLVDLGLLPVDEKERRALVTLDPYRLRALGLDQPLTPFELGRALFHLNQRRGFKSNRRVDRRSDEKGKIETAAGLLRGALKSENARTFGEFLWRRHGGPDGKATPGTRKAVRIRLEGEGAKALYHYYPLREMLEHEFDTLMGRQRAHHPGILTDDAISRIRHTIFWQRPLRPVERGRCTLVPEEERLPKALPSVEERTIYETLNHLRYGEGLLRDKALTKAERDLVAQPLLQGKSKRHVTFDTIRAALKLNSDVRFNREDSGRSDLYDCRSQSAEKLAAKDRFGPRWYVLPLAERDAIVTRLIDEDDEEQVASWLMADHGLDEDAARRVANWSPREGVSRLGRTANAAVLEELKKDVIAYSDAVQFAGKALGVTWHHSDFRDGVIEIPLPYYGQILERQVSFGSGKPEDNAEKRYGRVANPTAHIGLGQLRRVTNKLIKAYGPPAQIVVELARALKLTKEQKDKEQRENARNKTENDRRRAILEEQGQADTGENRLRLRLFEEQQRANGGVALCPYSLKPIGIEALFSAEIEIDHILPYSRTLDDTKANRILCYRAANRHKRRETPYEAFGGAHKAFPEQPDWTDIATAAAGLPANKRWRFAPDAMERYQNKERDFLARQINETRHLSRLARFYLGAATGSTDHVYVTTGQLTAMLRARWGLNAILGDENRKMRADHRHHAIDAITIGAIDRSLLQDIARRAGAREEQDLARTTADVPDPFQNFREIAREKVRAVVVSVKADHGKGGALHEDTAYGLVTNPAEAAEIGNLVFRKPLVALNANEIDSVRDPHLRSELQALAAPYRSDKGKLTDEKGLKAALAAFRVKTSHNGNEVERQVRRVRIGKTKAGEVHIRDRCTGAVYKALLPGDNHHIDIVQMRDGTWRGFAATVFDVNQPGWRPLWERERLGGKLVMRVHKGDMIEVDDADGQRSIKTVHRLSPSNNVLYLASHNEGGELGKRHDDKEDLFRWDFANIGGLKKRNARKVHVDEIGIRSLTRSNAD

SEQ ID NO: 6365 - protein, 1172 aa, unidentified
  REGION 1..1172: note = Description of Unknown: Cas Enzyme sequence
MTQNDITSFSGYTLGLDLGPNSIGWALVETEFEKWTELKEDGDERLHLQAVAYPGFLATKDAGHPPLGVRIFEAGLDNFNSAKEKALNQSRRDARSARRVHARRNARRKALRNLLIKAGFLPKTEEEREAFYNATGENGVALNNPYWLRTKGLDEALTPHELGRAIYHFAQRRGFKSNRKSGKEQDDKGMLAEIKGLGEAIQENGCRTLGEYLFKLGWGDDGSSDKLQKGELRIRGRHTRRNMYEDELRLLLDTQEEFHPALASLRGNEERPGSIEHAVLFQHPFELTPERRAKAPSRANLHRAPQVKPCALEVGQTCCSKNAWIAQRFRILKEVNNLKIIQNWDWKAARFLTQDERACIIELLSQQQKVSFAAMKKALAKQFNTDAQAYFNLEKGGREDLQGNAIDAKIAVLIGKPVWAKCDDDEKHRLRDALLHEEDAAKLLEAYGEYKLDESKRKQLLAFDPDAGSGYIGYSEMALLKVVPLLEDGLNEYDALMQCYPNRPEANAFTRQYKKGTTFPGFEEGVTAIPALPYLQHPDLPHNLRDITNPIVRRGLTEVRKVVNAIVREHGLPDQIVVELARDMKMGQKERKEVSMRNRKRALTRETAATEVEGLGGNPKSGGDILRYLLWVEQSRMCAYSGQAISQTQLFTSDLDIDHILPHWQSLDDSQLNKVLCFRNENASKGQRLPLKWLGENSQRYEELLDRTMGFIESNDQERQQNRFEGIKKLGLSVRERAVMYSRVNGAWPQRLKRIMQEEIDTNQFSSRQLNDTRHLSVSVVRFLELLYPPALRVGEKAVRSTRGGLTAELRRHWGLNTVLRDDPIRNAKGEPISNLDKSGRKQRIDHRHHAVDALVVALSSRGILKKYQDHFKSMAGLDPACEERREMEMGTFPFPWQSFRTQTVEHLMAVNVSHRVQRKVRGAFHQETFYGQARNLRGLVKPGKYVTRKTLEAMSGKDVKAVRDPVVRKALFDRLVTFGWDCESTALPKDWWRDEVYLPNGKPVRKARVELQKDVDKMLVLGDKQHRHAVKGNNHHVAFVEVEGAKGKEMRAAVMPKVECANNVRRETKPAVNRDWKDLGEFCFSLSRKEAVLVTNTESKTQAMCLLQKISGGSNLCTSFDMYLRDLKDSRPASEGNKTPFARIRSSTALAKYSITKLQLDALGRLRPSND

SEQ ID NO: 6366 - protein, 1079 aa, unidentified
  REGION 1..1079: note = Description of Unknown: Cas Enzyme sequence
AIYCDMRQTSFRYNKNTVRFAVALVKGFSGRRVSIGSEERGINMILGLDIGTNSVGWALIKTDSEGKPSGLHAAGARCFDAGLDGDVGSGRGEPRNAKRREARQARRQGWRRKRRRKKLIGILQKHGLLPETIERTPKGTHEGLVELDKSLKKSNPPKDHREEQLLPYLMRAKAAREKVELFELGRALYHLAHRRGFLSNRKESDKEDDESGKVKGGIKDLREAIESSGAETLGSYFATLDPSEARIRQRWTARQMYIDEFNIIMDEQQKHYDISEEKRKEIYRAIFSQRPLKSVAHLVGRCELEPSERRCIAAAPIYQQFRMLSAVNNLLIEEDEFSQRSLTPEERDTLIEALTTQGDLTFAKIRGKTILGLPRGTKFNLERGGEKRLCGDRTTSAMMSVFGDRWGEMSEKDQDRVINDLRSYEKTDALRNRAKKEWGLSGEPLQAFLDFRPEQGYGNISKKALLKLVPSLEEGLAYSTARLDEYPESFSSDESQDSIPIVEELFPNLRNPVVSRSLSEVRRVVNAICKEFGKPDVIRIELARDLKQSQKHRRDATKKMRDRESEREKAKERIKLETGIENPSRNDILKVLLAEECCFMCPYTGRSFGMRDIISSSPTMDIEHIIPFSRSLDDSFINKTLCDSGYNRNVKKNKTPFETSGGTDEWNKILNRVGKFKSQVRHLKLQRFEMEDVGEELIEEFASRQLNDTRYASKLAAKLVGTLYGGVVDKDGKKRVQTCAGRATAFLRNGWDLNGILDDGPRKTRNDHRHHAVDAVCIALCDAKSVKQIAKAAEKREKLDHRLMGSIRAPWNDFVQSVREVIEGIVVSHRVDCRLNGALHEETNYGVSKLDNGKTLTRIRKPLEALTSSEVNRILDPRVKKAVIDALDGKPAKTVFKDRKDHPKLVTKKGDEIPIHRVTVEPKVKNTVAVGSKGTPRHIAPGSNHHMAVVAVLNDKGEEVKWEGHVVTRLEAIQRKSRGEPIIQRVWEDTEKGQKRIFKFSLRSGDTISIGNGENQGTWLVSGVAASLQIQLRPVNDARIQAEVKATGDYWQPKINSLREIDTKRLSVIPLGTIRDWNA

SEQ ID NO: 6367 - protein, 1142 aa, unidentified
  REGION 1..1142: note = Description of Unknown: Cas Enzyme sequence
MFYRLGLDVGTNSLGWSVLELDEDDKTTVVKVVNAGARIFTEGRDDKSKATLAADRRQARSARRRRDRFKQRQTFLLCELEKAGLMPSGMEERRKLQECNPLELRARALCEALTPHQVGRALFHLNQRRGFKSNRKDRSKEERGKISDSVLHLMQEMRLIEVPLSKEEYKKLDNKEKKRARDKEADDRRNAMQRLAEDTNVSYGAFLWKRQCNKMWIRARPGAGEDGKLYHVYPTREFYEDEFQKIWTVQERHHPELMTDEARQRIHRAIFHQRPLKPQKLGKCVYISSEDRTFKAMPSFQRYRIYQEVNNLTWSSEGVEKRLRDHLEMRNKIVKLLEEAGTLKVGFKKMKREVGISGDVQFNFETFNRDGFESNPTTRLMQDKNRVGEDWRKWPLDKQDRFICIILNGTPEQQQRNYQAQRSHKPVSGNGADEDREIAEYLCKEFGLAENAAEECLKAPLPEGTANISLKAAKLMLKKMEHVIRDQETGEETLPIQPEAARAVAEENPGFFVDPLSRSAGSGEGDFTPEPYLPYYGKLFEDGRHIIPGDKLSQGNDLKYYGGVTNPTVHIALNQIRQVVNELIDRYGHPYSIAIELARDLPLGAEKRREREREQGKNRKRNEKLNKTLKKHGYDENHGNRLRLRLWEDQEHLCPFSGRKIGVCQLFTADIEVEHLLPYSFSLDDSLANKVVCFLKANRDKGNRTPHEAFGDSPGDYNWHDICERVKKLPPNKHWRFEKNARDTWKRDHDEPIARHLNDTRYIGRLAREYLECVCPVGRIDVITGRLTALLRSQWGLNGMLRNDDELSKKKNRDDHRHHAIDAIVVGMTSRSMLQKVSKAAKRSEELLLDDRLFPPGGPITWESFRTDVDRVVRKIIVSHKVRHKKLRPGMTDGKLHNETAYGIVKSKDESKDEDDRKVVDPKLCEVVVRKPLDTFKELAEIQRIRDPYLRKCFSEEFKIKGFEGVKEFAQKWKIRRLRMVESLSVIPVKDRAGKEFKAYKSDSNWGMEIYAYPDKPRWDGMVISRFAANQAGFKPGETYRPHPASRLVMRLQINDCIELDEQGGERRILRLQQISKGQLTFAPLNEANVDARHRNKQDPFRFLTKSPDKLRSLDARKVHVSPTGRVRYENRRRPRSARRTP

SEQ ID NO: 6368 - protein, 1078 aa, unidentified
  REGION 1..1078: note = Description of Unknown: Cas Enzyme sequence
MKNQMNYTLGIDMGVASIGWAVVSVADKFIDSGVRIFPAGLDNFNSSKEKHPNQDRRISRGARRRIRRRSERKKLISNILKDLGWMPKNEDELQEWYNLNVYELRSRAISEKISLLELGRIILHFNQRRGFLSLRKTEEVDGDKETQGMLGEISALQKAIDESGHKTLGNYLYHIYKEERHLVRLRNQHTRRSMYYDEFSLIWETQSGHHSELNDQLRYGSLGELKNPTKVITPVPRVKAESMLQQFGFENLTFFQRRVYWPASSIGKCELEEGEPRSPIADRRFQEFRMLQEVNNLKILDNSADGKPEERKLTEEERLEAIAYLTGKKEAKLEALKKHLCKKILDLPSHTQITFNLESGGRTKISATSTDAAIATPKAFGKTWYKLTPEIQNKVVEALTIPAAIDEDIREALTQISELDVDTHDALLRVSLPSSYGHLSIIALEKLLPHMRKGMIYMAKDESDSALHAAGYKRRDEFSHAKSDLLPSFDSLLDSGSPNYDKNQVEINNPVVKRALTELRKVVNGLIRKYGKPTRIHVEMARNLKMSPKQRQDYERKTRQHEKERSAAKDAIENLGIIANHTAIQMYRLWKEQKEVCVYTGKSIGISQLFSGEIDIDHIFPFSNSADNSYLNKVVCFRNANAAKGQQIPYHWLTSNPTHYEEVLQRAKSLPRGKYKKFIAEEIPEGFVNRDLNDTSWMAKAARQYLCRIVDKPHHVIGTKGQHTSTLRNQWELHSLLRNDGLDIKNRDDHRHHALDAIVIALCDQSAIQKITGKLHYDLLQNEAKETGKTIYRLKLSGDKLELPWQKFRLDVADSLNEIWVSHRPKRKVSGKLHEDFNYGPTNINGVITRRKKLIDLSNAELKDIIIGKRNVIRDTTIEILFKEYLIANGVKNNKELKDALFKAPFKMDSGVKVEKVRILIPNKTAVALRETNPKELVIPGNTHHLAIFSLGDGNFHFEAVTLYEASRRQRSKEEVIRKTYSDMPIDAEFIFYLCSDDSMMAEVGGKDELFIFKGIHATQFTAKFIYHNDARKNNAKDPITNKAVSIQRTCKPTTFGTNFRNARKVTILPTGEVRNMS

SEQ ID NO: 6369 - protein, 1113 aa, unidentified
  REGION 1..1113: note = Description of Unknown: Cas Enzyme sequence
MNWRLGLDIGSNSIGWAVYQLNKLNNPEKLIAAGSRIFSNSRDPKANRSLAEQRREPRGTRRNRDRYKMRRHEFMAKLIHHGLMPVDKTERKALENYKKGEPRTIEKDPWVLRVKALEEKISLYEFGRSLFHLQQRRGFKSNRKTDKVDSEKGAISQAAKQTKELIEKRGARTLGQALASNRVKDPQKAHLHPVRARPHGEGAKLAYDIYPLREMVEQEFLALWEAQQKFHGHNVLTNKMRDDLADTLLFQRPLKAQPVGKCTLNPSDQRAPACLPSQQMLRIYQEANNLRIMEPGKEARPLFVPERDLLVQKLKNTAEPLFTTLRKVISLPSEAYFNTESEKRKKLKGDTTASILKADKYWGKAWLELPLTQQDALVEILNGCEPILPNKQPNPVFESLIGTVSSALDISKDQSSALLQSTSDVTIANWLEDRFDLPSEQALTIANAPAHPKWPQGHGRLGRTASEQILTWLTSDQKTAHNPQTGEVYQAPYTYDKAVVLAGYKSHSELDEKQNLNRLPYYAQILDRQVAFGTGDPQDNLEKRLGKIANPTVHVALNQLRKVINELIDLYGKPVEIIVETARDLPLSAEGLRDLDKEQRDNQDKNEQIAKKLADENFANTYENRLKYRLWEELDPQDVLGRCCPFSGQQVSIDKLFTDAIEIEHILPYSKTGDDSRANKTLATRKANKDKGNESPYEAFGNNTRDGYDWQEIVDRSSSLPKNKRWRFNPDAMDRFDKESAFQDRHLNDTRYINRITKTYLEAIGADVWVTPGKLTSDLRHQWGLNSILAGHNKEETQKGDAKKNRDDHRHHAMDAMVVGLTDRGLLQKVATQAARGWAEGKSATNLIGGLGQPWETFRDEVRAVIDNLIVSHKTDHGLGGQLHNDTAYGVIADNIDGKGMSKVVHRVPLSSLTDVKKLAGIRDDHIREHLIEVTQGLTGKDFTQALCQAGEAMSPPVRRIRIEENLKVIPIKDKQTGKPYKAFKGDSNFCYEIYENDKGIWTGNVIQRYHANQKDYDPKSKLSQTGRPLIMRLHNDDMIAMLDRENNNETIFRIVKMSQGMIVLARHNEANVDSRNRDKEDDYKYWSLAPSTLQKQKARKVRINAIGTIFNV

SEQ ID NO: 6370 - protein, 1171 aa, unidentified
  REGION 1..1171: note = Description of Unknown: Cas Enzyme sequence
MLVKTMTKPTVLTGENSPLKKLPRLFPLKIDESLALGLDLGVGSCGQALVYDSPTGKVTCNITGLPEFPNRIAFLGVRAFDIPETKAKSGVELKNPERRANRLARRTIRRRAQRMWAIRRLLKDNGILPDDYPTDEELWKTRPSQPVHPAVKKWSVWHARMTEEEDGGSGKPGPLELRVRALDQKLDSLEWAAALLHLAKHRGFRSNRKSASGNDDDGKVLAAINENERRMEAGAYRTVAEMYAIDAAFSERKRNRAGVYTAVIQRKDQNEEIVKLFENQRRYGSLHASKELENAYLELFNKQLPLKNSLNLLGDCPFEEGEKRGPRGAYSFELCRALQRLNTLTLKLADGTETSLPNFARGSDGYQLFCDRFGDQKKISYRDLRSIFDISQDIVFSDLPVDPAESIPLDATAEDQAKLLAKQIRTAENKDFVTRTRNAAEESYRLQQAIGAELWKKYRKSAPQHLDAIAFALSFFEEIENDQDDQAFWGIVNQLRHDTVPDELIDVVNANLRSEKPTLHKFGGTTSISLLASRKLIPLLAEGMLYSDACTQLYGDHRQSLFAFDSITNPVVRSVVRETMKQVVHLIDETGRLPGRICVEIGRDLGKSVKDRNEIDQEIKKRTRIKKANAKTFTKLIGREPGADELLAYELYLEQSTLCPYCGQPLPNPLTWQGDPQDIDHILPRSRSHDNSYDNKVHVHKHCNRNKNSQTPSEWFGEDSERWLALQAAISQMPKLRPRKRRNLLNTTFATDEAKLASRHLNDTRYISKLITHYLHALYEHVGEVPVTEKGGKKRVFVQPGALTSLVRKSWGLENLKKDRDGRRLGDKHHAIDALICALLSEGQRQFVTRSEQNKRAGREVAIFGNFSSSYELMERKNDHCRTPRGVQPPWKDFRNDVVTALDLFTVSRRENRKGRGSLHNATLYRVETEGDAEICYSRKPIDAKDSRGKLIFSKLSALDKIKDIDSDRNGWLKESLTNWIEAGSPLDDDRLPRDPQGAVIRKITMRQGKKSGRHYPQGFVTGGDQVRLDVFSITTARGTKNYALVPVYAYHLADAHPPDRAIVANKAEEDWDVVDNTYRFEFSLWQNSRVEINKKSSAKKPDGEYFVGLYKGVNRNTGAFQLANPDDGEEQQQLTAKTGTLLFRKIETDRLGREYIVKNEKRTWRGKTVG

SEQ ID NO: 6371 - protein, 1114 aa, unidentified
  REGION 1..1114: note = Description of Unknown: Cas Enzyme sequence
MVWRLGLDVGSASIGWAAIELGQSNNPVKILKSGCRIFPNSRDPKALKSLAEQRRGPRGQRRNRDRYKKRRKEFMAKLVRYGLMPQDKAERKQLEGRCKGQPIHYETDPWVLRVKGLDEKIHLYELGRALFHLQQRRGFQSNRKADRSSSDDKGAIALGAQRTKEMIEDLGARTLGEALAQERVMNPKEAHEHPVRARPGQEGSKTIYDIYPLRAMIEQEFLALFKVQQGFHGIDVLTDTIRDDLLDTLLFQRPLKAQMVGKCSLNPEEQRAPSCLPSQQLLRIAQEVNHLRIMQPGGKARPLTIAERNTLLEKLKTTAEPSFTAMRKLISLPSDSYFNSESEKRKKLKGDQTAHILRADGFFGTKWMELSLQTQDALVELLIGCERSLPNGTQNSTFEMLKKIISKELKISEADSERLLLSDNANEIADWLSRRFDLPVENAMAVANAPSLPKWPQGHGRLGRGTSSQILPFLLSDEPILVNPITGEVYESPFVYSEAVMLAGFNSHSSFDENEALDALPYYGEVLERSVAFGTSDPKDPIEVRYGKIANPTVHVALNQLRKVVNKLVGEFGKPSEIIVETARDLPLSAEGRKELDRGQKKNQDKNENINKLLSENDVTQTYENRLKYRLWEELDERGGLGRCCPFSGDVISIERLFTDDVEIEHILPYSQTGDDSRSNKTLATRQANRDKGNKSPFEAFGAVERPGYKYDEIVSRASRMPANKKWRFNPDAMARFDGESSFQDRHLNDTRYIARLTRQYLTTLGADVWVTPGKLTSQLRHVWGLDTILAGHNQDDSSKKFILKNRNDHRHHAIDAIVIGLTDRAVINDVARKAALGWDEGKKAHKLLSHIDEPFEDFRKQVREIIEGIIVSHKADHGVQGQLHNDTAYGIIKETIDKTGKSKVVHRVPLADLDTTEKLEKIRDDLIREHLLLETEGLTGKEFIQKLLAVGEAMTPPVRRVRICDDMKVIPINSKRTGKPYKAYKGDGNFCYEIYANSKGVWTGELISRFEANQKRYDTKSILSKEGHPLIMRLHNQDMVEMNDPDTGQKVVFRVVKMSEGMIAFSKHFEANVDRRNRDKEDSFKYLTIAPSRMQKLEAMQVYVNEIGAMYKR

SEQ ID NO: 6372 - protein, 1069 aa, unidentified
  REGION 1..1069: note = Description of Unknown: Cas Enzyme sequence
MSEFVLGLDLGPNSIGWAMLAADFKTSNSGHETYSVTGFCDTDDKGHPPLGVRVFEAGLQNFATSKEASMCQQRRAARSARRNHARRNARRHGLKRLLVEHEFLPRDSVEQDTVFQLDPYELRAKALDEPLEPFELGRVLFHLAQRRGFKSNRRSGKANEDRGILKEMGELREEIDARKSRTLGEYLYSLGTDESGSRQPLESGQVRLRNRHTRREMYEEEFAAIVDKQSSFHDEFKDESFVERVRKFLFFQHDFEVTKERRKKAPSRANLHRSPSVRPCSLIPSQQRCARDTWHAQQFRVYKEVNNLRISEHYSPHERELTPEEREAVLEKLLTSKEVKFDSLRKIVARCGADEYSAFNLERGGRIKLQGNSVEASLRNGIGAKVWNNLDEPTKTELRNALLDEEDSETLVKLLCEYGASEEKASKLADWSPADGYLACSRKAIERLLPLLEQGKSEHDAKQSEFPDQVAPNMFECLPALIDKSLPDELRDMTNPIVRRALVEVRKVVNAIIREHGRPRRIVVELAREMKDGPKGRAEHSKRNALQRLRREEAQDAVQDLHGNPRSRSDVNRYLLWKDQGGKCLYTGNAIPQSELFSGEWEVDHIIPRWRSLDDSYMNRVLVHRSANADKGNKTPAEWLGFDSAEHRELLQRARAEFSKKNLGPKLARLGKEKVEVDGFASRQLNDTRYISKAVCRYLELLYPSDLRTGEKAVQSARGGLTAELRRRWGLNRVLSPLLNQDNKPLVSETEDSSSAAKSRADHRHHAIDAVVVASASRALLKRYQDYWEKMQEGGAMAIEMPLPWPRLREDVVQQSERIHVSHRAVRRVRGALHEETMYGISQGGQGNVAEFVTRKPLASLTPAMINKIRDRQVKRYVLDRLSERGWVEGKKMPKNWDEPELRTDAGVPIRRVRIGSNKNSPAQIRNGAVVLGSNHHLALLRGEDGAIRVEVVPCIDAIRSARTCQGQAVNRNRDDGFELLMSLSRKESVLMECQEGSPPRLAVVQKMSGSSEPGTKIDLYLRDARDSRPASDANKRPFARLSSIGALEKFKLQKVTVDPLGRVNPAND

SEQ ID NO: 6373 - protein, 1068 aa, unidentified
  REGION 1..1068: note = Description of Unknown: Cas Enzyme sequence
MRLGLDIGTNSIGWWLYTTENNEVIAVVDGGVRIFTDGRDPKSKASLAVDRRVARAQRRRRDRFLRRKAALMKRMAEAGLMPSDPTEAKALELLDPYVLRAEGLDRELPLTHFGRALFHINQRRGFKSNRKTDRGDNESGKIKDATARLDQAMMANAARTYGEFLHKRRAAAPNPRQVASVRTRLTVAKRDNEEKEEAGYDFYPDRRHLSEEFKKLWEAQANHHPDVLTDDLKDEIALTIFHQRPLKAPDVGLCLFTDEKRIPSAHPLNQRRILLETVNALRVAARGEPARGLTREERDQIVHALDNKGYTKNLSGMSMKLKALGKVIKLHPDQSFTLETANRDAIACDPVRASLSHPDRFGSKWSTLDWLAQWEVVERIRTVQSDAEHADLVDWLMDTHALDRVHAETTANAPLPEGYGRLGLSATRRIVSALESDVIPYSDAVAACGWKHSDGRTGEVLTELPYYGQILDRHVIPGTYDENHDDVTRYGRITNPTVHIGLNQLRRLVNKIITIYGRPDEIVVELARDLKLSEDQKKEVQRDIKKNTEAAIARGVKLEEMGVPNTGANRMRLRLWEDLGPAIGPRCCPYSGKAISAAMIFDGSCDVDHILPYSRTLDDGFANRTLCLKEFNRQKTNNTPWEAWGDTPQWDAIAVNLKNLPNNKSWRFAPDAMEKFEGENDFSERALKDTQYLSRIARSYLEALYDGSDRKRHVYAVPGRMTEMLRRHWGLNNLLPDKDGATKAKNRTDHRHHAIDAAVVAATDHSLIQRISKAAGRDEIGGYSAEEVARTTPAPWEGFRADIRDQLAGIIVSHRADHGRIDREGRKQGRDSTTGQLHNDTAYGIVDDQTVVSRTPLLSLKLSDIEVTTKGKNIRDPFLQKALAAATAGKDGKAFEEALSAFSSNSGPYQGIRHVRLIESLQSSARVEISDASGKPIKAYKGDSNYCYEIWRMPNGKAKAQVITTFEAHHDTNRRPHPAAKRLLRVFKRDMVAIEREEKTLICYVQKFDQPHGVFLAPHTESNADARSRDKGDSFKLLQMGLGTAINAKFRRVYVDEMGRLRDPGPRK

SEQ ID NO: 6374 - protein, 1070 aa, unidentified
  REGION 1..1070: note = Description of Unknown: Cas Enzyme sequence
MYRFSFDLGSGSLGWAVFELDSDKSPVALADLGVRIFPTGRDPKSKESKAMGRRQPRQQRRQIDRRKKRRIELEELLVATGLVPPASDKEARHAFFQIDPYEARGRAAHGATDLQDIGRAIWHMSKHRGFKSNRKTDRQDDDEKGKIASASSELQKMLNDSGEPTYGAWLASRHRNDDPVLVRPSSDEAQIAYDFYPTRAMLEHEFDHIWEIQEKHHPALTQAAHDHIRDTVFYQRPLKPVEPGRCTFFPDDARLPKWHPLAQEFLILQQLNMLKIIDDNGAERSLDLGERNQLAEHLMGGTKLTWATSRKGVRGILQLSADAEINLERGGLKELSYNAVIGRLAGKTQKKAGPLAEIWHKWSEEKKLQLLSILDESTTPEVACERLQNECELDASLAEQVEKISLPDGHLRLGERAVCAILQVFRENVIVYSEAVKQASDRGLFGDDAVIHHSDLRDEGDQGLTNLPRYNELPALRRMIGTGTENPDDPPDVRYGRITNPTVHVALGQFRRVMNALISRYGKPDQVVIETTRDMAKSARELNEIEREIKKNTSRNDKWRKELEEAGILKPGERVGDRFMRMRLWEELGTSNADRLCPYSGRPISLHQLHSDEVEIDHILPFADTFDDGTGNKTVCFRVANRVKGKCSPADAWPEDDLRVIIARVRSASGMQRKLWRFRPGAMEEWHEQKSFEDRQLNATSYLGRVVRAYTEVLFPKDGTSNIWMPPGRMTAMMRRRWGLHLPGHNAKTRDDHRHHALDAATVGMIDRRMVQKLQNYAHQIGAEELSRVMPNPPEPFEGFQQQVCARVNDIHASHRPDHSVSGRLHEDTAYGLIRDVPENETARREIGNAVVRKPVADLSNKEIKQVRDENIRCLLLAATGGKESDAQVREALKVWSRNTGCKRVRVIKPVATAKEIVDRNNHPYKWMKPAEIAYLDILEDVEGNWFHYTVDIWAAQSGESDSSEKEHPDARLLMRLFKDDTIQLFELDNNRNPIPGSNKIKRIVSLEPSVPRLRLAGVNEAGDYMKRHNDGNDQFRLDFAGIAKLRHRRARKVIIDDLGRVKTVPHGNI

SEQ ID NO: 6375 - protein, 1002 aa, unidentified
  REGION 1..1002: note = Description of Unknown: Cas Enzyme sequence
NQERRQARLRRRQLRRRRQRRLLLSDQLCMAGLLPPRQSSDWDQIMKRDPYDLRRRAFERAFEGETLSPHEVGRAIYHLAQRRHFRGRDVDDISDTLEDTADETEDEKTKPAREQTIETLRREGKTLGAWLAAREPHERKRGEHATREVVEREFDTVWRPLVPEPFMSSVRDAIFTQRPVFWRLKTLGKCPFVPEASPCPKGSWLSQQRRMLEKLNNLALAGGNQRRLDREERQAILSKLETQVSMTWKEVRQTLAPLYRARGKPGEEKSLKFNLEEGGEKKLLGNRIEAQLADIFGSDWQKHPRKQEIRDCLPQQIWQADYKQVGDQRVVILPESERGKHREKIKQDFVKEFGLSNDQAKKIRDMKLPTGWEPYSVEALRAMLPELEDGTRFGELVNGPDWKEWRSKTFPDRERPTGEVFDRLPSPAEREEREYNASLRNPTVARTRNELRKVINNLIDLYGKPDLIRVEVARDVGKSKRQRQETNDGIRRQENRRKKARKELEDRKIIEPTRADIEKFMLWEECKQQCPYTGDSICFDALFRTGDFEVEHIWPRSRSLDNSFRNKTLCRKDVNRKKGNRTPREFFNDNKEEWDAFVKRLDRMKAPKKPKKGETGMSPGKIKRFLAHSIPEGFAARQLNDTGYAAREALTYLKKLWPDQGPEAPVKVSAVSGRVTGHLRRLWGLNNILADDGEKTRADHRHHAVDALTVACCHPGMTQKLSQYWQQKDDPCVVQPHLPAPWKTIRSDAERAVRDIVVSHRVHRKISGQLHKETIYGDTGSEKAAEDGKTYRCFIRRKAVEELKKSESGKSGNRIKDIVDDGVRSIISDWVDRHGGDPKKAFQNGYPKRGRKGPEIRKVRLRVKEQLKLMTRASTGYADLGKNHHIAIYRLADGTVDYDVVSLLEASQRKARREPVVRRERGDGTQFVMSLSLGDSLQLTENGKIRLKVVKSVWAAGRVVMIDHDDAKGVTKSRPGASAILLKYKGKKVSVDPIGRIRPAND

SEQ ID NO: 6376 - protein, 920 aa, unidentified
  REGION 1..920: note = Description of Unknown: Cas Enzyme sequence
IYSHAKKIRQGNHKDNNLDDVIKTRKELENAINSNDLPVKFKTKPNYETNELFPENSFLHLVCRYYKQRQRAREGRIFIHPEYRFVKGRGYEKTGRFDDSKHLLTYCNHKPRQKRHQMLMDLASLLQVSPDKLKKSAKGLEGETVDEQLHEWLSKIKHLKTNCDQAAKEQKERRGRLKSEIQRIFGIIHRKKNLSTNLSNKEIKNILKDSNVEEANKLYSFCVRAIDLCLNITKPLYGDSKYHKWEEKLNKNPASAVYLLAQINNIAFKERSGYANTCSVCSMDNAQRMQMVENQDDKDTTAKTQRLPAIPTRIIDGAVMRMALIVGGTIANDKWTKIEKELKQNNEVCVPIITESNQFEFEPSKEELVKRQRISPRKGKVAERGREQKIYQDKENRIKQVGDGDYICPYIGKNINENEGEIDHIIPRTSKWGTLNDEANLIWASKMGNHHKDNNNLSLDNLHKDYKKVVFSNKTDDEIKNWIEDQIGDGSGEYFTFGRYRSFIDLAPEQQKAFRHALFLVGDPLRNKVINAIDHRNRALVNGTQRYFAEVLANKLYKLAKKKNYEHLLSFDYFGVDATPGSRGDNIYELRKMYERTDSKISQYAKSKELKQLAYSHLLDAQMAFLIVVDAHRKEGGLKLQIDDTIREGVYFDGANNRDIVIGVKLAEILEIKLGSRVVVTVAQAESGELSQEMFRVSGIYHFAGEEMNSGMAFVRLEKAQQMLGIGKGVHEIAFKFTSLAYAQDPALPFWDTYSQHGNEALSWMDILPQLTLVLEMSKYSKYIMGVVLFGVVIFGIINTLFMSLYERMFEFGVLRAVGTRPFGMARIILFEAGALAIVSIGLGAILGFVLTSIFSHVGIDYTGIEMMGVTIQESIRPTMVVQQFIFYPVWVFGFTIIAGLYPAGYVAKMAPVDAMRRSF

SEQ ID NO: 6377 - protein, 1348 aa, unidentified
  REGION 1..1348: note = Description of Unknown: Cas Enzyme sequence
MKKILGLDLGTTSIGWAFVNEAETNNESSSIVRLGVRVIPISTDEESNFMKGKATSINADRTLKRGARRNLDRYKQRRDALIDILMDKGFISKGTLLNEDGKGTTFSTYKLRAKAVHEKISKEEFAKVLLMINKKRGYKSSRKAKSEDEGAAIDGMAVAKQLYDNNLTPGQYVYELLKNGKKYIPDFYRSDLQSELDKVWRFQESFYPDILTEEFKEQIKGRGKQATSKIFLGKYQIYTAENKGKRDEVKLQSYKWRSEAISIQLTKEELAYVLVEINNNINASSGYLGAISDRSKELYFNKQTVGEYLYEQLKINPHSRLKNQVFYRQDYLDEFETIWEKQKEYHAELTEEFKKEIRDVIIFYQRRLKSQKHLISNCEFEKYHKAIPKSSPLFQEFKIWQILNNIEFRNHKTRERSFLGQDIKEFLFNELNIKSKLSSTEVLRLLGLNPKENELNYKEVEGNSTNAELYKVYQKILEFEGEEYDFSKMKADKINDIVSEKFLELGIDTNIMIFDTEKLTNDFDKQSAIQLWHLLYSVEDEQKLIEKITDKFGFKNEYAKLVANIPLQADYGSLSAKAIRKILPSLRNGNSYDIACNDVGYNHSSSLTKEELANRELKEALELLPKNSLRNPVVEKILNQLVNVVNAIIKDETLGKPDEIRIELARELKKSAKERGEMTQNINRATIEHDKIRLLLKTDFGISKVTRNDIIRYKLWKELESNGYKTIYTNTYVPKEKLFSKEFDIEHIIPKARLFDDSFSNKTLSVRQINLDKSNDTAYDFLKEKLSESDFHQYLERIEKLFKDKVITKAKYNKLRMKLSEIPEGFIERDLRNSQYIAKKAKQMLEEVVRTVNTTTGSITDRLRSDWQIINVMKELNLPKYEKLGLLETIEGKNGQAEIRIKDWTKRNDHRHHAMDALTVAFTSYSHVQYLNNLHARSDKKGAIYGIEQKYLYRDKNNKLLFKPPMPLVEFRSESKKHLEKILISFKAKNKVVTRNKNKIKIKGKDNFKTKVELTPRGQLHKETVYGRIEQYATKEERIGTKFDLEKIKHVAKQSYREALLTRLAEFEGNPKKAFGGKNAPSKNPIYLDDAKTIELPEKVKLVWKEDNYTIRKDISPDLKIEKVIDVGVKTVLQKRLSDFGGDAKKAFVNLEENPIWLNKEKGISIKRVTISGVSNAEALHHKKDHHGNYILDQDGNKQAVDFVSTGNNHHVAIYRDEKDNLQEEVVSFYEAVHRINAGLPVINKEKEGLAFLFTMKQNEYFVFPSGDFNPNEIDLLNFENASLISPHLYRVQKIATKDYFFRHHLETTVENVQKTKSITWKREGINGIEGIIKVRINHLGQIVKVGE

SEQ ID NO: 6378 - protein, 1098 aa, unidentified
  REGION 1..1098: note = Description of Unknown: Cas Enzyme sequence
MPYNYEKGLTVGIDVGTTSLGYSVARQINGFTKVLETIGTVRFRESVNSKGTESLASERTKHKSVRTNLKRKAGRKKDLKKTFLENGLVSLADIQGLGSLDSLGLRASSCNNKVSSRELLSALIHMSSNRGFKSNRKDIASNEDSNSIYEGSDKTDTVGVNELHLEMKLRKCQTVSQLALLKRMDNKKFSFYRLRSDIEHEFDLLWDRQATHNSRLDDNLKSVVHDIIFYQNPIPKQTDLIGSCSYIDGERRACKVESAAQEFIYLKYVNDNLYKHDGIESQALTESDISVITTFCKTKVDNKAKKDFENNSLTSALTFPIAFIGLSKAFKKETGCELLTKRVKSKNGKDEFGKVPFSGVEYFKALLSCHGYSEFVSDKDIDNLITLFVEEAEESVIINAFKGSAESFLKLSEEKVKSFFDIAFVCLSFKSRFISLSFEAANAINVLMKTGMKEYEATKSIGYVNKKISKNSYAYLIPYNQFISENNLTPITNNAVKRSMKEIRRVINEIIKKYGMPEFIHIELARETDKAPSKKAHNDFIAKNNAEKELAIAYYTERGLVIENGELDETLLKRHKLWIECNKVTPYTGVPIPAPDDRRFEIEHMIPRSLGGSDSIHNLTLATIAENAFKGERAPFGAYADNAPLYEAMLERVKAFNGANRDKKLNIFKAHGGILDNFISEESILRHGVDTSYIAREVRNYLSTIVAPEKIFSIRAHHVAMISDYLNAHKISRKMTMDVLKSDYQTNIDFSDKDTVKAVKRVIGRKGRQTNCHHAVDAAVIALITPKFLAKYLKSLEYKYKNMTNPVLRNESYMGTMNNLVKEMNISWSSPKETIGQLHDESIFGIRGNESDYKITNAFNRDVFGFKTKILEMTKVAKTSIFKVEKGVKKFLPEKDIIKITDKRIQGLYREWMAQGDLNTPLLVPTYRNGKRIVSRCHKVTMTHEKANLISLGKGRYASNSLTYCLAVLKNKVTGKIVRTVITGIEAMELNGLALDERLSCDFELLSTFKTGDLIKYDDGDISIISTINSKGKIVFYSSLRANELSIETYDDKGTVKARGKRAQGRSIAVSSKNINLFKKISMSPLGDIYETGCGDIK

SEQ ID NO: 6379 - protein, 1077 aa, unidentified
  REGION 1..1077: note = Description of Unknown: Cas Enzyme sequence
MKKPYTIALDIGTNSVGWVVVTDDYRVPTKKMKVLGNTERKTIKKNLIGALLFDSGDTAEGTRLKRTARRRYTRRKNRLRYLKEIFTEEMAKVDDGFFQRLEDSFYVLEDKEGDKHPIFANLADEVAYHKKYPTIYHLRKELVDNPQKADLRLIYLAVAHIIKFRGHFLIEGTLSSKNNNLQKSFDHLVDTYNLLFEEQRLLTEGINAKELLSAALSKSKRLENLISLIPGQKKTGIFGNIIALSLGLTPNFKANFGLSKDVKLQLAKDTYADDLDSLLAQIGDQYADLFLAAKNLSDAILLSDILTESDEITRAPLSASMVKRYREHHKDLVTLKTLIKDQLPEKYQEIFLDKTKNGYAGYIEGQVSQEEFYKYLKPILARLNGSEPLLLKIDREDFLRKQRTFDNGSIPHQIHLEELHAILRRQEVFYPFLKDNRKKIESLLTFRIPYYVGPLARGHSRFAWVKRKFDGAIRPWNFEEIVDEEASAQIFIEKMTKNDLYLPNEKVLPKHSLLYETFTVYNELTKVKYATEGMTRPQFLSADQKQAIVDLLFKTNRKVTVKQLKENYFKKIECWDSVEITGVEDSFNASLGTYHDLLKIIQDKDFLDNPDNQKIIEDIILTLTLFEDKKMISKRLDQYAHLFDKVVLNKLERHHYTGWGRLSGKLINGIRDKQSGKTILDFLKADGFANRNFMQLIHDSELSFIDEIAKAQVIGKAEYSKDLVGNLAGSPAIKKGISQTIKIVDELVKIMGYLPQQIVIEMARENQTTAQGIKNARQRMRKLEETAKKLGSNILKEHPVDNSQLQNDKRYLYYLQNGKDMYTGDDLDIDYLSSYDIDHIIPQSFIKNNSIDNKVLTSQGANRGKLDNVPSEAIVRKMKGYWQSLLRAGAISKQKFDNLTKAERGGLTQVDKAGFIQRQLVETRQITKHVAQILDSRFNTEFDDHNKRIRKVHIITLKSKLVSDFRKEFGLYKIRDINHYHHAHDAYLNAVVAKAILGKYPQLAPEFVYGDYPKYNSFKERQKATQKMLFYSNILKFFKDKESLHVNSDGEEIWNANKHLPIIKNVLSIPQVNIVKK

SEQ ID NO: 6380 - protein, 1202 aa, unidentified
  REGION 1..1202: note = Description of Unknown: Cas Enzyme sequence
MEKILGIDTGTNSLGWAIVNKSSEGKYNLLERGVSIFQEGVKIDKGIESSKAADKTSHKSQRVGYYRRKIRKIRLIKVLSEAHLCPSVSSTELYHWRMANCYPENLDFRKWQLTGDEQHNPFYFRYKCLTEKLDLSVQANRYLLGRALYHINQRRGFLSNRKMQDNEEEGKVKTSISKLSEDMSMVGCAYLGEYYYKLYLEGKKIRNHYTSREEHYLAEFHAICNKQCLDQELVNKLERVIFFQRPLKSQKGLVGHCLFEPKKTKCPSSHPLFEEFRMWAFVNNIKMQTPADSELRFLSKGEKNRILSKFYRKSKPQFTFEDIAKELAGARNYAYYKKPQGKPYLFNYQMDTSVSGCPVTSGLRDIFGEEWLSAICEVYDKGSGKTEIQVLNDIWHVLFDFSDKEHLVGFAKQHLQLNDEDAKKFANIKVNSAYAALSLKAIKNILPYLRRGMIYSHAVFMGKLCDIVPNEIWSDEEQRNTIIADIIEEINANERGVADVRTPAQCIKDYLIYKFHLPEKTVELLYHPSMMESYAKVPDNQNQLGSPRISSLRNPMAMRSLFSLRHLINTLLREKKIDRNTTIHIEFARELNDANKRQALSVFNKANEKNRAAARKEIETLFKSEYGQDIEVTDTDVLKYQLWEEQKHKCIYTGEEICLTDFLGPNPKYDIEHTIPRSVGGDSTKMNLTLCNSRFNRDVKRTLLPSQLQDHELILLRIKEWKEKYEDLQKRIRKIKTSPSMSKEQKDRLIQKRTLLQLECDYWYGKYHRFEMTTVPEGFSRRQGADISVISKYGRLYLKSFFDRVFIVKGLATSDFRKIWGIQNIYEKKARVNHVHHCIDAIVIACIGPYEYSQLAQYYHDKENSKWYGLSKPHFDKPWDSFTADLKDIQNEIIVSHHSPDNMAKQGRRRILVNGKKVLACGDSARTSLHNETYYGAIERDGQVKYVVRKTLDATFKESDVKNIVDDSVRSKVEEAIQRYGFKEAMAGTIWMNEEKGIPIHKVRCYTPTVTRPLNIRLHRDLSPKEYKQQYHVTNDTNYAMALYIGQNDRGKEKRLFNIVNNLQASAYYKTSNKGNDEHFGLVPLSKDDYPLAYVLKKGTLVLLYEESKEELYNADKRELVKRLYKITGLSQAIISGYEYGVITMLHAQEARPAKEIKAKNGAFKIGEEYRPSIVMLHTQIKALCEGVDFEINNLGDITFKS

SEQ ID NO: 6381 - protein, 1077 aa, unidentified
  REGION 1..1077: note = Description of Unknown: Cas Enzyme sequence
MKNILGLDLGTNSIGWAKVSIDDNGNYIKDIKLGSRIIPMSQDVLGKFDSGVTESQTALRTNFRGTRRLIERGLLRRERLHRILHILGFLPEHYDQALGWCKDNTATYGKFIGDEEPKIAWKRNENGKMEFLFMESFNEMLHDFSTRHPQLVANGRKIPLDWTLYYLRKKALNEPITKQELAWILLNFNQKRGYYQLRGEEEEENLTKQEEYYELIVTDVTATDEKHGDETWYDITLENGFIYHRKSKTPLQDWIGKKKQFIVTTEYEKDGVTPKKDKEGNIKRSFRAPKEDDWGLRKKRTEHEIEISKETVGVFIYHHLLAEPYDKIRGNFIRTIERKYYKDELTSILEKQKEFHVELREQTYLDNCIKELYARNTAHQNSLRSKSMTYLLINDLICYQRPLKNKKSLIRNCPYEHYEFTDKTAGEIKKQYIKCIAKSNPYFQELRLWQFVQNLRLYNREEEKDVTAEYLATTDDYAKLFCFLNNRKEIKQETLLKEYFHLKKLKGGDFPIRWNYIENDKNYPCNETRYELLTALNKAGLSHDLISSRKDEYRLWHLLYSVNDPKELAGALRRLNHGEDFINAFMKIKPFKKDYGAYSEKAVKKLLSIMRMGYMWNKEDIDSTILLRIEKILKGDFDTRIKERFERSNYTFKTIDDFQGLPLWVACYVIYGRHSEAGEIQKWKSPDNLLAYINNFKQHSLHNPIVEQCILETLRTVHDIWKDAGSIDEIHIELGREMKSTADQRKRMSERIQNNENTNLRIKHLLLELKNDNKIENVRPYSPMQQEILRIYEEGALLNLSNKDTEYAEISKISKMAQPSPNELKRYKLWLDQKYISPYTGKFIPLSKLFTPAYEIEHIIPQKRYFDDSLSNKVICEAEVNNLKQAMLGYEFIKKCGGQIVHCSTLGNVKILLDEEYKTLVKTYFAHNNRKLKNLLAEDIPDDFLNRQMNDSRYISKIVKALLSNIVRTDDELEETSKFVIPCTGGITDRLKKDWGINDIWNTIVTPRYERLNELTKSETFGHWENKEGKRVFQTSIPLELQKGYNKKRIDHRHHAMDALIIACASRNIINYLNNVH

SEQ ID NO: 6382 - protein, 1381 aa, unidentified
  REGION 1..1381: note = Description of Unknown: Cas Enzyme sequence
MLNRDYYLGLDIGTSSVGWAVTDTDYNLLRAKGKDLWGVRLFSEASTAADRRIKRIARRRNEREKARKAMLKELFSDEINKVDPGFYHRMEESFLWQDDRSEDNQQKFTLFNDRNFTDRDYFKKYPTIFHLRQALLHEAGPFDVRLIFLAIYNMFGHRGHFLNATLDPTKEDLRLDPAYAEMEAAFADCDIALPKIGDQGWAFDLFESKLSQTGKSRTMICEDVASALSITQKDKAAYAVIKLICGRSVPIKGFVSGDILSKEAAVSKICFRSASFEEDMEKIKAFLEERWITAIEAAKAVHDGGLLANILHGATYLSDARVAIYDKHHRDLVRLKRLLRKYDLKDEYHQLFRSAEDSTYSAYVGSVNYHGKARRVGKVRSKDALYKTIEDALKRIPESDPERLVIEASINSEDFLEKQLTGSNGVIPNQVHSRELRQILSNAERYLPFLTERDERQLSISEKIIQLFEFQIPYYVGPLGKAFNGKPGYNVWACHKSAGRILPWNFSDRIDEAASAERFIERMLRKCTYLSDEATLPKQSLLYEKFMVLNEINNIRVDGVRLDTETKQNLYHDLFLGGKRVTRKQIQAYLVNHNITAPESEITGVDIQCNQSLTTLGKFIGVFGDRVYTDEIASFIEDVVFWKTVFGEDKRFVRAKIEQNYPNLLSDAQLNRILGFKFTGWGRLSRNFLEMEGTSKLTGEIKSIINFLWDEQVNLMELLSDHYTFTDQLNQRLNQLEKPLSEWTIEDLDDLYLSPAVKRMIWQTMKIVDELQQVLGHAPRRVFVEMVRGEGEKKRTTSRKEKVKQLYKSIDDEAGIWRNQLSDRPESDFKRKKLYLYALQQGRCMYTGEPIDIHDLMNDNLYDIDHIYPQHFIKDDSLESNLVLVKKQTNAQKGDRPLTHEIQHAQRGFWKGLVDKGFISREKYLRLTRRDLAFTQEEKLGFINRQLVETGQATKVITQILQGALGKDTAIIFSKARLVSDFRHSFDIPKVREINDLHHANDAYLNIVVGNSYYVKFTNNPARFLSDAEKNPTKEEYRYHLSKFFNFDIRSGRETAWIASKKDGEEFGTIVTVRRTLKRHSPLVTKKTEEGHGEFFNETIYSVQDESKANGYIGIKTKNSPLADVMRYGGKTSVSTMGYALLDYEKRGKHFKLLEALPSILGERRAITEEMILNHVKNSTMLKEAPAVKQSLRVCLPFIPLQTMIRRNGYTYYLGGKTQKQHYLYNAVQVALDDRWVRYLKKMVKAKKASDYGETDSAGHPILTSDRNIAFFKLIIDRLERPPFSHRNNNIAEKLRLGLNRFEALELPKQVELLLGIIANWSKMEKVDLTGLKRAGENDKSFTPSAGIVRGASTIKEDETAVLIYQSVTGLYRIERDIMTL

SEQ ID NO: 6383 - protein, 1339 aa, unidentified
  REGION 1..1339: note = Description of Unknown: Cas Enzyme sequence
MKKNENYYLGLDIGTSSVGWAVTNSQYDILKFNGKYMWGIRLFPEANTAQERRMHRSSRRRLKRRKERIQILQMLFDKEIAKIDSGFFQRLKDSKYYKEDKTEKQINSIFHDKDYSDKEYHQDFPTIYHLRKFLLEGNKPKDIRFVYLALHHILMHRGHFLFPDMEVRNVTEFSNIFSELKRYLYDEMDIEFEWKKGKLNEVEGILKDRNLAKSEKEKKLCGLIELEGKIDNQRKAMIGMMCGCKKKFSDLFQNENYKELEISSFSFAESSYEEKRDELEGILAENILCLDYLKTIYDWGKLSDILQGEESISIAKVKSYEEHQFDLKHLKTILKLYSQKEKENVFRKKEGKYPNYISGKLSQEEFNKGIKKILEEIKSIKQEDREVFDILLKRASNNLLCPKQVIKENSVVPYQIHKFELEKILKNMADFFPILKEKKEGKTLSEKIISTFTFRIPYYVGPLNQNSDRAWLVKNKDEKIYPWNFEEMINLEESAEKFIQNLTNKCTYLVLEDVLPKSSILYSKFMVLNELNNLKINGGAISVDLKQKIYLNLFQKYKKVTLKKLKEYLKSEGIHIDASTQITGIDGDFKSSLGSYLDFYNILGDKVKTDFGKKLIENCIFWITLYTGEKKLLKNKITANYKEELSEEEIKKIVNLKYKDWGRLSYAFLEEIQSASLETGELRNIIQMMWETNNNLMELLSSNYEFVTEIEKRNSIGGSEKEFNYETILGDSYASPSVKRMIWQSLIIVDEIKKIMKKTPEKIFIEMARQEDMKKERKESRKSTFLTLYKSIKEEGRDWIKEIENWSDSEFRSKKLYLYYTQMGRCMYTGDKISLDQLFNKNIYDIDHIYPRSKTKDDSIENLVLVKKSINEDKEDEYPISKKINISPEQKEFWKMLHSKKLIGDKKYERLTRTTEFTDEELSNFIARQLVETRQSTKIVADILKNLFPKTKIVYVKANLTSDFRKNFKILKSRDINDYHHAHDAYLNIVTGNVYNIKFTDNPRNFIKDKKLEGKKYNLKVEKIFEYRKESESFWNPKTMVAKIENYIFKKRPQFTRYSFEQHGGFFDQNIVDKESCKRGTGYIPIKSSNVALSNTSKYGGYGSVTGTYFFLVEHTMKGKRIRTIEMMPLYLSKKIRSEEELEKYCKEKLELQEPSVRLSRIKYNSLLKINGFPYHITGKTNDSYWIMSAIQLLLSKNYYEYLRKLYIFCREERLEEEIVGEKNIKLYTCILEKLEKSIYSHKFLNINYNGKSKNLKDILESEKEKFLLLSGKKQAQILIEIFTLLESNNFGANLESFGCGKKCGITKINKNIDKLEEVLLINQSPTGLFENSMDLKKV

SEQ ID NO: 6384 - protein, 1152 aa, unidentified
  REGION 1..1152: note = Description of Unknown: Cas Enzyme sequence
DALTKQLDKEIVAFVIAEINGQIHNSSGYLGAISDRSKELYFNQWTVGQYLYKQLIDNPHTRLKNQVFYRQDYLDEFEKIWDTQSKFYPKELTPILKEEIRDTIIFYQRKLKSQKGLISFCEFEQEQKVINGKTKTIGQRVTPKSSPLFQEFKIWQQLHNVTLRNKETNEIINLAAEQKEHLFEELNLKGKLSNAQVLKLIEYKPKKWELNYSELEGNNTNKALYNAYLDIIDIAGYDIRNELKIKLNKDDIELSDLDVNASEIKEMIFSIFKHLGINTEILEFDATLEGKAFEKQASYQLWHLLYSYEEDNSPTGLDRLYDLLQKKFNFTLEQAKCVGNVLFQDDYGSLSSKAIRKIFPFIKENNYSSACEYAGYNHSKHSLTKEENEKRELKSRLTILTKNSLRNPVVEKILNQMINVINTLIDGENEKLVAQGKEPNFQFDEIRIELARELKKNAKEREELTKSMTQGKTDHEKFIKILQKEDGIKNPTRNDIIRFKLYNELKNNGYKDLYTNEYIKRQDIFTKEYDIEHIIPQSKLFDDSFSNKTLVRRNVNLKKGNQTAYDFILSEYGQEKANEFETRVTDLFSLGQTEGISKAKHKKLLMRENEIGEGFIERDLRETQYIAKKAKSMLFEITRFVVSTSGKITDRLRDDWGLINVMKELNLQKYRDAGLTEFIEMKDGNKKEVITDWTKRNDHRHHAMDALTVAFTKHNHIQYLNNLNARKNENAKKHSTIIAIETKETHIEKDNLGNRKRVFNEPIPNFRNIAKAHLENVLISHKAKNKVVTKNINKISGQKVGQQTLTPRGQLHKETVYGKIRQYVSKEEKVGPKFTVDIIEQVSNPTYRNLLLKRLEENNNDPKKAFGGKNALNKTPIYISLEKDTKVPEIVKLVWLEDDYTIRKEVSPDLKIDKVIDEGVKRILQQRLKDYDNNAKTAFSDLDKNPIWLNEEKGIAIKRVTISGVKNALPLHIKKDHLGQPILDNKGREIPVDFINTGNNHHVAIYEDENGKIQDTVISLFEVVERVNQQLPIIDKTLNQHLGWKFLFTMKQNELFLFPTDDFNPKEVDLFDKKNYAVISKHLFRVQKFSKVEYGNSAVRDYVFRHHLETNVNDIKELRDKSHIILKSTSILENIIKVRTNHLGEIVHIGEY

SEQ ID NO: 6385 - protein, 1003 aa, unidentified
  REGION 1..1003: note = Description of Unknown: Cas Enzyme sequence
MRNYSIGLDIGTASVGWVCLDENQRIMKYNNRFAWGTHEFEAADVAEARRMKRGARRRYNRRKKRLQLTQALFIESIKEIDAKFFDESTTQHFWKNNNQFENRTLSETLKKLRMNPNAYPTMYHLRQALLTTNKKVDIRLIYLAIHNLVKYRGHFLNEGQGWHTKNIALDEQLIEILTYYNGLIQTEHPVTNLDEIVALLLNRELTKSDKQKQIMTKLPKAYTEVMKLIVGNKVSFSKLFPESDNITQYIDERSAATINTADFDEKIAVLTEEEHILIELVEPLYQNIMLYDLLQGEPCVAAAKVKSFKQYTADLRQLKELVNAVADEATYRKFFITPKRQQNAFKAKPDYTVLCELDRFNKDKKYAEKFYKNCKQVLQEGKVSASLTTTEKIDEVLRRIENEQFLVKQKGIQNASIPHQNNVYEAQQILRKQQAYYPQFTADFIQKVVDIIAFRIPYYIGPLVQGENKGAFGWLVRQHETGNITPFNFEQVVDKAASAEAFITRMTNTCTYLKQEKVMPKNALLYQYFEVLNELNSVQIREASEPANRKYRLDPQVKIWLVDNVFKKYKIVTHKRLLDALKKYEGFDVRHKTVFGTQKEDRFASNLSTYLTLQAIVGDVDIHSKMLTDIVEWATLFTEKDIFMQKVKHSYPQIGEPELAQLTKLNFTGWGRLSQKLLAEVPINTNGHTVIEAMTQQNYNFMELLAPRNSNLAQKIEALNGKRLTENKKIQFADIEALAGSPALKRGIWRAIKIVEELTKIFGEPTHIMIEVAREEGKKKTTTSRQKLWQQMIKNKDIALLSQEAGITEHTNFRNQRVWLYILQHGKCLYTGHALDFTNLSNYDIDHILPRNFVKDDSIDNLALVLPEVNKKKNTNASNLMPLNIVEANQRYAMIAFWQKLKDLGLMSSRKYSRLMKEKFDDVDKEQFIARQLVETRQIIKNVKDLLQERFGEETTIHLVKAGIVSQFRKSLELPKERNYNNKHHAIDALLTTVLIQFIIKKY

SEQ ID NO: 6386 - protein, 1040 aa, unidentified
  REGION 1..1040: note = Description of Unknown: Cas Enzyme sequence
MIMSKKILGLDLGTNSIGWALLQHSFESKEGEILGMGSRILPMPQDVLGKFDSGQSISQTAERTGFRGVRRLLERDLLRRERLHRVLNILGFLPKHYENEIDFEHRLGQFIKGREPKLAYKEVETKKFEFIFQKSFYEMVEDFKIHQSSLVADGKKIPYDWTIYYLRKKALTQKIEKEELSWLLLNFNQKRGYYQLRGESEVEEKEGKLIEVFDETIVDIEKIDSCNYKIRLSDGTTYTESSQTQISFLGDLREIELTTDKNDEEKNPIKKVSFLKSLQVINCKNTDEIDRNNLMSFEIELENGLKFIKKQGKEIDWAGKTKDIQFEYTITDKDCKQRVFAPNQMSWGLVKKKTEQDIKEGDKPIGTYIYDTLLQKPNQKIRGKLIRTIERKFYKDELKQILEEQKKHHPELQNTALYKVCLEELYAFNDAHKNSVANRDFTYLFMDDIIFYQRPLKSKKSLISNCPMEQRQYKNENGELKTQPLKAIAKSHPLYQEFRLLQFLKNLKIFKKDDKQDIDVTNEFLPAEEDRIKLLDWLNDKTEIDQKAFLRYFDLKKNAQQYRWNYVEDKKYPLNETRGEILKRLHKLNIPNDFLSKDKEEKLWHILYSVEDKEEIVKALGRFAKQNNINEEFVEIFKKFPRIEKEYGAFSAKAIKKLLPLMRFGKYWDESVIVNNMELFQKNIQEVILKINDKESRRDSEKQSTSKIKEKLFNLDADLNAFQNLSKDTASYVVYKRHSEIGDVQYWKESKDIELLKQHSLRNPIVEQVINETLQTIKDIWNEYGDGKEGFFDEIHVELGREMKNPAAKRESMSKQMTENENTNLRIKALLIEMMNDNDVENVRPYSPMQQEILKIYEEGVFGNETNENDLEEIEKIRKKNQPTSAELKRYKLWLEQGYRSPYTGKIIPLNKLFTPAYEIEHIIPQSRFFDDSFSNKIICEAEVNSIKDNQLAYEFIKNNPGLKIELSRGEFVELLNIPDYEENVKKYYAQSKNKMKKLLMEDIPEAFIERQLNDSRHISKVVKSLLSNIVREAGEAEGM

SEQ ID NO: 6387 - protein, 1112 aa, unidentified
  REGION 1..1112: note = Description of Unknown: Cas Enzyme sequence
MKKILGLDLGTNSVGAALVNMPESIADFGKEGNIEWVGSRIVPVDAQYLNKWEAGSKAETKAASRRIKRGSRRLKQRYKLRRTRLIQVFKALGWLAENFPEDFKKKMNNEEDFKFRISEYLPFEKDTIEKATKLLGTENKKGELAFSEDWIIYYLRKKALIEKISIAELCRITYMMNQRRGFKSSRKDLKDENVVEIKKVVELTIINVLEKGEKNKKKVFEVIPNDESIGSWEELKTKKPEWIGKKNTYVITWRNGKRLKPELVSPEDYEPAMIAMDEQMNERSEYPGEFFFNNLVSDKSYKIRQFPVYRKKYKAELEAIWTKQIELNEELKRLNTDKNILQKLAEKLYPTLSKTQKPKLKEILSNNLLHLISDDIIYYQRDLKSQKSSRGECQYENHRGIDGEIYGIKCAPKSSPEFQELRIWQDIHNIKILQKSAVIDDYEKVDIDVTKDFTDDTIKEKLFELFDKSREISQQNIFDEINKHKPGSNLRNETYKINMFFNEEKRLQGNETKEYFRRIFRKPECNYEIAGENILSDRDKFYKLWNISYSISLNDEEKSKQAIFKALTEKNNKRSKAKNIVFGLPENVAKAIAVSPDIEATKKYASYSSKAIQKLLPLMRCGKYYDKTKITDKIKARAKEIYQRLEDINFNVKRIHEVADDDVQKQLLKSFINKENLLTGLNTYQACYLVYDRHSERTDDRKYSQPSEFNIIEELPNNSLRNPVVEQVIREALFVVKDVWEKYGQPDEIHIEMGRDLKKNAKERKRATENSAANFEEKKRIKALLYELLNDGIEQYIDTDDEGEFFDTPKIVKTTFKVKPNPNNPTDIDRFRIWKSTSGLRDFDFEKKVKDEKIPKNQEIKKYALWLSQKCISPYTGRIIPLSKLFDQGQYEIEHVLPKAKIKNDSFDNLVISERGVNKAKDKELAAIFIKSKNGGCEYQGTKYKLFDYSSYVEHCKRTFRGKKLQNLLSTEIPDDFISRQINDTRYITKKISELLYPVAKNKDAGIVFTIGSITSELKKEWGLQKEWKKLIKPRFERLEKINNASYIQKNKTNENDIDFHIPENPDLDNKRIDHRHHALDAIIIAATTREHIRYLNRLSAANNEEEYKKIQ

SEQ ID NO: 6388 - protein, 1035 aa, unidentified
  REGION 1..1035: note = Description of Unknown: Cas Enzyme sequence
MNLHLWASTVLWGRPKMTDVLRFSFDIGTNSIGWAVFDAHTEAASLPLSAQSSVSLKGLRTAGVRIFSDGRNPKDGSSLAMMRREPRAARRRRDRFLQRQRKLIALMIEHGLFPAAQGERKRLEKLNPYSLRAKGLDHALTPHEFGRVLFHLNQRRGFWSNRVTDGADKETAVLKQAAKRLDETLQRDGARTLGEFLNKREVKGLSTRFRITGSGKDAGHEFYPTRGLIDAEFQTLWAKQSQYHPNQLTKFAKDALHNAIFHQRPLKAVKPGRCTLNPDEERLPAALPSVQARTIYQTLNELRYGQRLSLTQRLDLTQRDALALALLKGKTLTFSSIRRTLKLPANTRFSLEDTRKDFVGCGTAKRLARADVFDKEWHSFSLDRKDEIVRRLLTEVDEETLVAWLGAETGLSDEKAHAAAGATLPDGYGRLGATANAAVLEELIEDVITYSAAAERAGYHHSDFRTDTRLDKLPYYGLALERHVAFGTGEPKDSDEKRYGRIANPTVHIGLNQLRRLVNKLIKAHGRPDDIIQELARDLKLSKKQKDELQKRNNRDEEANAQRRSKLAELKVPTTGNNLALLRLWEEQRNGLNTFCPYSGEHISLAQLFSDEVEVEHILPYSRTLDDSMANKAVCMRHANRDKGNRSPFEAFGSRPDWPAIAELAEKLPPNKRWRFAPDAMEKFQTEGRDFLERQLNETLYLSRIAKTYLESVCPNTWVSNGRMTALLRGKWGLNSILAGDNRKNRDDHRHHAIDAVVIGCMSRSLLQEIAFRAGQLEANNDPRIVTDIPEPFSGFRDKVRDVMRTIIVSHKPEHGKSGALHEETAYGIVRNEHELTIGNVVHRKSLAVLNANEIDRVRDPALRLKLQAVRDATGDDAKALLEALLHFADEEAKATSPTSGKSRMPMRHVRLLKPEASNVEISDRHTGAAYKAIVPAENWCMDIVDFKRPDGTHVWKGFATNIFEVNRKGWRPRWEKEEKGGKLVMRLHKGDLVEINDKDGERQIKRVVRLNPAANRIFLIGHYDAGDLQKRHDD

SEQ ID NO: 6389 - protein, 1036 aa, unidentified
  REGION 1..1036: note = Description of Unknown: Cas Enzyme sequence
MSVTPSADPHLVFGFDLGSNSIGWAVLEENPAGQAQALRDMGVRIFPKAVEEKTPTPKNHKRRQMRLARRVLERRARRRRRLQNYLILLGLLPDSVHDVRERERVLNTLGDPYALRAQALEQALSAHQLGRVIAHLGMRRGFQSNRKTLLSDMLDDPDVQDMLAELEQEDPQGHAASERERIKEEGQFKQAISALQADIHQAGCRTLGQYLASLPSAQRKRGRRIGRDMIRDELRAILAAQRPHHAGLDDAVCEEIERIIFHQRPLRWDRASIGACSLEKHRQRAAMARLEYQEFRLLQDINHLRYDRPCSHPDTGEILGLNLALTEQDRTRLLDKLASQQDMSWSAVKKLLGLDKTITLNLEAGSKKGLPGNRTASKLANTLGADAWGALGASGQAELVEDLLKFEKKSALKKRLMTHWALPARTAIALATLELEPGHANLSLKAIRRLLPFMRQGMRYDQAREAAGYGYSRTPSDGLERLPRPDDLRNPVVNRALHEFRRVCNALLAEYGRPHAIRIELPRELAMGGKRKAEYEKQQKRNQKANEDANTQYQTIRQANPQLGLAERVGRLEQLKYRLWRDQNERCLYSDKPISMTELFSAEVEVDHILPYSRTVDDSYMNKALVMASENRFKGNRTPYEAYSGQPERWERMVQCARQQPPAKRERLLRQELSGVDDFINSQLTDTAYLSRQVLAYVQLLGSAVDVSVNKGVLTAWLRRRWGLNPLLGGGEKNRADHRHHAVDAAVIACVNRSLYQKLVKLMREPGARLERIALDAPFAHYRDSLAAHLDRLCVSHAPLRKLSGALHEETVYAVQRGPQGEPRVVYRKPLDASLKLDKLVDDGLRRQLQDHLARFNNHAKQAFAPENLPVLHPGHGPVRRVRVVAANSFNPRSFLSLPDRQGQLRKHLPFGSNHHVEILRDRASGKVESVFVTMWEAAQRAHQHQQALVQTKHGADKVFLMALHINDLVLIQQGERQVIYRVQNLDPGGKRLMLRHHCAATLDNKQEELLISLSRLVDECAGKPLYLNVLGKPLP

SEQ ID NO: 6390 - protein, 1072 aa, unidentified
  REGION 1..1072: note = Description of Unknown: Cas Enzyme sequence
LTRRKRHRVERVLDLFDKYNIETRFDNLNLNPYELRVKGLNEELSNEELLAALRNIVKRRGISYLDDAEDDSNNGKTDYAKSIQENQELLKTMTPGQIQLERLEKYGQLRGDFDIPGENGEPHRIINVFSTSDYVKEARRILETQKNFNAKVTDEFIDKFLEILTSKRRYYIGPGNEQSRTDYGVYRKNGQTLQNLFGILIGKCSFYPDEYRAAKASYTAQEYNFLNDLNNLTLPTETKKLSTEQKKTLVEYAKSTAVLGPDKLLKEIARVVGCKKEDIRGFRLDNKDKPDIHTFEVYRSLAKLESLDIRNLTREKLDGLANILTLNTEREGIEEAIEKKFENEFTPEQKNELIKFRKEKSQLFGKGWHSFSIKLMLELIPELYDTSDEQMTILIRLGKTIANKKETKRTKYIDENNITDEIYNPVVAKSVRQTIKIINAAVKEWGEFDKIIIEMPRDKNEDDKKKRIADGQKANAKEKSDAEKHAANLYNGKEKLPNEVFHGHNQLATKIRLWYQQGERCLYTGKPIDIHNLIHNQQMYEIDHILPLSLSFDDSLSNKVLVLATANQEKGQKTPFQALDSMASAWPYREFKSYVLGCKGLTKKKREYLLTEEDINKIEVRKRFIERNLVDTRFASRVVLNSLQDSLKAMGKKTKVSVVRGQFTSQLRRKWNIEKSRETYHHHAVDALIVAASSQLRLWKKTENPMFIEYLDGQKVDLETGEILSDSEYKEFVFTPPYQGFVNTITSKGFEDEILFSYQVDSKVNRKISDATIYATRKTKLSKDRTEETYVLGKIKDIYSQAGYTAFRKKYDKDKSVFLMYQKDPVTWEKVIEVILSDYCEFDDNGNEVGNPFERYRNDNGMIRKYSRKGKGPEIKSLKYYDNKLGNHIDITPYNSKNSVVLQSINPWRADLYFNLETLKYELLGLKYSDLSFEKGSGRYSISEKRYLQIKELEGISEKSEYKFTLHKNDLILIRDASSGQEQIFRFLSRTMPNQRHYVELKPYEKAKFDGGQNLIEIFGNVAKGGQCLKSLNKQNISIYKVKTDVLGRKHFIKKEGDKPKLNFNTKSEKNK

SEQ ID NO: 6391 - protein, 1334 aa, unidentified
  REGION 1..1334: note = Description of Unknown: Cas Enzyme sequence
MKKILGLDLGSSSVGWAFVQENEENTTILGAGVRIVSLTSDETTDFQKGKAISINKDRTLRRGARKGLQRFKQRREAILRKFKSLEFISKDFKYAEEGSFSTHQSYAIRSKAATEQVSKEQFVQVLLMLNKKRGYKSSRKVQESNIEGQDMGVELDGMEIAQKLYHQNLTPAQYALPIILEGGDEPEFYASDLTNELKRIVNFQLSLNSKLPHDFLECVLHKSRNATFYYFDKILGIQIAENKGKREEIKKQKFIWRANALKESIEAGILGYILGELNDQISKASGYLGKISDNSKELIINNLTVGQYQYMRLTENPHTSQRNWVFKRSDYLNEFEIIWETQKKFYPELTEELKKEIRDITIFYQRKLKSQKHLISLCEFEARHRAAPKSSPVFQLFRMLQNINNIEIKSDAPLVIDEDVKKAIFEILSYNGTLKNKDLLISLGINHKEYKINFEKINGDLTKANILKVLIKVWENKGYSTEDLSYPLQQQDAHRVLKDLNLPSNLLDFDIELKGNAFDKQPYYQLWHVLYSLDDDVKVVCALTKNFGFTEELAKAMLSVKLEANYGSLSAKAMRKIIPHLADGLIYSEACTIPYKTHSKLSLSNEQNDARQLKEKLDLIKKNSIRNPVVEKVLNQTINVVNAIVASEKFGKPDEIRIELARELRASNEEREMMTKSLSVNTKLNEQVREILEKDFNLTRVTRNDIIRYKLWQETGGISIYSGKPIPASQLFSGKYDVDHIIPQSRLFDDSFSNKVLCERELNNEKDNQTAFSFLEQKLNATDFEQFILRVKELSKSNKIKSTKADKLFLTNENIPENFIQRQLNETQYISKKAREILLDICRNVYTTTGSITDKLREDWGLVDIMKELNFSKYQLAGLTYEEKGKNGERLLKIKDWSKRNDHRHHALDAITIALTKPAYIQYLNNLNANTKSSIQNSLHNKYIERIDGKWKFKSPINNIRGEVKSLLESILISHKAKNKVVTKNINKIKTKSGIKLQSTLTPRGPLHKETIYGEQMVYETSLVSVGANLTEEAILSVANKKEREALLNRLHAFEKDPKKAFTGKNSPAKNPILYDLSKNKEIGNKVKVVSLTPTYTVKKLVGPDLDEKKIQKIVDIGVQRKLMERLAAFGGDPKKAFVNLDENPIYLDKQKKITIKSVKLSGITTATALHTKNSNAINSFPKDWVSLGNNHHVAIFEDDNGNYQDELVSFFTAVTRATAIPGMPIIQRDHPNGWNFLFTMKANELFVFPSDEFNTAEVDFTNPKNYSLISRHLFRVQKLSSRDYYFRHHLETNVEENKELFGLTWKRIRNNNNLKGIVKVRLNHLGEIVKIGE

SEQ ID NO: 6392 - protein, 1053 aa, unidentified
  REGION 1..1053: note = Description of Unknown: Cas Enzyme sequence
  MOD_RES 663..674: note = Any amino acid
TQAKFHNQLTDELKSELRDVIIFFQRRLKSQKGLVSICEFENRKIEIIIDGKKKTKTIGNKVCPKSSPLFQEFKIWQILNNLQIIEKVTNAKRFLEQEEKEILFKELNLKDKISKNDALKLLFENHKDLDLNYKDIEGNRTNASLFNVFQNIIELSGHGEYDFTKLTAHKIIEIVTGVFDGLGFNTALIKFDSNLDGDAFEKQPAYQLWHLLYSFEGDDTPTGIGKLIEKLETHYGFPKEYASLIANVSFQPDYGSLSTKAIRKILPHLKEGNEYSVACFNAGYKHSKDSLTKDEKEKKVLKDKLEILPKNSLRNPVVEKILNQMINVVNTAVDAYGKPDEIRIELARELKKSAKEREELTAAIAKSTAEHEKYKTILQKEFGLANVSRNDIIRYKLYLELEHVGFKTLYSNTYIPKEKLFSKEFDIEHIIPQSRLFDDSFSNKTIESRSFNIEKGNETALDYVKVKFGEKGLEEYLARIEDMFKAGKMSKTKYNKLKMSGKDIPDNFIARDLRDTQYIAKKAKSILEELVKDVVTTTGVITDRLREDWQLIDVMQELNWDKYHKLGLTEIIENRDGHKIKRIKDWTKRNDHRHLAMDALTVAFTKRSHIQYLNNLNAKSDKSGSIYGIEAKELYRDDRKKLKFKPPFPLADFRAEAKKHLEXXXXXXXXXXXXLISIKAKNKVVTANINTTKKKGELNKKKQLTPRGQLHLETVYGSIKQYVTTEIKVGANFNEELIATVANKKYREALLKRLMEFDNDPKKAFTGKNSLDKNPLYIDELQTYNVPLKIKTVALETIYTIRKDISPDLKLEKVVDPKIKTILENRLKAFNGDAKKAFANIDENPIWLNQQKGIKIKRVTITGINNAQALHSKKDKEGQLILDANGNTIPVNFVNTGNNHHVAIYKDENGNLQENVISFFEATTRVNLGLPIIDKSYKEKDGWQFLFSMKQNEYFVFPNETTGFKPHEIDLLNPDNYRLISPNLFFVQTMSKVIYGNSIVRDYKFRHHLESTKNDQKELKNIVYKQHKTLNEFDKMIKVRINHIGQIVSIGEY

SEQ ID NO: 6393 - protein, 1180 aa, unidentified
  REGION 1..1180: note = Description of Unknown: Cas Enzyme sequence
MVKTVLGLDIGSNSVGFALLRLFEKNGEYIFEELESNSIVFSEPNKAEDRRNARSNRRRNQRKRARKKFVRKLFVTYGIAQEAFVENTTNYLNSFVFKDKDVYRLRKKAVNGDTLTKEEFILATYSILTDRGYNNMFADDADEEQGVINESITANEKRYKKNNYLLPSQVLTSKRERLEEVYLQVPVRNKKGDYSNSLDRNMHKIELAKVVQSQCENRDIFTTKEECQKFLDELLNESKVNTPFYQRHLKSFEDMVAYCSFYNAYNSKGTEKRVPLANLKYIEFVLRQTLENYKDRIVDKKGELKTLSTEDIQKVIDFWVGTPSANDIHARNVLNPISKDLQLSMSDKSASHIILNISAHRKLLEVLTKYSIEFKSKDNSFYNNLLLQLYYFKNKSSRIEHIKTVAKNYDKDIEEDFVHELSLLDGLDGFGKFSLRFINEILELVEQGKRIHEAQESIGYFSQYVGMPTYNYLPPLEPNEDDIKWLTENIPYFKKEHLFYQPKVAPKVKRVISVLRLLINQLIEKYGVIDEIRIESSKDLNTKNEQDDISKNQSKNKAKNDAAKKLLEAKNRILTDSNIERAKLFIEQGKCTCLYTGEVITEDEAFDENETEVEHFIPRSVIWINSYKNKILVKKKANQDKSNKHPIVYLKSKGEWENFIGRVKNDTFIDKNKKEWLTNEEIINSVMENEYWQDKFLNDTRTAIKVIAKYLNHYLYPKQKEHGKDEKKHIQSVSGRAIWELKNMWGIHAIMPKSEDGKKDRDTNYHHTIDAFAVGLCGNSAIKTLNNHFKQNENRFQTKAQKEKLKGNVPYTKEGLYIATYLKKIVKKYEANEKYVCPYAKRKTNTKGFKDGNLKLYVAKNTKNGNDVLAEIEKVYIDTSLLEKGNFKERRTDSEVKKEVSSIQDRLQLKQSKISLAIEEYATQLLELRRQDEGIKKEIKKIDEKIKTSKKEEEHNEALKQQIIELRGKRKDTSKKMTSLKCSYPVKGGKKQIVRVIKLTKPKIEETSGDAILFSNRKENSIERLSVSNFKEALKNNEPFVAKENENTLNVQLFNSEDRGQVVGLNYFSSIVNSFPPKINERYKQEKLDIDNALVLYKNDIIKVEDSKKDITNYYIFNGGGNVAGSNNKVSIKNINTNSFEKVSRDGEVKMIKEDMVSPSKTIVVTRVSIDFFGNISEVK

SEQ ID NO: 6394 - protein, 1443 aa, unidentified
  REGION 1..1443: note = Description of Unknown: Cas Enzyme sequence
MTKKLGIDLGSSSLGWFIRENDKIINNGVVTFKTGMVKGQGGYNSPTRDRREARSKRRLIQARKYRKWELLRILIQYGYVPLKKEELEIWSKYRKGKSRKFPESETFLKWLACDFTYLDGGVKYKNPYELRVKAVDFKLSKHEIGRVLYHIVQRRGYKDIGESNKETETQKARREDTGFGKAMVENKIIAKAIKFEFLDKGERARNNYPFRAEYENELLAICKAQGFDVTRNEKNEYRDDFVKQIRKAIIWQRPLRSQKGNIGKCTFEPTKNRCPASHPVFEIFRAWSYINTIKTVTYVDDKKQIKEPIPLDYKKLLLKEVFLKKDKNFKFEVIKKYLDKQFKEKREYNYLNKSTRKYDSTVAGMPVCHGMVRLFGDVISNELDKIHTYNIGSKSHKVFKGYSVYDLWHIIYDFENDYLENFAINKLDIQNEIKKTKKVIDVFNPVVRFKQHSFSASYADLSLKAMCKIIPFLQEGFLYNEAVLLAKIPDLYKDWENNKELIYETLENAKAKYAYQKHIVNISNNLIDKYKALEFEDQYAYKDYSYLLNKKDFQEINAVCISYFGEKTWRDMERKNEIISDVTNNYQAFFRDSDRRYIEMPTLTSILEKEFNNHNIDVSKLYHHSDRKNLYPQPVYSKKYAKDLLALPFIDSIKNPMFNKSMSILRKLINELIIKGDIDKYTEVIIELARDLNDNNKRAAIDRYQNERKNIREQYRQFIMEFKERNPQFSNLNVEENIPVFELWTEQIFDKAYDEKGHITDNMPLSEIRKEKDAIKRYELWSEQKGQCMYTGKMISISQLFTPEIEIEHTIPRSLLPDNTMANQTVCYSRYNSDIKNNRIPTACPNYEDNKEFGTAIKPRLEKWEKIRDNFKKLYEDRTKPFGNENEEKKNRRIQEKHYFRMQYEYWKDKVGRFTATEIKDSWVRRQLTDTQMVSTYAREYLKTYFNKVVVQKGLTTSEFRKIYGFQPEDETKNRKKHTHHCIDAAVLTLIPTNSSKRLKLINELYKSQENNQKIKRKLPDNFPGFNAQKLIRFIDDNTLIINYYKDKITEQTYRNVRKRGKLQYLTKEGKYVLDKNGNKIQLKAKGVTIRGKLFKDTFLGKKRNIVFEENNKPLRKDDNSFVYKTGKEEFTFIKRVPIENAKIDDIVDPQIKELIIQQKQKGVDIREIKDFQGNSIRHIRVKTKAGKKVKDRINYKSRYDYKNAYYSEAGEIPYAIFLTNFDGKIAERKMIPVAIHEVAQVYKDIHKFNVSYYLDKFHPKLKRYSDVKLLKVGQKVFVLKDDDEFEKRKDIDFQIKRMYVISQFKYDGSKIMLKYHLEAQSKSEIDLRIKEIKSNILDEIEKKLNITTISEDLNIENSNDRRKDFEKRKVDFTKRLKAIEEKTNKELAKKYKEKIEAYKTESSQIIKEGETPILGLSRNNWNFLFEDYDFEIDITGKVDWLV

SEQ ID NO: 6395 - protein, 1444 aa, unidentified
  REGION 1..1444: note = Description of Unknown: Cas Enzyme sequence
MTKILGLDLGTNSVGWAIVDEKNNLFSLEDRGVRIFSEGVKKENGVESSKAAERTSYRSARRINFRRKLRKYETLLVLSKNKMCPLSVEEVVAWRKSNFKNYPLNPLFLEWLRTDEKRNVNPYFYRDKASKQKVTPLELGRAFYHIAQRRGFLSNRLDQSADGVIEQHIPNIENIIEGTNSIDELLTEINAYFSDLEILDKKSKELDEGEKKLKTLYKALIDRIKANSSDLEKAKKETVDKLNRKENLGIVKQKISEISQAMNEGGFQTLGQYFFSLYSKDKIRTRYTAREEHYLSEFEFICKKQGIQFIHDEERLPKNRYTGLAKELYKAIFYQRPLKSQKGLIGKCVFENRKSRCSISHPDFEEYRMWAFLNTIKIKTPEDNNLRFLTMVEKQKIIPKFYRKSKEQFYFEELANELIIKGLGFEYYKSVNKDSASYLFNYKAKDTVVSCPVSAYFKNIFGDDWKTKTFTYQTVNKFEKMQTRQVDYKDIWHLLSVSTSNIYLEEYAKTKLGLDKKRALSFSKIKLKKGFAKLSLNAITKILPYLKQGLLYSHAVFMANMQNVVDSHIWNNPKERLRVQNKINDIIKNNRLENSLVIAANGLINDCKLNNYYYSKEAEPLFKKDLSKKLDAVFNQFKVKDKKQEIVEELFSVFVEHLKEHKFIPVKRLETKVIEFLKGENESGEVFCSDEKRLNKLYHPSDVEVFKKKILRDEMGNERLVLGSPIISSIKNPMAMRALHQLRKVLNTLILEGKIDSATQVHIELARELNDSNRRKAIQDFQTENKEKRKIYTKEIKELYYAETNKEIEPTEDDLLRYQLWIEQNRCEIYEEGHSISISDIIGSNPKYDIEHTIPRSLSQDNSLMNKTLCSKGFNREIKKQRLPVELENYTEILVRVDHWRQEANRLSLEIDQITKSIRATATKEAKDKKIRRRHYLTLKRNYIKGKYDRFIWREPRAGFKNSQLPDTGIITKYARAYLKSYFNRVEVVKGGMVSEFRKIWGLQAGYIKNGNKYYEPKDRNKHTHHTIDAITMACMTKNKYNVLAHAWALEDDPEKENYTIVKELLEKSKPWPTFTQDLKKLEEEILVSHHTPDNVKKQTKKIIRIRGKKQYVAEVEKDSNGKTILKRDQNNKIIYKVDENGNKIPRYQQGDTARGSLHQESLYGAIKDPHNQKEIQYVIRKDLYSIKATEVESIVDEAVKEKIKQAIINKILIIPSNAKQKNKLNQPVWMNKEKGVQIKKVRIVAKTVKNPLEIKNQAPLSLSKKEHKQKVYAQNDENYCMAIYEGQDKKGRIKRSNTLINMFYAGNYYKMSNDHKKYYPIAPEKDENGFPLKYILKKGQMVLMYDKSPDELFEMSENMKSERLFQITQLDVEASCIKLLHHIEAREKKDITKAMGLKSGMKGGKNIGEVKKYPWIKVGVNSFDCLVEGYDFKVSPSSKIIML

SEQ ID NO: 6396 - protein, 1002 aa, unidentified
  REGION 1..1002: note = Description of Unknown: Cas Enzyme sequence
MRYRLGLDLGTNSIGWTVLEIVNDDKNLDRFKFIDMGVRIFSDGREPAKGGRVGDSLAVSRRVARGMRRNRDHGKNRMAYMMSNLVHLGLMPSDRKERKKLENLNPYQLRAEAVERPLKSYELGRALFHLGLRRGFKSNRKESTKENDHSVRKQQINELKIALGDQTLGQFQWNRLQQGLSVRFRENSEWFPDRSMYADEFDAIHKFQFHHHSLADEDWKRLRDNSVLFQHPLRPVERGSCTLYPEYPRAHRDTPIAQWFRVYQDISHLRWIDVKQNDHPLDKEQRDAIIEKLLTQKSGITWGAIRKLKDANGALLFNRNCRFNFESDKCKKLQPHKISIWMNNDEALAPLWGQLDDRTLDDIFEELHGSLDDEKLVAALVRKHKITPEQAEAFIALPIGSVTQNLSRQAMEDLVPIMMDQGLEYYDAVAQLTDADGNPLHHSQIDDFEKRASLPYYGELLSRSVLGGDSGVDPTVNPEGHFGRIANPTVHVALNQLRVVVNTLIKRFEVPPEEVHVELSRDLKLGPKQRSEINREIAKNTNRNERLRREWEKHSRGRTATARDLKKLKLWEELDLNEMTRCCVFTGKNIAAHQLLNGEVEIEHILPFSRTLDDTNANLTLAFKNANLSKGNKTPFEAFGNNRQQGYDWDEILDRASRLPKSKQWRFSEKAMERWEGENDFIARQLTDNAFIAKAARKYLSCLTEQVVPAPGKLTAMIRGKWKLNLGEGQRKSRDDHRHHAIDSFVVALSDRSLLNKISKMSARGVDSKLHMHIPELPDHLKSGLQSKFHNLIISYKQDHGVQGQYFKDTAYGVLSSPRVDGFNLAVKKPLISLSPTEMDAISSEKTKQKIHNYLEKRGWFDLSKEQQGKTLSDHLTMFGRENNIRRVRILLKNQSAIKIKSFPSKAYAPGSFVCCDIWVIPKGKPGAWQKGKYTWQGEFWNYAECAHGLPDKNVKKPHPAAQFKMRLFKDDMVSFLDGNAEQIMRVAGFSTTNNKLDLKPY

SEQ ID NO: 6397 - protein, 1060 aa, unidentified
  REGION 1..1060: note = Description of Unknown: Cas Enzyme sequence
MKILGLDLGTNSIGWAVVEKEDGSYSLLEKGVRIFQEGVKIEKGKESSKAAERTEYRSARRIKYRRKLRKINTLKVLSDYGYCPKLTKEELDLWRYKKVYPKNVSFKDWWLTDDDTEKHPYYFRNLAVTKKLDLSNEVDKHKLGRAFYHMAQRRGFLSNRLETTPENEKGKVISSIKELQKKKGDKTLGQYFYEDCYLKGEKIRDQYTHREEDYLDEFNRICKLQDIPLKIQNELHKAIFYQRPLKLQKGLIGKCVFETNKSRCSTSRPEFEEFRMLSFINNIKIKTPDDEKLRQLNPEERAKVIPRFFLQREHFDFEDLAKQLAPKKQYKYYRDRNKNPEEYLLNYSMKTTVSGCPVSARFKEIFGEQFIDDQYNYAKDADGNTPKTIVEAWHALYSFDSDKKLKSFAAQHLLLNEEQCKIYLKMRLKKDFASLSLKAINKVLPYLRDGLIYSHAVFLGNMGKVLPENIWKDKQNKIVIENAIKEIIENHTDETTIINLVNGFISSAQRKNEVWSEEAKPYLFNDLDKKIKSVFGEKRYESFSDTRKRHITDKAQQLVAEYMPKNLGRGEHIKINRIDETVLQFLKDNFGEENINAKELYHPSAIETYKPAKRADDGRLYLGSPLTSSVRNPMAMRALHQLRKIINELIKEGIIDLRTKVNIEMSRGLLNANERIGLKRWQDDREKKRKEYIAKIKEHFSQDYEPSNDEILKYQLWDEQNHICLYTGDTIGLEDFLGANPKYDIEHTIPRSQSFDNSQENKTLCDNRFNRNEKKNKIPYQLSNYSEILNRIEHWVKKIENLDQEIEKTVRQSKSAVDKSQKDRAIQKRHQLTFERNYWRNKYKRFTMDEVPEGFKNSQLVDIGIITKYSRLYLKTVFPKVYTVKGNTVADFRKIWGLQEEYVKKERVNHIHHCVDAITIACMDKSNYETLAKFYHDSEDAFLNNSTAKPHVEKPWPTFTEDVKVVEKEVLVSHYTPDNLPKQSKKKLRKRGKVQYNKKGEPIYLKGDTVRGSLHKETFYGAIEREIVNKKGETEKQIKYVVRKSLEGLEDSALKNIVDD

SEQ ID NO: 6398 - protein, 1074 aa, unidentified
  REGION 1..1074: note = Description of Unknown: Cas Enzyme sequence
MKKLSIAIDMGAKNNGVCIVKSDADTIIDKKASCIIIDKNNINFSKKSRRENRHKDRNYKRRKLAKRLLKELIDFKSFDSKQQEFILGLLNNRGYTFLSTEVEFESLSDETLKFNTKYIKELQSFKTKEEFEEFFTNDFEDEKELESFLGVQVESLQKLTKDLQNFTNKAKIISDLESLQSKDIPKKFKNFTYIKNILYKYKYQNIGKNEKEIMSNFLKDNFETIKIDFEKEFDYINSLDFTKEDIDNKKSIQDDYKQLIDFFVGIKKEIQTGSKPRKKYLKDIKDEIAKLDFIKNKKEFYSIVGNISNLQLRVLRRFFNYNSKHRDKFEILKSYFKAHHYKKESEKITRKKLFLELDKYQDLQEFLLNTDPILTLPPYEDMNNRDTYKCNSMLIKSEIINDELKNAIDIVLSNEHFSKLLIANDGEFKKEEEFRTKPQSGNVYEKSNLTYSKYLQRILDATPYITTKELNPRNVFKHMSMFDKGTISAVKEFKSTFGDQVYFTLEKFASRYYEEEILITNGIYVEENSIFQKCDTNTPYKNNVKHIMLKPIYSYNFTKDQADNFIEKIKQTYGLEKSLHRISDEAKKYQNSFYSTILSCFENERCIADKEITTIIKNLDKNLNEIKDILKKMDIKESFLDKVERIDTKNISRVLNILKQTYEILFKELSGFSKTCKHCTKENALRSDENLTIGKRLLSDVAKPIDGMLDMMIDRLSFEIVSNIDEDDIKDIDKLEILLEQNKFEFEENLNEIKRAQNSQIKKYKREDKDRLNSSYCPYTGEKFDKGDYDHILPQSKGVYNSKANMIYVSTKGNAQKGNRNFTLDDLKDAHLKDIFKTTNKEEIKQKIKQGILGIKKEQFKNFDALKLHEQIAFRYALFMRGTVEFDKAFELLKIDKLKTITNGTQKRVARIIYEKLSHIYPKQMKAISVNSKTVDNKLVSSTRKYLAVDQQTGEINHLFKEDIQNSHSHCIDAMVVFYLANSKVKNINSNNDTIIEPIYSFDDIYLEESGINNIHKNKIFINSTFKQSASIPLFQGTVYSENYYIIEKIGDDFFAKNKKIKERDIEVLIDNEL

SEQ ID NO: 6399 - protein, 953 aa, unidentified
  REGION 1..953: note = Description of Unknown: Cas Enzyme sequence
MKKILGLDLGTNSIGWALTEMDFDKRQGKIIGLSSRIIPMDQAQLTDFAAGNSISQTAERTGYRGIRRLYQRDNLRRERLHRVLNILGFLPEHYKNEIDFEQHPGQFKKEIKLNYRKNEKGKYSFIFKDSYREMVLDFQSNHQNIKIPYDWTLYYLRKKALTQKISKEELAWIILNFNQKRGYYQLRGEETEENDKKDEKFYSLKVVEVKETEDKNAKGVWYNVILENGWIYRRQSKEPLFNWVGTTKDFIVTTTLDKNGDPKRSFRAPKEDDWKLTKKKTEQEIEESKKYVGEYIYDHLLQNSNQKIRGKLIKTIERKFYKAELNAILKTQITFHPELNDRKLYKACIEELYPRNEAHRNNIKDKGFDYLFIEDIIFYQRPLKSKKSTISGCQFETRTFKKTIIDKVTREEKEVWVTEPVKAISKSHPLYQEFRLWQFLKNLKIYQKFDNNGRLIDDDVTNNLFKTEADWTDLFDFLNERKEVEQKNIIQYLISKGSIDKKHKDNYRWNYVEDKKYPANETKAQFLSRLSKVDGLNNPSQFLQEKTESGTQIMLSREEQLWHLIYSIKDIREYEQALHSFAKKHGIDEPSFVKNFIKFPPFKNDYGAFSMKAINKLLPLMRRGKYFDESKIQEKVKSRIEEIMERVNAINPDANDLNQEIEKVVDDDISQQLVKSFIPLIGKNPLSGLNTYQASYAVYGRHSESKETQKWRTPEDIDKFLAGFKQHSLRNPIVEQVVTETLRTVRDIWNYYGHGNEGFFDEIHVELGREMKNPADKRKKITQKNVENENTNQRIKAILQELNNEGVTGVIPYSPSQQEILKIYEEGVYQNLDSDYKYVSEDEIEKIRKSSSPTQSQIKRYKLWLDQGYISPYTGKVITLSRLFTTDFQIEHIIPQSRYFDDSLSNKVICESEVNQLKGNQTAYEFIKKHGGEKVDLGQGRSVEIFSLEDYEN

SEQ ID NO: 6400 - protein, 1049 aa, unidentified
  REGION 1..1049: note = Description of Unknown: Cas Enzyme sequence
MKKAVEELALGLDIGANSIGWSLIAFANGKPERIVRAGVRCFEAGVEGSMEAGRDQSRAKRRGLARRQRRQTERRAWRLEKVARLLQRAGLLPEGPIATAEDRLKFFTELDERIVSSYLKKVSADDPDRRRLAHVVPYALRARALDKRLEPHELGRALYHLAHRRGFKSNRRGGEEEKKETGKVKKAFSQLHRDMQEAGARTLGEYFAGLDPEKGRIRTRYTSRPMYLDEFDQIWNSQSGFHPSILTDGFKRQLHRAIFYQRPLRSQKGRVGNCELERGCRRAPKACFEFQRTRILEQVNNLRVVSFRDGIGRPLNETQRRTLISELGKKRELKLDRVRAILDLPETGYMLNLEEGEQNKLVGNKTAAALTKVFGRTLWHKFSDAERDRILEDVRSIEDDEVLKRRATEVWGLDEQKGQKLCNVGLEPGYCALSRKALKKILPGLEKAKSRTEVLQEIYGHQTVGVHQDLPSVEQSGILVMNPAVHRALTELRKVVNAIIREYGKPDRIRIELARDLKQPRKERMVRSKRMAANRAARDEQKEYIKEQTGNEYPSKEDVVKLQLAKECGYVCPYTQLPMSRARLLGHSAEFEIDHIIPISRCLDDSFANLLLCHVEANRKKGNRTPFEAFGDTPDWERILGRVRKFTGHLKSEKLRRFQLTEDQVIERFGEFAARQLNDTRYTTKLAGRYLSLLYGGRSGVQGIRGIETTKGAITNHLRNAWELNRILSDGPGKSRNDHRHHAVDAIVIALTDPGMVKRLSNAAERSSATGHRRWWREVEPPWDGFVSDVRETIHGVVVSHRVSRKVKGPLHEETYYGHKEGSEYVRLRKPLGSGKGKLSQTEIPDIVDDAIRQRVQLKLEELGEPDPKKAFKSPENHPFLQTLDGGRIPIHRVRLKKKAAVIPVGDGVRRRHVMTGRNHHVEIVETTDNKGNVRWEDHVVTLYDAVQRHKAGRPIVKRDHGRGKKLVFSLSLKESVRMKNQQGDWILARVVGISKNDIEFRENRDARSDTEIRKAGYGRIRCSAEKLRKHEPQKMLITPAGEVRRAND

SEQ ID NO: 6401 - protein, 1035 aa, unidentified
  REGION 1..1035: note = Description of Unknown: Cas Enzyme sequence
MSQTIPSGYILGLDLGTNSVGWALVEQKQGQPAGLLAAGSRVFDAGTEGNIESGRDESRGVKRRQARQIRRGLDRRARRTRKLLHLLQGASLLPAGRAGDILPDLDKGLAAKYLPSGDKTARNQMAQVLPYFLRVRALDHKLEPFELGRALYHLGQRRGFKSNRKATRKDEDEGVVKKAISELKGAMEETGARTLGEYLSKLNPHEKRIRARWTARDMYEDEFGKIWAAQAEHHPAVLTPELCKKVRKAIFYQRPLRNQKNLVGFCEFEHGRRRAPWALLDAQRFRLLQRVNDLEALNTSTGEVRGLTDEERSKLLEAMGTSGSVSFGGIRRLLKLRGWEFNLEQGGEKKLPGNRTAARIRKVLGERWDAMSAADRERLVEDLHSIQNEAALARRAERAWSLDPEAARKLATVRLEEGYCALSRKALARLLPLIENGTAYMTAVKQVYGERPAPQPADLLLRVDAGAPDLRNPVVFRALTEMRRVVNAVVRKHGKPALVRVEMGRDLRRGRQRRKQTWQRNRANQREREAAAKRIATEAGIPDPSRADIEKVLLAEECGWICPYTGKPIAMGMLLGANPQFDVEHIIPFSRSLDNSFINKTLCHHEENRNVKRNRTPWEAYEGKPERWGQIIDRVLRFKSSVARAKLARFQLKEVESLEDFSHRQLNDTRYIARKAADFLGTLYGGQIDADGRRRVQAGRGGVTAFLRNEWDLNGILGDGPGKSRDDHRHHAVDAVCIALTSPATVKKLSDAAERAESEGRRRFGKVGKPWTGFVNQVREVIEEINVAHRVGRKVNGPLHEETFYGRERKDGEGRSYRVARKVLVSLKAKDVEKIIDPAVRQRVLDKLAEVGGDPKKLEADPPMMPGGVPVRRVRVRVSASPVKVGRAERERHVLTGSNHHVEILEVQDKKGRAKWEGAVVSTLEAMRRLRAGEQVIRRDHGENKKFVFSLSGGEAIELDESGGNRRLYVVRSVDNKKTGIYVKFVHISDARKQNVKEGNKVIDIRQSASVKGLYDRHCRKVVVTPLGEVRSAND

SEQ ID NO: 6402 - protein, 1355 aa, unidentified
  REGION 1..1355: note = Description of Unknown: Cas Enzyme sequence
MTYSIGLDIGTGSVGWAVIGDDYRLKRAKGKNLIGVRLFDSATTAAERRGYRTTRRRLSRRHWRLRLLNDIFSSDLAEQDENFLPRLKYSWVNPDDEQNPQLNSDVANGALLGSRDADKAFHKNYPTIYHLRHELMTDTAKHDLREVYLAIHHIVKYRGNFLNTADKINAENSFDVDLFVAALDEYNEFLETPITSIKDAQLFSDKLTDINARNKSVRVENAMSETYDSKSKIFKAILTALVGNTANFQTIFDLSDLEKDEVKNFKFKLDLEDVETKLDVVRAKLSDEQNAFLEAILIAYDGITLKMILGDYKSISQSMIESYKSHQRDWEYIKNNVRLNEQKIEPDKNSAKIFKLNSKKTIYPSNLAYLQVISSNEDEHRKGLDYFKAAIQDADILQRIENDTFLPRQRTKRNGVLPYQLHLAELEQIIKKQSKYYPFLANTYTKDNKTENKLIGLLKFRVPYYVGPLVEAEKVTGDGKNHWLIKKELQENTPITPFNFDDVVDKDKSGEQFIKRITGTDSYLIGEPTLPENSLLYQKYNVLQELNNVRNERHQRLPIKVKQDIFEHVFKIDKNVTAKKVMAYLELNGYGDFQIAGLSDTRTGKFNSNLSSYNYFVDLLGREKTEKIREDRLEEIIEIQTVFEDKSIVAKRLLNFDFLTVSEKDKLSVKHYTGWGRLSRKLLTTRFIKTNLSEAGDIIPQSHSIIDLLYYTDKNLMEILNDKTFNVRNWLTEQNKGTESGNSLYDQIDALAGPKDIKRGITQVFSIIDDIKKAMGSNPETVYLEFARETQTSRLTNSRLNRVQEIYNSPELKTEFAYLAKKLEAETKESIHDDRLYLYYLQEGRDMYTGKEIPFDQISSNYDIDHIIPQAFTKDDSLDNRVLVNRATNARKSNSPTFTNDIIDNRKSWWQSLVKRGLMSKEKFERLTDKRKTFSENQTNHFIARQLVETRQIIKNVADLIKNNYDGTQAVAIRASLTGEMRRYLDWPKNRDMNDYHHAHDALMMATVGKYVDRRGFFDNGSVSDGAGNAYNLYTKDWLVAARVGTRNDSQRVNPYGFIVGSMNSKAVRQQVNKETGEIVWGNENLDYLRHVLSYKKILVTRRLSGSSGRLYAETLFSPNPKAKLIAQKANRSVALYGGFTKAESAYTALVEFNKKGDRSYKLIKVPMAIANRVNDKQITVTAYIASLNLRDFSRVVLEHLPLGTLIRESDGSEFYAASSEYKHNAKELWAPKEILRSSKKLDKATADNLIDIFDFLTNDKTISNFKFYEKDLLHLKNVRDKFVEASDGIKLKMLADIIYELHNDAGWRDPFKHIQEKPAWTMLQVKGGIKLSEKAAIVYQSPTGLFETITIVGE

SEQ ID NO: 6403 - protein, 1014 aa, unidentified
  REGION 1..1014: note = Description of Unknown: Cas Enzyme sequence
MQQKVLGLDLGSNSIGWALLNEENGNATEIIDLGSRIFIKAVEEKVPTPKNEKRRNMRLGRRVIQRRARRKQRMLNYLVSLGLLPVELQNNTQPEIILNELGDPYELRAKGLDKQLAPHELGRILLHFVARRGFLSTKKQTAGDLVDDPDTLEYLNALEEKPTKDKEEGQFKADIAELYKEIHDKGLRTLGEFLFNLDTGKVKRNRIHDGGHLRTDRKMYQDELALIWKKQSQHFSHLPDSFFEQIDKIIFYQRPLKLRKDRVGRCSLESNKYRANVARLEVQRFRYLQDINNLQYFDRYSEQWIALSDDQKEKLKTYFEHNPKITVTQLKKELGLDKPTKINLEAKNLKGNITACEIRNVIGEQWNKYSDKQQKDLCEDLFTIKKKSALKARLITHWDFDKKTAVKLCLLEFEPSHSNLSLKAINKLLPFLEQGMIYSDARQSAGYDYVTQDIEEQDTLGTPPETSNPIVNKGLHEIRRVINALIKEYGKPDIVRIEMARDLEMNTKRYKENEARQRKNQKANEEAQEAFESLKLGKKYASRDDKIRYRLWQEQDQRCAYSGNTIALNQVFTSECEIDHILPFKKSLDDSYMNKVLCFVKENRKKSDKTPIDAWGGDNEKWNQITQAISHWDAGLKSKVSRFFTKEADLQKRDFISSQLNDTRYISKLAQDYVRQLGCDVNVTKGFVVSQIRHQWGFNNLIGEVDKKERTDHRHHAIDAVVIASTSRTLYTKAVRQIEMDKLAIKQPYPHIREELAEKLKHTIVSHAPQRKLSGALHEETGAGYIEKHGGLVYRKTLNQDFTVKNAMSIVDEQVKTKVLEHIENHGGSKVAFNTENLAKLKLGKNPIKRVRVLQSKTSQKKLAETKFGVKDKSGNVFKHMSYGNTHHVEIIKNIKTGKIKGEFVTMMLASHRAKGINMPKQSIINTEHGGVWEFVLALHINDTVSIEKENGERVFYRVQKLGFDRNKVFLRLNTASTLNNNDEAIVFAINEKSLNCYNIQLHRINAIGHFIND

SEQ ID NO: 6404 - protein, 1022 aa, unidentified
  REGION 1..1022: note = Description of Unknown: Cas Enzyme sequence
MNEAIWGFDLGTTSIGFAVVDHDPDENTGQIKKLGVRIFPEGVTEKELEPRNRRRREKRLMRRQLRRRKLRRVELTKRMAEVGLLPKFESEEWKALMNTDPYQIRSDAFERKLDEHEVGRALYHLIQRRGFKSLRKSLEEVSGEGADETGMVKESIAAMREEMGGKTLGQHLNLKSKKRGNYLGRQMVEDEFERLWEAQRTHHPDLLTDALRMELRTVAFKQRPVFWRLETLGKCHLEPKAPLCLKSSWVGQQFLMLQDLNALRISGTSEGLPKDQRELIYDRLSRQESMTWGGLRKNLKSLWLEAKIPLRSKFNFEDGQKPKLQGNILEAKLNQVFGDKWENHPFKNKIREELPQKLWVIDYKQIGNKKVVIRTDEDTHQARKDFIREAQSEYGVSAADAKTLSELVLPQGWLSHSEKAIRSLLPHLEKGWMYSEACDIAYPKHRDVKGEGLDLLPSDQKHLDHLRNPTVKRALNELRKVTNNLIRTYGKPDRIRVELARELKLPGARRRDYQNRIKKQESERDKARTDLIENGLFNPKGSDIEKWLLWKESEERCLYTSKVISFGDLFEHGRFEVEHIIPYSICLDNGFMNKTLAEKDFNREKGNRIPYEAFSDDQWLLFKQRVRDSKLPPFKKNKLLSTNLEDVLGEDFSERQLRDSAYIAREARDFLMKLFKKSEGKAFPVETSNGMITAQLRRFWGLNTLLSDGDKKTRDDHRHHAVDALAVSLVSRSGVKNLSDRHKFFMEGRRIDFPLPWVSFRDEAEKNIMEIIVSHKLNSKVSGKLHDEMVYGSTKETRQKSGVNYQIFTRRVDLQSLSKSQLKSLAENKLEVLWDDSLRNKKVVLAHLKKHGDFKEYPSFKLPSGIPREIKHLKLLEPKKPELVTTLERNQANVIKNENHHMMLYQTSDEKIVFDVVSRFDAAMRLSKRQPVIQQNSGKGLFLMSLVKGDTLLVPSDPENDQEEQYLLVESIWDSGVIVTKEISEASKDRNKLDFKKASTWIEKGTEKISVDPIGRVFPKND

SEQ ID NO: 6405 - protein, 1147 aa, unidentified
  REGION 1..1147: note = Description of Unknown: Cas Enzyme sequence
MNYNGFIIMENAMSSKQENPGALTFGLDIGIASVGWAVLGEKRIIDLGVRCFDKAETAKEGESLNLARRMARLLRRRLRRRAWRLTKLARLLKREGLIADANLFKNAIEKNSPVPKSSWQLRVDALDRQLSADEWARVIYHLCKHRGFHWISRAEEKAAEGDSKGESGKVKQGLAGTKRLMAEKGYRTAAEMVMTEFFTHRVDEDGKPALTKKTGEPILDGAARNKQGDYSKALSRILLGEELKKLFEHQRKLGNTFATEKLEAAILGNGDRKSGLFWAQNPALAGNDLLKMLGHCTFEKSEYRAPKASFTAERHVWLTRLNNLRIVVDGTTRSLNEAERCVVLHMPYQQAGDLTYKQLRTALTKAGYLPESFRYTGLAYASGQKADEKTKDPESAALVKFPAWQVLHKTLEKKGLASEWQKISIDALDGKPQVLDQIAWVLSVNKDDTEVEAELRKLNLPNAKKMIDALLDIRFDKFSNLSLKALRQIVPFMEQGQRYDEAVANIPEYGHHSQLHKVGAGEHKYLPPFYKERDKDGRMVFNDDMDIPRNPVVLRALNQARKVVNALIKEYGSPHEVHIEMARDLSRPLDERREVEKLQKEFRDRNEKDKAQFAQNFNVIGAVKGKEFEKYQLYREQQGKCAYSIQAIDINRIFEQGYVEIDHALPYSRSFDDSKNNRVLVLARENRNKGNLTPYEYLDGKSDSERWRQFAAFVNSNKSYRLAKRSRLLRRNFGADEAQGFRERNLNDTRYICKFFKNYVEQYLQLHTDSEAKRCVVLSGQMTSFLRARWGLVKVRSDSDRHHALDAAVVAACSHSMVKRLSDYARRKELAQVREGFVDIDGVIINPAMFDQLEQHFPNPWQHFRDEVIARLNIDNPALLREKIQRLGTYSEAALNDTHPLFVSRAPQRRGSGALHEETIRSAKRITKGVSFVKVPLQKLKLSKLGDIVGANDLRNIPLIELLKKRLQDNSDDGKKAFSEPLYMPSMQGKGSLVKTVKIASTQKSGMFIRGGVAELGDMHHVDVYKYRDRFLIEPAYPVNINKRINPHNLPDEAIFQFTLQKNDYLRVTLGETAHDGYFVMYESDGRLTLRAHDQPKPDKIYFRKSVSTANNLQKFHVDVLGNCYPAPPEKRRLYPAQRSGAEHDLA

SEQ ID NO: 6406 - protein, 1075 aa, unidentified
  REGION 1..1075: note = Description of Unknown: Cas Enzyme sequence
MSDNDLIFSFDIGTGSIGECVRQGSEIKHLESLLIPAEYASTKDATKKRHQIRTREAHKAREDWWRKQAKEAGIEVLESRQPTKENPNIKPDERLLREFPKDGDNTIYTSCLLRIALLQGKKLDGWQIYKAVWSAIQHRGYDEKNHWKNDDDSAENKKNVNEYIKYCKDNKFEEKYWLPCYVDAHRMGIWSPEDSNNLYRKRNNETNPAPARNKNHSKYHLVFPRSKVEEELKHLLSQAAKLFPKLAGKENYIVYGPGEVQYASMKKMEFSKYRGKEWDWQGLLGQKIPRFDNRMLNKCCCMSHFNVCRADDMLNQEVMFLMMLKNMRYHSKNKPDEMLTAEQIKELFNKFKDRLKFEKNEKDKVKNRKKEVIPKSLLRKWVIEKLNGEIHPAHSLIPMPNAGGRSRYCRPALEVIREVILSGKTPKQVYEECVAKNKIENPEQNSKKGRIQSDFDFLIKKGTSEKWENFYISDNRYELREMSADERKIEIEKTLNEINNPIVSHRLKWFKKELNKLAFGEPEKKNPGYGIPEKVVLEFARDEFMGKQAKEDYYKFIKEQTKERKIVVEELEKAGFSKPSGEMIRKMMLFRQQDGIDFYSMQNIKLSHLGEYEIDHVIPRSRGGSDAFYNIILTTNKNNSAKGDKTPYEWLGKGDIWDNISEKLKVNKKMGSKKKLLFMASSEEQYKLLIDKYTQLSQTAYISKLAQKVTALTFGWGMQTKDDNRNIVIATGGQTARIRSRFKLDRLLHSGMTDEEFEKALRNGEIEKKNRSNPRHHALDALVLSAVPEIRVDKNRKGKYDDIYPSWLTRDFCEKEVAHVYPKQIKFSKAQLAEVLYGKREVKKEDGLWYTYAITRQNEGTRIEDYYVKKSEKKSDIEDMEKLRNKILKKVNHIFSNDIRTDFKKKLEEKPTEEQWNDFIKNYKVNGTCPHRISVIGNPGVKGFKEKQPLPPNYKEIRPNSKQYYETKTGQKWSYTAQLICLNEKDEWEVHPVYAWDSLYERIKKAEQEFKKVVKFHSRQSVEIKNDCANGKIKKGIYILATIQNGNWGVLESQGEKIDASLNELMNIGEMWPII

SEQ ID NO: 6407 - protein, 1119 aa, unidentified
  REGION 1..1119: note = Description of Unknown: Cas Enzyme sequence
MNYYNGFIITENAMTSKQENLGALTFGLDIGIASVGWAVLGENRIIDLGVRCFDKAETAKEGESLNLARRTARLLRRRLRRRAWRLTKLARLLKREGLIADANLFKHKIEKNTPIPKSSWQLRVDGLDRQLSADEWARVIYHLCKHRGFHWISRAEEKAAEGDSKGEGGKVKQGLAGTKKLMAEKGYLTAAEMIMTEFFKQRINEDGKPVLTKKTGEPILDGVARNKQGDYSKALSRILLGDELKALFENQRKLGNSFAPEKLEAAILGNGDPERHVGLTRLNNLRIMVDGTTRPLNEAERRIALLMPYQQAGDFTYKQLRTALTKAGYLPESFRYTGLAYASGQKADEKTKDPEAAALVKFPAWQELRKTLEKKELTSEWQKISTDALDGRPQLLDDIAWVLSVYKDDAEVEAELRKLNLPNAEKMIDTLLDIRFDKFSNLSIKALRQIVPLMEQGQRYDEAVANIPEYGHHSQMHIVGEGEHKYLPPLYSGRDKDGRMVFNDDMDIPRNPVVLRALNQARKVVNALIKKYGSPHEVHIEMARDLSRPFDERKKVKAAQDEFREGNEKAKADFEKEYHIPAKGREFEKFKLYKEQQGKCAYSVEPLDLHRVLHDLGYVEIDHALPYSRSFDDSKNNRVLVLAKENRDKGNRTPFEYLGGKDSSEPWRQFVGFVEGNKAYRLAKRSRLLRKDFGDKEAKEFRERNLNDTRYICKFFKNYVEQYLQLHEDSEAKRCVVLSGQMTSFLRARWGLVKVRGDSDRHHALDAAVVAACSHGMVKRLSDYSRRKELEQVRTGFVDVDTGEIVNPAMFQQVQEHFPNPWPHFRDEVKLRLSMDDPALLRGEMEKFGTYTPAALEALHPLFVSRAPQRRNSGAAHKDTIYAQPKRLVAQGGVTQKVALTSLTLKDLDKLIDPHRNDKLYTAIRARLEQHGGKGDKAFPSSNPLRKPDSEGNPTGPIVRGVTMVIDKLSGIPIRGGIAKNDSMVRVDVFTKANKFHLVPVYVHHTVAKALPNRAVVAFKDEDEWTLIDDSFDFCFSLHPNDLVQVQQKGKAGMIGYYSSCHRGTGNINLWAHDRNLQVGKDGMIEGIGVKTALSLEKFNVDVLGNRYPAPPEKRRDLA

SEQ ID NO: 6408 - protein, 972 aa, unidentified
  REGION 1..972: note = Description of Unknown: Cas Enzyme sequence
  MOD_RES 972: note = Any amino acid
MNKERIVLGLDIGVGSIGWGLVQIREEEYCDEREDGTIDKKYRITDGKIIDMGVRTFQIPQDRQKKSLALQRGTARRSRKTTRRKAQRLKRLIKLAKEFNLIDNNFNRDEIIKPQKGDKESKWDIWFIRKEALERQITDTELFRVLYHIAKHRGFFFHTKEEEIQKEDSKSEAGEVKKGLARIRKKLEDGGWETIGQMFCDEFKQTNKKYKRKRNTQDKYENAIHRSLLKEEIEIIFDKQQKLGNSRAKEELKQRYIDDILMKEEGIDDERLQKMMSKCEFIPGKLCAPKESYTAERRSFFDRLNTLELVDTQNKDKHLKLDDKQRDKIEALAYKNSKVTFAQIRKELDLENDLDKQLNLCSYKGKDPEYNKKLTCEIKNGQLQFDEKHKVTIVDINTGEVKVFEKEIKKIFNSKKLWPNSKNIYVYYSDIRKQLNLSGDFRFADLKGYTKSAAELGSESKYIKQFEDDTFIELKGYHKIRKAVENCDKNKWDELAGDTNKLDIIAEALVYHKSDETRTNYLKENGIIDEDIINAVLTINMKQVANHSKEALKKLLEYMETGDLFHEAKEKAGFGGIEYEKQAILKPYGGFFENNPVVARVISQTRKLVNALVRKYQKQFPIDQIHIEVATELASSEKRKNQIRQGQNRYREDKQAAAERCREWKLDPEEGQNLLMFRLAEQQNYSCPYTGTKITLYPTGAVNEVYIKECEIDHILPMSRSFNDSLNNKVLCTQKSNKDKRDRIPFEWFEDIYGKDSLQWMEFENRVKKMYGMPYPKRKNLIRKSWTEKDKEQFLSRNLNDTRYATRHIADYLRKYFDFSKSQRDDIKDVSRIKLRSGGITAFLRHMWGLNKNRGENDLHHAVDALVVACSTYGHVYLVSNLAKQIERKGKNWYKHFGRDKFKPWDSIREDIQKDIGNIFVSRMPRHTVTSGAHKENPDSLIEERRIKKARKKSPKKKIDSLPITKRVIKFX

SEQ ID NO: 6409 - protein, 1046 aa, unidentified
  REGION 1..1046: note = Description of Unknown: Cas Enzyme sequence
MRIIGLDVGIASCGWGIIETTDSGTAGVVVAAGVRCFDAPLVEKTREPKSAERRRARGQRRIIRRRRQRMNAVRKLLSEAGLLASARADALHVAARDIAPVTPWTLRAAALERCLSAAEAAVVLGHIARHRGFRSNAKAASGNAADETSKMKKAMAATGEKLAQYRSFGDMVANDPAFAARKRNRDKDYALTPYRSDLECEVAAIFAAQRRMGNAALSAEMQEKFAHAAFYQRPLQDSEALVGKCPFEPGELRAARRAPSFELFRYLSRLATLELSVGRTSRRLNGDEIRLAAAHFGDTKSITFKALRKLLDIDPNARFSAPETDKKGKDLDVVARTGGAAYGTKTLRDALGEATWTSLRRTPDRLDRIAEILSFREDLGNIRTGLSELGVEPAIIDRLVEAAENGEFSEFTRAGHLSAKACRAIIPHLLEGLVYSEACERAGYDHAARPQTSVKDITSPVTRRAFLETIKQVRAILREVGPIDYVHIELARDVGKSAEERKKLKDGLEERTAKKERRRDEASDILGRRATDDELLRYELALEQQWKCVYSGDPIEPDGFAANDTRYQVDHILPWSRFGDDSYLNKTLCTTKANQEKRGRTPYEWYSADKSDDDWIAYQARVESLKEVKGRKKRNYVLKNAADIEERFKARNLTDTQWVTRLLADELKRMFPPRAERRAGDVEERRVFTRPGAITAKLRRAWGLDNLKKDEKGERIPDDRHHAVDALVLAATTESLLNRMTREVQRREMEGRTDDIFHVQQPWPGFREAVIKSVYGENGAGGVFVSRAERGRARGKAHDATIKQIREIDGQKAVFIRKDVLKLTEADLDLIPVPAPYGKVADPQKLRDEMVESLRAWLALPLAERKKSPPLSPKRDPIRKVRLLSKDKVAVELNGGTVDRSDMTRVDVFCKMKKSGKPSFFLVPIYPFQVVGGEEWATAPNRAILAHKPESDWPELDASFKFLFSLTIHDYIELTKSDGEIVEGYFKGIDRASSSITVADQKNLNEQVRGIGSKTLSSFKKFRIDRMGRKSEVLREVRTWRGKACT

SEQ ID NO: 6410 - protein, 943 aa, unidentified
  REGION 1..943: note = Description of Unknown: Cas Enzyme sequence
FLATELSIKEKMTKSEILKLLFDNPQELDLNLPSVQGDLTQSKLFEAYKDIIERTGHKLDLKRTASEILENVEEIFTSLGYNTDILRFNSGASSLDNEPMYKFWHLLYSFEGDDSVSGNEKLIDKITKIYGFEKESAAILANVVFQDDYGSLSAKAICKILPYLKSGNKYDVACEYAGYRHSASSLTKEEIENKAYKERLDILPKNSLRNPVVEKILNQMINVVNSIIEVHGKPDEIRIEMARELKKSAKERDELSKSIAETTRLHEQYRDILSKPPFNLSYISRNDIIRYKLYEELKDNGYKTLYSSTYISPQEVFSGTFDVEHIIPQSRLFDDSFSNKTLELRSINIEKGNRTTIDFIKEKFGETEGENCAENYVNRLEKLYKGGAISRAKYNKLIMKGEDIPDGFIERDIRDTQYITRYAKILLGDLVKSVVTTTGSVTDRLRQDWQLVDVMKELNWKKYKDLGFTEEIIDKEGHRIRKIKDWTKRNDHRHHATDALTVAFTKRSYIQYLNNLNARSDKSSSIYGIEQKELYRNGKGKLLFKPPFALDEFRTEAKRHLKNTLISIKAKNKVTTQNINTTRKSGGTNKKMQQTPLGQLHLETVYGSRKQYIVKKETVNAKFDIAKIQTVSKPTYREALLMRLKQFDYNSQKAFTGGNALSKNPIWLNESHTDQVPGKVKTVSIETIYTIRKEVSADLKLDKIVDVGIRELLKKRLQKYGNDAKRAFSNLDENPIWLNKEKNITVKRVTISGISNGEPLHDKRNRDGNLILDETGKKQPVDFVNTGNNHHVAVYRDAEGNLQENVVSFYEAVSRRNLGLPAIDKSYKAGEGWRFLFSMKQNEYFVFPNEDTGFDPNEIDLLNPDNYSLISPNLFRVQKFSKVYYGNSAVRDYVFRHHLETKIEDVKELRDITYKSIKSLSIFEKIVKVRINHIGQIVSVGEY

SEQ ID NO: 6411 - protein, 1460 aa, unidentified
  REGION 1..1460: note = Description of Unknown: Cas Enzyme sequence
MTVSLGLDIGSNSVGSAWIDHQTGRIVGGVSIFPAGVDESDEKRGDPKNAKRRMTRRARITLARRAQRKRLLRLKLISVGLLPDNEAHFKELLEQTDSWELRRKGLTQPLSPHEFGRALLHLAQRRGAMGFDADVGDEGNVKKAIVGLQLAMLDRFGSDQEQQRGRELRSRIESLGKKKRTEQENDELEKTQEQLTRLCQSLLKGSTVTYGRFIAELRDERRTAITTKDRRKKKKGPREWRRPVRNKAGKFEFHADRAMIRDEFAKLWDAQKRMGGPLSDKLTDELRRSLDDESRDSNWRHKGLLFGQRMQSWDLGTLGRCVLEPTERCVPHADMYASRYLVVQMVNDLKILERGKEKRPLSPNERAKMIEYLTGPLGAETRGKRKGLPKTSVTWTDLRDVMDWGPRRRSPFRFNFELSDDERTPNTDWFSREIIHGAVTPEKWSQLSHNAREGINRAILKHDPDDDAHPERLKSLVMQDWAGLSESQADALIAAWRKRPRPDAKRLNMSRRAVRNLLQIMDNGFVVAERRPSEPIQWWPLEGNKFDLTKHSWPTQIAARMIIAADEDFRDIATGRPLDEHARRRYATGAKGATARDRHYAKKHLLKKDGETVYDPSGLPLHEPPPAPLISNPVVRKAIHEVRRHVVEYMAAMRRKPDEIHIELAREARMGKVDADRFLFRNRLRNRIRNEIAEEFNLHSVSSTQKRAAVDRVILAVHQDCVCPLCGRRAYDDKSPGITLRTAALGQGCEVAHILPKACGGHNGFGNIVLAHDECNQEMGRRTPRDFWDATLEGGFDEGISWIENMFGSVVRIKPSETKTATGVELWKCYLTEQARPKRGSLSPVPPNFFTNRFDLAKIEQFKKDIADIQGMTQRQEAATKYASRQVMTYLADSLFEGKGLPERGGDRLVYANDGLWTSRLRREWGLFFDRHGARAKGLTNEQEHERKEKDRGDHRHHAIDAIVIALCHRKVQIAWEEREKQADKDGINTADQMAMENYRRLHPLPPPAPFKSRDEFYDAVRLAIFGDGEIERPVSHRPVKRKLIGAFHKETQYGAVIDHWLQGDAVHRELVKERVTKRQDILGDTRDDFLKPGHLRLPRPETDGEAVDRLARRLRIREEDMSYEQAKKAARKRVKSKGFERAIVDPKPEKGGIVRDLGLRRILRQRLQERGLNPDSYTRADLKKSIDEHGPLTQKSGVPIYRVVLLWSNSDPVTVRRAHYDYATGQHKKLDDLESLRLYDSQNNHHIEIRVSKNKKGNEIWKGHVVSAFEASKQLSQRLRKLGELEGPFRHLRKKLTKSQKEGLSPEEIKDLSRRRRREWKQALQELKPLRKTIIDAYPLVDRSDNDEKGGQFLMSLCEGEMLLMRRKGKDGEPGEVGYFVVAKINKRKSGSSIEVVPHWDARSATERKDSEGKKVSDSKREQFAVTPTDLKNLAPQGHDHAVKVRVSPLGEIRQLEKD

SEQ ID NO: 6412 - protein, 1059 aa, unidentified
  REGION 1..1059: note = Description of Unknown: Cas Enzyme sequence
MKNYRLGIDLGATSLGWSLIELDENNEPVILENVGVRIFPDGRDAKSKESLNVTRRIARGIRRNRDRYLQRRKYLLDRLVGYGLMPIDENERKKLKDIDPYLLRSKALDEKLTLFELGRVIFHLNQRRGFKSNRKFTNEKKEETKMEGSINKVKHELDLESTGARTLGEYLYNLNKDKSSKEQVHRIPIRIRDHGKEYNLYTERSMYENEFEKIWNKQKQYHSELTNEIKEHLHKIIFTQRDLKQQPKGKCRFEIDEFRCPVAFPIAQQIRIYQEVNNLILLDSDRYKHELTDEQRKIIIEVLLSQATTSLKALRNKLGKEYKDYEFNLESEKRAKIKCDETASIMRKKEYFGDKWDKLKDYEQDEIINRLVNEDNIKEIEDNLINWLCSSYGFDEETAEKIKFIRLPQGTSNLSKKAIKKILPYLKKGFNYYDSTIKAGYTDRETGEIFDEGNLPYYGEIMEHHALFGNKEKYTKDEPELYYGKIGNPTVHIALNQLRKFINALTKKYGAPTQIVIELARELPLGKENLSNLIKEQSDNEKNNERIRKELEDIGVENNYHNRLKYKLWEELDKDPVKRCCPYTGKHIPLNAVDGLYSHQFEIEHILPKSKTFNDRPSNKTISYYKANRFKGERSPFEAFGGSPEDYNWDKILRRGLRLPENKRWRFYPDAMKDFRNEGELISRLLTDTQYMSKVALEYMSYVSGSNNVWAIPGQLTAQIRTKWGLNKLLSEDGKKNRKDHRHHAIDAFVVACTDNALLQKVATAVKQSNNRFIEKIPLPFADFSFNEMQKKINEIVVSYKPDHGNAKAAITDGKQKGKRKTVEQLHDGTAYGFVSEDIEKEKITLSIRRPLISLNKKTIKDIASLKIRDELLKLIDEDSGNEIKTILSKYSEENGIKKVKLILKEKDKKTVIPIRNEEGKVYKYYFSDNNYCADIYCPDKGKKAGKWQIEIIPRYYAHQPDFETRWHKKYPIQKDIKIMRLFKNDYVAYDDNGERKIGRVKKITNDLVYLRNPNIALEIKDKSSWAASPKQLQLKNARKIGVDILGRVFDPKQKNENS

SEQ ID NO: 6413 - protein, 1393 aa, unidentified
  REGION 1..1393: note = Description of Unknown: Cas Enzyme sequence
MKKILGLDLGTTSIGWAMVNEAENEEEFSAIIRTGVRVNPLTTDEEADFQKGKSISINAERALKRGARRNLQRYKQRREHLINLFRDNNIIKDESVLAETGKNSTHSLWQLRAKAAVEHISLEDFARVLLAINKKRGYKSNRKAKDETDEQAIDGMEIAKFLYNENLTPGQFVYQRLNEDKKQIPDFYRSDLKSEFNRLWEKQKEFYPDILTLKLKNDLEGKNKGQTWKICEKPFGLVGERLKEKGTELKKKLYELRVTGLSEQICLEHLAIVLQEINGQINSSSNYLGAISDRSKELFFNNQTVGQYLYNQIKENPHTPLKNQVFYRQDYIDEFNRIWEVQSKINKETLTNELKEEIKGTIIFYQRRLKSQKGLISICELEGREVEIEIYGKKKKKIIGPRAIPKSSPLFQEFKIWQILNNLKFTNVHTKKTYDITELDEDVEMRKLLFNELNTKGKLSAKDALKVAINNPKEWEIENYKEIEGNNTNTFLFQAFSHIVELSGHEVSKSGLVESISGVFETLGIDTNILEFDSDLDGQELEKQPSYQLWHLLYSYEGDNSETGNDRLFELLKNKFGFDKEYAKALIRIAFQDDHGSLSAKAIKRILPFLKAGHEYSEACTLAGYNHSHSLTKEENEKRILYDLMELLPKNSLRNPVVEKILNQMVNVVNAIIKQYGKPDEIRVELARELKKSAKERANTTAAINSATKVNENIKEKLQELYPFNTGVRITKNDVIKYKLYEELASMGYKTIYTNTYVPLEKLFSKEFDIEHIIPQAVLFDDSFSNKTLSVKDFNRVKSNKTGIDAVAEKYGKGSTDYIRYIDNAEKLYKDGKITKAKYHKLMMKSSEIPDGFIDRDLRNSQYIAKKAQEMLKKVVRTVTPTTGSITAELREHWQLINVMQELNWDRYERLGLIYYENNKEGQKIPKIKNWTKRNDHRHHAMDALTVAFTKHSHIQYFNHLNARRDENHKKHSNIFAIEQKETFLNDKKKRLIKPPMPIEQLRAEAKKHLENTLVSFKAKSKVITTNINRTKKGGGENKKVELTPRGQLHKETVYGSSNKYKTKTERVGPRFDLDTVSKVAKKSHREALLKRLHENNNDPKIAFGGKNAPSKNPIYLDEHQSLTLPEKVKLVWLEERYTIRKDITPDDFKTEKNIEKVIDIKQRKILLNRLKEYKNDAKAAFSSLEENPIWLNREKNIQLKRITITGVSNTEALHTKKDHFGIEIIDKDGKPIPVDFVSTGNNHHIAIYRDEDGNLQEVVVSFYDAVARINANMPVIWYNHPEHPEWEFLFSMKQNEYFVFPNKKTGFDPSEIDLTDENNYHLISLNLFRVQKIASKNYVFNHHLETSAVNNDTLKNKLLASITYQFVQTPLKLNDIIKVRINHLGQIVKVGE

SEQ ID NO: 6414 - protein, 1043 aa, unidentified
  REGION 1..1043: note = Description of Unknown: Cas Enzyme sequence
MCKEKILGLDLGSNSIGWAILEGKDGIPYEILDAGCRIFNKSVEDKTPTPKNVKRRERRLARRTLQRRSRRKKRMLNYMIKLGLLPEILKNSLQPEIALNALGNPYHLRAKALDHKLSKHELGRVFLHLVQRRGFLSSKKTLLGDMLDDPDVLSVLAEEELTDDEVPERAKEETAFKKDISELRSLIEKVNCRTLGEYLSGLAHHDCKRNRSREGGHLRTDRQMYKDELELIWQQQSNHHEVLTPDVKEQIEHIIFHQRPLKLKAGRQGNCSIEPSKKRARMGRLEVQKFRYLQDINNLQYLDPNQREWSSIQKSDREELIQLFEKDPTPTFAKIKKTLGLNRRTEFNLDSSVKKLKGNTTACKIRKVLIEWDDWTQEKQYLLVEDMITINKKSVLKNRLINHWCLDAKTALKLCMIEFEPGHANLSSKAIKALLPFLNKGQIYSEARVSAGYGYDKETVNEVNRLGSPPDIPNPIVSKALHELRRVVNALIAHHGKPDVIRIEMARDLEMNTKRYKRFIKQQKENTKSNDEAVEKYREMGNLNPHLHLTAYPGRDDKLRYRLWKDQDERCAYSNQVIPLSALFSPEVEIDHIIPYSKSLDDSYMNKVVCLTGENRYKGQRTPVDAFKGNKEKWEQITQAVQKWGKPLRSKKDRFYMTEDQVSERDFINSQLNDTRYICKEALVYLKQLGSDVTATKGFLVSWMRYQWGLDSLIGETDKKERTDHRHHTIDAVVIACIDRTFHRRLVYAAHDAEKKGLELKTRTLSINPPWETIRRDTEAALDKIVVSHSPLRKLAGSLHEETGVGFIEGSGTVYRVELNGEFKLTQVKKIIDKEVRAIISEHLTRYDNKSKEAFAQGVRIYHKDGVTPIKRVRILQSKTTAKKLMQSKFPVKNKKGDVFKWMAYGNMHHVEILKDKETGKFSGMFIPMMEAHRRAMTGTDSAKKRGVVFEPIVKKDHGQKRTFIMALHRNDIVSLRKNGRREYYRVQKFKSLNKQIILRLHTAATIKNDSDTFLARESTIPALMKNHLKLHKVNTIGKILND

SEQ ID NO: 6415 - protein, 1056 aa, unidentified
  REGION 1..1056: note = Description of Unknown: Cas Enzyme sequence
MRFNDDLVLGLDLGTNSLGWALLRKEVGSNQPTHIVDAGVRVFEAGMDGDIASGRAESRCAERRDARSIRRNLARRRRRMLKLQHLLQKYSLLPEGDDIEVIILKLDEEARKYCRSINQETRPSDKVIAHTYPYYLRCLALDSELPPYLLGRAIYHLAQRRGFWSNRKSLTDSEEGVVKEGISQLSKDMDEAGARTLGEYFAYVDPTKTRIRKRWTARSMYKDEFTQIMKMQSELLTDAQVKQIEKAIFFQRKLKSVKHLIGHCSLEKNKIRCPWYRIEAQQFRILQNLNNLRVTEFDGTLRDLSQEEYSKLLVILNAETDDLDKNGNIKITKARKLISLPKGATFSIEAGGEKSLKGNRTLAAVKRVFGDRWDEFSDSDQEKMIHDLHSFEKEKPLIKRAMNVWKLTPEKAVEFAAIRLEADYCNLSLKAIKRLNPLLREGMAYSEAVKEVYPDSFKSDGIVHDHLPMLNTASLDLRNPVVERCLTELRQVVNSVIRKYGKPGSVRVELARDIKRSNKEKKSLIKKNRELEKERNIARNEIETEFPAYKPNRDDILKIQLAKECNWICPYTGRGIGLKALLGTHPQFEIEHIIPRSRSLDDSYINKTLCYTEENSKKGNRTPYEAYHDTKQYDDILNRVTSFNGRLSGRKLELFEMQPDEVEKQFADFSSRHLNDTRYASKEAAAYLGLLYGGVNSAIDGKRRVNVLSGGLTYNIRSMYNMNNILGDGDLKTRDDHRHHAVDAVAIAMTSNATVQKLSKHALSLEESGNNYIHFSMGDGKPVENWDSFLDDLEETIDKIKVSHHISKKVRGSFHKETFYSKEHDFTKNGKEIKVRHVRTPVEALSIKDIDRIVDSGIQKAIIEKLTQLGMTDPKKAFKEPENHPVLKSSDGRTRIPIHKVKIRRTQNTITVGEGKRQRNVVTSNNHHMMIYAELDDQGDEIKWHGEVVTMLEARQRLISGKPVINKVNEKNKKFKMTVRRGDVFELDVKGNREQVLVRAISEAKTISFVRINDARLKRDIMNSHEWFFKQPNTLRTSNPIKYTITPLGELRRAND

SEQ ID NO: 6416 - protein, 1107 aa, unidentified
  REGION 1..1107: note = Description of Unknown: Cas Enzyme sequence
MSDYILGLDLGPNSIGWALVAAEEEEGELRPTGLLDTESAGHPAVGVRIFEAGLQNFETGKEASRNQARRQARAARKTIGRRRARKRDTLAVLQEAGLLPQDSAELADAWDLDPYALRSAALDRRLTPIELGRALYHLAQRRGFKSNRLSGDEKEEVGLLKEISRLQSSIDDSGCRTLGEYLDSQRKNKSGPLPVRLRARQVRMDLYEDAPRRTRRSMYETEFDAVLDAQTACWEEPPLSAAQRDRLHRALFFQHPFAVSDERRKKSPSRANLHRAPSVHPCPYEEGEVGCPRSDWLAQRFRILKEVQSLRLSELHRRERPLTQEEALHTVDYLSSNGESSFSSLGKELIKHFKLEQPLEFNLARGGRGKIKGNNLEATLARAFGKKIWRALEEEQRSTLRRALVECTSTEELDQTLIDGGLRDSKKRKKLCHYRPKDDGYLSFSKRALEKILPLMEAGKLEHEAIAEAYPDTFEADGLDLLPSLVAMQLDHAVRPTIPPQIQNELTNLTNPIVRRALTELRKVVNALVREHGKPARIVVEMAREMKQGKRARKEHSLRMNRRRKLRDKARDALRELRGGVWPKREDVNRWILWEEQGHGCPYCGKSIAMHEVANADLEVDHILPRWQSLDDSMNNKVLSCATCNAEKGDRTPVAWLGKKSGRMAALLKRVRSCIERQDNPGGMPFGKVRRFETESIDAEQFAQSQLNDTRYISKLVASYLLLLFPTEEHRGQKRVNTSRGNMTAHLRRLWGLNGIIPPLVQAHGEIVPGIIEHDGWDEKVRVDHRHHAVDALVVALSSRAFMKRLQDSWRPTRGAARGNGVFEEPWDTLREDTLHAIEAINVSHRPMRRKRGALHEETYYGEVSRKDGVYVTRKRLDELSGKWVASIRDNRVRETIESRLKERGWDGSANSLPKDWYREELFLPTRAARHGRKERRPHPIRSVRVTTTIGEAVQLGDKGHRFAKPGGNYCLEVFGSAEEPHTRFRVVPRFHANQHDRPENPPANVRLLGTLFRKDSVLVNIEGLEDPVLGVVQVISGRPEISTAGLDVYIRDVRDSRPASQRNKTPLARIQSLGKWNQLGVRMTTIDPLGRLTPGTWLGEKHTTAP

SEQ ID NO: 6417 - protein, 1131 aa, unidentified
  REGION 1..1131: note = Description of Unknown: Cas Enzyme sequence
MAARTLGLDLGPNSIGWALVDEEENRIVDLGVRVFPEGVDQFDTKREKSRNENRRIARGMRRQTKRRGRRKRRLSDALITCGLFPSDPAEQDKLYQLDPYELRTKVLDEPLSPHEIGRVLLHLNQRRGFLSNRKKDRGDSEVRGMLEEISNLAQHIESGDARTLGEYLFRKHDSFDHASRAEDDHVRNRHTRRAMLEGEFERIWDAQAKHHPGLLTEQLRYGQAGKQTYPCKPKRRPKKLSDLEAFGIHGMVFFQRKMYWPKSVVGLCELEPKQKRCPRGDRHAQRFRLLQEVNNLRLIDASRNIERSLHDDERKLLLDKLSHKKERKFDDIRKLLGQLPDSPPPEQIHFNLERGKRTKLQGMIVDDMMAAKKVAGSPWHKRPEEEKDVIVRMLLDNEREDDIVAERLVDEFGFTTESADAALGLDFPPGYVSLSLVAIDKLLPHLERGLVYQSESDPDKSALHAAGYLRRDELQRRLFDRLPDPGRMNPRHCPIGDIPNPVVKRALVELRKVVNAIIREYGKPDAVHVEMARSVRMGRKARGEYNSRIREREQQRDTAAGEIRNLKETYPALSSLRVNRDSILRYLLWEDQNHECLYCGQAISQQQLFGGDADVDHVLPYSRCLDDSQANKVVCHRHCNHDKENRTPYEWLADADPPRYERICQHAGSLMRRGSLPYGKYRKFLQNELNLDTFIARQLTDTGYITRATAEYLRCLFEHDHDVLGLKGQQTAELRWQWGLNTILRDDDEDRKSRDDHRHHAIDALVVAMINRSRLQELSRIRKAGYFDRKTGEVHELPAPWDNFRGDVEEYVDKINVSHRVRRKVAGALHDEMPFGTTPQPDVYVKRKPVADLSANEVEKIRDEGIKRIIVEHLKSHGLEVGRGRGKDTKKFKQALSDLAMPSGVPIKKVRLEIPELTIQPIRQTKADDREDSTCVAYVRPGDNHHVCLFEWEENGKVKRDGEYTTRLEANRRIRNREPLVRRTHSSNPDARFLMSLCLGDLVLVEFDGESRLMVVSKLVSTQKRVHLVDARDARKSSEKEDVGLSPNSLIEKYRARKVTVDPIGRIRWAGGSSGEDVSMDDIDPEVMTIARETVASQGSNTQAHKRLKRAGLKHLGAQLSATLRHVRKTQ

SEQ ID NO: 6418 - protein, 1425 aa, unidentified
  REGION 1..1425: note = Description of Unknown: Cas Enzyme sequence
MRTLALDIGSNSVGSAWLDTEERFVKVAASVFPAGVSEAEDKRGAPKNQDRRGKRSLRRSLARRSARKRQLRRFLTERGLLPSDSQQLKAVLAFDPWELRRKGLDRFDPEVPERPPLSPYEFGRVLLHLCQRRGAMGLKLPEPEDSDEENDAKKKRRNTKDEAESSDAKVKGAVDRTRSLLDERNATTFGQLVAELIREREHVLRDEKGNQRTSKKGNPSRYFDPVRNRGGVFNLHADRTMIREEFQALWSSQESFDGPLAKILTDDLLLELDDPSGDDIWRHKGLLFGQRRTYWDTGTLGRCDLEPTDRCVPIADRHASYFRVIETVNNIRIQRLGEPDQPLTVEQRLKVISLLQGPLFMKRKGELVPKKSASVTDIREALGLGRRRKKDPVALNLEKDEEREINTDWFHREVVIAAIGEATWQEWNDETKEKLNRALLRFDPQVDDDAERVSNFARELALGSDAVDRLVAVWQTRPKLERRLKLSRRAVLNLLSFMERAFTDLKRGDGPIPVYWVAECDFDATRHRWLTQIEAREAFARHHEATFKPTGDKAADKEMEHRIRRYQLGGNPLSSADRYFMRKHPDVLPPAPTMANPVVRKAIHEVRRHVIAYVREFRGKPDRIVIEFARETTKSAKASDRILFRNRNRNRIRRQIVDEVVRPVFGSREFNQLSNNQMRAAVDRIILCIQQRGVCAYSAGKFDGNTEGSCAYSGRPISLRQAALGHGLEVDHIIPYSRCGDNSLSNRVLCYREANRDKTNKTPREWWGDQFEERIAPVRFMDGYEPDRRDYFTKRDYAAKWRNFARTEVPKEWHGSKLTDTAYAAREVQTYLQQALWPDEPAFHQGDTNRRVFVTKGAYTAILRKDLRLYRSLLNRDASPEEVRHAAAKNRGDHREHAIDGVAIALAPDGMQDLAAYAKRVDEEREKAASQGRQPRKLKRNPLPPPWGNVESFRREVLCQLFEDVEPPHDRDSSRPQLQRIVVSHRPVGRKLVGKLHEDTLFGPIPDGDSLYTGHKAVADLEANHLRMPRGETEKQAIARIAKHLLQRRKEATKAKARKRAKEIVCSPGFKPKLVDPPPEKSGLVRDPELRRILREEITNRIAEYNEQVVQNEPQEKWDKLSIKNDVDSFDKRDVNKILKAGPLRMPSGVPIKRVILLRTMKDPVVVPRRRFDHEQQRWVRDQGRAESAPEANQRTRADRAYVGGNNHHIEIREDERGRWSGVIVPTFEAARRVRIEKRDAVDRSDDDAKGGRFMMSLAEGETVYMLHKDTREPGYFVVFKLDKPQKIQFKPHWDARRAKGEKDDHGKLIVGSHREEIPVSAAQLKALAPPGEATPIKVAIDPLGRPRRIEPLSPGQDAPEIDPRVMAIARDAIAARRNREPIAGGKKKRRQPGSWSWMHARLSKEKIKHLAPQLSQVMRLLDKQ

SEQ ID NO: 6419 - protein, 1046 aa, unidentified
  REGION 1..1046: note = Description of Unknown: Cas Enzyme sequence
MEKPAPYALGLDIGANSVGWAVLESDAGNGAGLIAAGARVFEAGTEGDIATGRDQSRGVERRLARQQRRMTERRARRLKKIAGLLQRGGLLPDGNVADPASRDKLLAALDRKIMKRYAETVPEDDPSRARLPRLPYFLRARALDRPLDPHDLGRALYHLAQRRGFLSNRRESASEDEEKEEGEVKAGIAELERHTADAGARTLGEFFASLDPAQERIRQRWTSRQMYEDEFEAIWATQAPAHPDVLTPDLNKRLHKAIFHQRPLKSQKNLIGFCELEPGRRRAPWALFIAQRFRIVQNVNNLDVITPEGEIRPLTDEERSDLIGALDKQGSMTFGKIRTLLKLKGHKFNTELGGEKSLKGNTTAAKLIKVFEKRWDDISPEDRDRVVDDLRSIQKKETLEKRGRTAWGLDAEQAKQFAGIRLEPGYCNHSRQAIEKLLPLMDKGAHYATARKKLYGDEPPRKPTGQLPPLAEAFPELRNPVVARALNEVRKVVNHVVRQYGKPEVIRIELARDLKRSRSDRKDITRRNQENRKGRERAAEKILAETAIREPSRADIEKVVLAEECGWQCPYTGRTINMAGLVGDAPQFDVEHIIPFQRWLDNSFLNKTLCHHEENRNVKKGRTPFEAYGSNPERWAEILQRVKKFKGKAAGKKLRRFALEEVESIDDFASRQLNDTRYASRLAADYVGLLYGGRTDPDGKLRVQPSRGQVTHFLRDEWGLNAILGDGGLKTRDDHRHHAVDAVVTALATPAVIKRLSDAAGRASRERRKRFGKVDPPWSGFLDDVRRAVEAIHVSHRPDRKVSGALHEETIYSPPIEETDKDGNVHLVHHVRKPLDGLSKKALNQIVDGHVRELVLAKLRELGGGDPKKLFADPASHPRITIKRGPRKGQTIPIHTVRIRVPERAKKIGKGHRARHVLTGSNHHVEVLEVKDKRGCVKWDGEIVTRYEALRRTQRGEPVVTRDHGPDKKFLFSLCNGDTIQMDDRTILVIRSMWQEKGSIRFTLVDNNDARKLQEARLRMNLNQLRQRGAQKVTVTPLGDLRRASD

SEQ ID NO: 6420 - protein, 1035 aa, unidentified
  REGION 1..1035: note = Description of Unknown: Cas Enzyme sequence
MVKKTGRRILGLDLGTNSIGWALLEEQDGQFHQIIDLGSRIFIKAVEEKTPTPKNQKRRNARLARRVIQRRARRKQRMLHYLISLGLLPNTLEDHPQPEIILNQLGDPYALRARGLDHSLQPHELGRVLLHLVQRRGFLSNRKTLLGDLVDDPDVISALHELGEDDPGATTNKEEGDFKRDISKLRKDIEEAGKRTLGEYLASIEVPYCRRNRIRDGGHLRTDRLMYREELALIWKQQALHHPMLSDEIREELEQIIFHQRPLRLRADRVGKCSLEPRNNRARMGRLEVQRFRYLQDINNLQHLDPYQNQWIALTAEDREKLIELFESKSVVTFPQVRKQLGLDKKREINLEHGGNKKLKGNITADTIRKIFPEWDQLNDSEQHHLVEDLLTIQKKSVLKKRLINHWKLDSKIAIQLCMVELEPDHSSLSLKAINRLLPYLTKGMIYSDARQAAGYGYEEVETEVLNRLGPPPEIPNPIVQKGLHELRRLVNAVIAEYGKPDAIRIEMARDLEMNSKRYKAFTKQQRANTNANEEAAEAFRAIGSKNPHLHLSYYPSHSDKLKYRLWSEQEQRCAYSNHPINLTTLFSSEVEIDHILPYSESLDDSYMNKVVCLTKENRYKGQRTPIDAYGGDEDRWNQITQSLSRWAAKLKSKRNRFYMTAADVQKRDFLSSQLNDTRYISRVALEYLKRLGTEITTCKGATTAQVRHWWGLNSLLGETHQKERTDHRHHAIDAAVIATIDRRFYNTITRLAKELEHRHTSIDELHVDSPWPAFRDHLDQKLSQTIIAHTPQRKLTGALHEETGVGFIEGKGCVERKNLDGKMTPKRAGKIIDDTVRELVLDHLQKHGNKPKVAFAEGFQLSHKDGKTPIKRVRILQSSTTLKKLEQSKFGIRNQQGDIFKWHAYGNLHHVEIVRNHKRDKVVGHFVTMMEAARRARGIGMPKQPMIRRDHGSDQELLMALHINDLVSLNIDGERRFYRVQKLDSGINRIMLRLHTAALLNNKQEEKHLSVNHKLFDQWGLQLHTVNAIGKIIE

SEQ ID NO: 6421 - protein, 1082 aa, unidentified
  REGION 1..1082: note = Description of Unknown: Cas Enzyme sequence
MADYILGLDLGPNSIGWAMLEAEVRDEDGTASIVEKGFLDTSNAGHPPMGARVFEAGLDNLNTSKEKSLSQKRRTSRSMRRNHARRNARRKTLLRHLIHADLFPGNPDERELLFKQNPYKLRTLALDERLDPHQLGRALYHLSQRRGFKSNRKSGKAKEDKGILKEIGQLAKDIESHGSRTLGEYFYHLSQDEPGSFRPLELGWLRIREQHTRRDMYEDEFQKIIESQQRFHPIALTDELIKKLHRAIFFQHPFELTDERRKRAPAGANLHRAPSVRPCPLEPDEKCCPKAEWIAQRFRILKEINNLKIAENFGLERALSEEERKTVIERLSLSENVTFDQIRSTLAKHGCDPEALFNLERGDRKKLNGNIIDSKLSAALGKKKWKELEVTTKQNLRNTLLHSEDPESLETTLIDAGFDKEKAEKLAGWNPPEGYIGFSEKALLLLVPHLESGLDEYEAIQKEYPDRPEGHEVDQLPALTSKDLPYDLRDITNPIVRRALVEVRKVMNALIREHGKPRRIVVELARDMKAGPEERKRYSRQRYERESLRDRARKEVEDLGGNPNSRNDINRWLYWTEQDHSCPYTNRRIPQDELFRGGEWEVDHILPHWQSLDDSMNNKALVLRVANEEKGDKTPAQWLGVESEEFRKLIQRVEGMVRKNGLPYPKLLRMKQEEVDTGDFALRQLNDTRYISKAVVKYLNLLFPPELRKGELAVQSCRGGLTWELRRRWGLNNVLDDMLDKEGNPVLSPEFDEDGEPKKSRKDHRHHAVDAVVVALSSRRNLKRYQDYWKKHSRSAQRPFFEDPWEGLRDDVSHHAKAINVSHRAVRKVDGPLHEETYFGRAFDKDEKPISDTYVTRKPIESLTGKMVKHIRDHYVRTLIETRLAEKGWGGKANALPKDWWIEGINIKSKASEEGIPVRKVRIEEVHSNVVDLGHRFAKSGSNHHIVFFEVPNQDSDKQPTLDARIVSRMEVAKKVRQDKLPPISRNHGAGGHFIMSLCRKDSVLLSDHTGSAKRLCIVQSISTGTEEMPFYLVFRDARDSRPASEGNKTPFQRLVSEAAWHRLKLEKVKVDPLGRISIAND

SEQ ID NO: 6422 - protein, 1042 aa, unidentified
  REGION 1..1042: note = Description of Unknown: Cas Enzyme sequence
MGKPQYRLGLDLGVNSLGWAAIRVEDGTASGILAAGVRIFEAGVDGMEKDGKGVSRNQDRRQARQIRRQLERRSRRRVKLFRLLQAQGLLPRGECGSGDLRNRLLNRLDEKIKKSRFGGTPSQDVQIPYALRTLALDEKLGPFELGRALYHLAQRRGFLSNRKSGKKENDEGPVKEGISFLAGKISDSGARTLGEYFNGLDPAESPIRSRWTAREMYRSEFELIWEGQVRHHPELLTPALKEQVFSTIFKQRPLKSAKHLIGRCELEPGKHRAPLACVDFQRFRYLQRLNDLEVLEATGELRPLRVEERDLLTTAFEEKGDRTFKQIRTLLGLKGTHFNLEDGGEKRLTGNRSYTKVAAAFGEGWASLPEIERRELIEEMLSVGKEAVLARRITKLWGLDAESARDVAAVQLEDGHARFSRKALRRLLPALESGIRLNSAIKAEYGDQDKESQALDQMPPVLTAIPELRNPVVNRSLTELRKVVNAIVREYGKPEFIRVELVRDLKKSPKHRESAWKRNRAREKERKAAAAEIVNEAGIQEPSRADIEKVLLADECDWTCPYTGKAISMASLFEGNFDVEHIIPFRRSLDNTFLNKTLCEANENRRLKGDRTPEEAYGGDADRWEEIQERVSRFKGGLAREKLRRFRMTDDEVQDLLDDFTDRQLADTAYAARLAVNYLGSLYGGPIDADGKRRVRVVGGQAAAFFRSEWGLNPILGDGPRKSRDDHRHHAVDSIVIALSDDAQIRNLSTAAGRAQMEGRRRFGKVDPPWPGFREEAAAVIDEIVASHRRSRVLRGKLHEETIYSPPRDETGRPNASGGYVHIRKPIDKLSKSDLENIVDDSVRDAVDGKLQELVLPPDRAFADPRNLPLHPSGDRIKKVRVRRKQHITPLGKGFRERHVMTGANHHLEVLLTKGKNRQEKWTGEVVSLLEAVQRRKRGEPVVRRDHGPEKEFLFSLAGGDCIELVDGDGVVELFVVRVISSVTTNGIEYPRVSFVSIFDARKKADILSAKDWQSMLLDPLRRRECRKVMIDPIGSCMPCHD

SEQ ID NO: 6423 - protein, 1001 aa, unidentified
  REGION 1..1001: note = Description of Unknown: Cas Enzyme sequence
MGLTLGLDIGPNSIGWAVIHPEENNIVSTGVRVFPEGVENYGRGGSQESKNVSRRVARGTRRQHQRFKMRRDNLIFQLSKLGMYSKSNSQAFYHLDPYEIRSRGVSKKLSLIEFGRALYHINERRGFLSNRKAGDSEDSKIYNTKDDRIGITDTEKAIVDSGFSTLGQYLFSLNPHEQRRRSRYTLRKMYINEFELLWSKQAEYYADILTESVKDKISGTIFFQRKLKSQKDKLSKCTFEPKKRVSPKSSPTFQNYRILEQVARLRVTTETRKADFLTQDERTKLIEMLNKKNKMTFKQVAKLLNISGDVSFNLEHEKALRGNNTFYELAKIFRNEKWNKFKQDEKNEIWHTLHFSDDPEWLKQYAINKWLLSTEDAEKLSKITLEKDYCRLSHKAMTKIIPFLEKACTEKGEPMTYDKAVREAGYHHSKINQHEGKMIKLPATPDFRNPIVQQAMNEIRKLVNTIVDEYGNPETIKVELVRELKLPRVRREKIFNENQTRRKEHNQIREILTTDVGIKFPSRDDIIKYKLWEESDRTCLYTGNKIHSVSQLFNGEYEIEHILPYSKSLDDSYMNKTLCHRDKNLEKGNQTPEEAWGGTPEYDKIIERVYRLVKEKKFPYPKYKRFLQKDIKLEEFIHRNLIDTAYIATEVQKYLKYICTDVQSVPGTATARLRQFWGLNTVLSGDLDIKNREDHRHHAVDALVVATTERKYIQHFSTFHHYKREPKREHFPIPWERFREDAETSINQILVSHKIKNAVKGRLHKESMYGIIHDKNGEPKLDNKGQILYGIRKSALRLKSSEIKKIADPMVKQAVMGWYGFDKDKRPKYPLLPSGVPIKRVRVHDPHSNVIELRPGVFVEPGSNHHIVIFEHIETGKRVGKVVTLFEAVRRKKHKLPIVDKTPEDGYRFIMFLSINDIVLMDDYLEIQDISKPLNPVKIWNKLYRVQKMDANNNIILRKIEIAVLKDDYGNEPGILRKSASTLKGLKVRINYLNKCYPHFD

SEQ ID NO: 6424 - protein, 1042 aa, unidentified
  REGION 1..1042: note = Description of Unknown: Cas Enzyme sequence
MVNKKDSKQMVLGLDIGSNSIGWALLEADGNTPNKIVGLGSRIFTKAVEEKTPTPKNVKRRNARLTRRVLQRRSRRKQRMLHYLISLGLLPAELKGHDAPEVILNYLGDPYQLRSQALDHPLTEYQLGRVFLHFVQRRGFLSNRKTILGDLVDDPDVMAVLAEEEDTEDRSSERAKEETQFKREISQLREAIDENGYRTLGEYLATIKAPHCKRNRIRDGGHLRTDRQMYRDELELIWEQQSNHHNLLTDEIKEEIEEIVFFQRPLKLRSDRIGKCSLEHNKKRARIARLESQRFRYLQDINSLEYFDNHTDQWHKLSDEDREKLVDLFESRENVTFAGLRKALGFDKKTEFNLERNSNKKLKGNITSCEIRKHYPEWDELTDRQQYDLVEDMLTIGKKSVLRKRLITHWGVPSETAIQLCMLEFEPGHSNHSLKAINKLLLYLKDGLIYSDARQEAGYGYEKEETEFIDKLGAPPEIPNPIVQKGLHELRRLVNAVIAEYGKPDVIRIEMARDLEMNTKRYKAQQKQQNLNTKANDQATDEYQKIASANSHMHLSKYPSHTDKLKYRLWLDQDKRCAYSNKTINLTTLFSADIEVDHILPYSQSLDDSYMNKVVCFAPENQYKGQRTPIDAFGNDEEKWTQIAQAISHWGKKLQSKRSRFFMRNSDVQKRDFISSQLNDTRYISKVALSYLAPLVGETNITTSRGQTTAWMRHQWGLNSLLGETSQKERTDHRHHAIDAAVVACIDRSFYQGIVKLAKTLERENSSLTMKDLHIDPPWDDLRDDLSTALDDVIISHAPLRKLTGALHEETGVGYIEGIGCVARKNLDGEMTAKRAEKIVDPTVCEIVLNHLQKFGNKPKEAFAEDVTLYHKDGVTPIKRVRMVQSRTTMKKLEQTKFGVRNQKGEVFKWLAYGNTHHVEIIQNRKSGKVSGRFVTMMEATHRARGIGMPKQAIIQKDHGDDGVLLMALHINDLVSVLSDYERVYYRVQKLDSGINRIMLRLHTAANIDNKEEELHLTINQNIFDQWELQRENTNVIGKIIE

SEQ ID NO: 6425 - protein, 1064 aa, unidentified
  REGION 1..1064: note = Description of Unknown: Cas Enzyme sequence
MGAKNTARPRNAVLYRLGIDMGADSIGWAAVREEKNGRPAGILAMGVRRFEAGVLGDIDSGRDESHATARRNARGPRRLTWRRQYRLRKVFRLLQSMDLLPPGKDDSHDERHRVLADLDRQLRDARLEAGEQRIHDVLPYLLRARALDEKLSRHELGRALYHLAQRRGFLSNLKADKQGDEEEGVVRQGIDKLEGLLHEAGSRTLGEYFAALDPERDRIRCRWTARRMFQHEFEQIWTAQAAHHTDLTDERKQRLFDAIFFQRPLKSQKGLIGKCGCEPTKRRAPTACLEFQHFRVLQKLNNLEVICPDGECRHLSDEERTILLDEAAEKGEITFGRIRALLKFRRSREYGRKYTFDIEAGGERRILGNRTAARLVGILGDRWREMPLDKQRNLVNEILSFESEDPLVSRLTAGWQLDKATARQLAQAPLERGCGSLSRKAISKLLPGMQNGKPLATAIKDVYGETRHESKPVDRLPANHDCAVLRNPGNPTIARALSELRRVVNALLRKYGRPETVRIELARDLKLARPARKRMAERNRSNEKLRDVAARIIVDEMKDERLCTERNKLKVRLAEECNWECPYSGRIISMKALVGDHSQFDIEHIIPFSRSLDNSYINTTLCYHQEVRERKGHKTPYEAYAHTDRFDDILVRVRRFRCGPRTRRRKLGLFQIEKLPDSEEFNRRQLDDSHYISRLAADYLGLLFGGQIDGDGIRRIRVNPGRVTRYLRQCWGLNSLLGYAGCSERADHRHDAIDALVVALMGADEVQLLSRAAEEAKRTRQAGLFVAVDPPWSSFLDQSQGAVDAIRVSSRIRRRLSGKLHKDTIFSRPKPGRDKQGRPTAFHHVRKRLAALSKREVANIVDGRVRRLVEEKLEQTGGTPDKAFADDANHPYAKTADGRMIPIHKVRIRKPDSPMIVGKGSKRRYVNPGSNHHMEIVAVLDDDGNVKKWEGHIVTLFDAIQRHRCGEPIIRRNHGKNRQFKFSLAVGEHVEMEHKGRVRALYRVFTVSGNRLEFRLHSDARPQALLRKKEFSSGRVYSSPNGMRKANAQKVSVDPLGHVRPAND

SEQ ID NO: 6426 - protein, 1045 aa, unidentified
  REGION 1..1045: note = Description of Unknown: Cas Enzyme sequence
MTETSVLNERFHHGLVIGLDVGTAGLGWAVRRGPDLLDLGVLVVPEKVGNLEERRTLRRMRRTIRSRRQRMQQLRAMLTEVGLPSPGANAELDSPAVLRLQALNGEPLRPEELHAALFHLWKHRGWLDAWWKKKTVERTADDEPELTAEQKTAQKEAKETAARIAGLLAAMKDRGCRFACHYLALKEGRWDRTMGCLPRPKPGQAIAPEGHKNLIFPRELLREEFLAIVEAQRERWPTLYVARERILYGAWGEDSHHPAPEAAGRQHRLHGGVWHQRQARFDNRKPGKCVACAVNNVCRADAPEFAEAQRAIVLGNYRVFSAVQGKAVPVGQAALPELADILAKHQAGLKELRALAKTGGYTPLEPGIKKKDQARDLLVQQWADRNGYELLPGQQLTARKLSDGRCAFCRPCLRAVRYEYERTGTIRTFQPLLRRPGESLASARARYVRELRNPLVRQRVEALDRLLDRLERDHGSPAVIVVEAVRSLGLGKKANDDLKKKQATQREEREAARQEAAEHHAAGSQAVLRFRLAKEVGKVCPYCHQPFHADLADAEIEHILPRALGGSDQQVNLTVAHTHCNHEKHDQLPHAAWGEADRWPCLERFAREHFKGLKLQLFLHQGNPEEALALLAPPADLTQTAYIARALRGLCLLRQNWLTPEGRDPSDQPGGPGQFFQLTNGYLTAGIRRCWGLDELLPSALDDEGGKNRHDLRHHALDAAVIACTLPWAAHQPLSRGGWREAPPFGSARREQWRTPFDHLRSQIRARVPDIVPTQKVGTSAKQKMMNTTAYGPRPQRDRKGKETTVLVTRVPLVQLKEKQLNDIYPQVLMRYIAAALSEFRRTHGDEHAFQQKAPNTGKLSPAFVATLHNPGTGRPIHKVHVLGKDPAACREVRPNVFVEYTDATAYLVYPDPKKGRTWAVYLVKPWEKLGQLRASFPTPVYVFQKKQLIEFPREVVVSATNKAQAGKYRFMSCNKNGNVRLCPAHIVQGKEGFLSAGLPYYGFELHIRHLMEALGYGASPPPPAEAGVAAHPRPKPPHPQRRRG

SEQ ID NO: 6427 - protein, 915 aa, unidentified
  REGION 1..915: note = Description of Unknown: Cas Enzyme sequence
MEKINNYTLGIDMGTNSIGWALVEHDDNLQPSGLISCGTRIFQEAVDAKSRIPKNQARRAARSARRLVARRKMRLNKMLNILLKNGLLPNNADEREKLFADNKSFDPYQLREKALDNNLTPYEFGRVLYHLAHRRGFQSNRKVSSKEDGKIKSSISSLRQEIKNAGLRTLGEYLAGQPKKRKRYTDRSMYQEEFELVWQEQQKHYPDLLNQALKVSTHKAIFFQRPLKLQKYLVGKCTFEPSRKRAARALLETQRFRILQDLNNLAIKNPITREYRILTSNEREKLLELLERQKTLSWNKARTALGLHKGEIFNLEEGKKKELIGNRTAFALRSILKKYWDEMGQAKQNNLITDMLTIDNEQGFLNRMTSHWGFDSETAEKLATTERETGYARLSLKAIRKILPHLERGLTYDKACNVAGYNHSVLNQQTALDKLGAPPYMRNPVVQKALYEIRKVVNAIIHRYGKPAAIRVEMAKDMKLTRRQREEWQKKQKENEKTNDKARDILQSDFGIQNPTRADIQKYNMWTECNMTCPYTGVVISREMLFSPEVDVEHILPYSRSLDDSYMNKTLCMAAENRTTKHNKMPYEAYHADEAKYQSILQRIKTLPWPKRRRFEQKEIDTDKFVERQLNDTRYICVEVRKYLQQTGVSIEISKGEATAALRHRWNLNRILAEDGSSEKNRADHRHHAIDAIVITLTSRSLFQKLSKLSAQSGVALSERGFRPDNPWQSFYEDVREKIERITVSHAPSHKISGALHEETAYGYSSNDRCFVYRKPLSSLTNNEVEKIRDNKIKQLVLARIAQFSSNLKKALGDANNQLMHADDKTPIKSVRLAVNLNQNKVRSIKNHEGKTYKFFKYGNNHHVEIIENINTSERRGVFVTAIEAAKRARMDKTGIVRREHGPEWRFVMSLCIND

SEQ ID NO: 6428 - protein, 996 aa, unidentified
  REGION 1..996: note = Description of Unknown: Cas Enzyme sequence
MKKTTLGIDLGTNSIGWALIEFDKDQPCGLIDSGVRIFQEAVDVKTKIPKNQERRGARAARKLVSRRKMRRNALRNLLKSNSLLPQDQSELEKFFSETEPYALRKQGLDEELTLFEFGRIIYHLDQRRGFLSNRKAKDKKEEGKVKEGISQLKSAIGNDKYRTLGEFLVTQPTQRKRYTDRGMYRHEFEMLWTAQQAFHPQILTPELKDRIHKIIFFQRPLKLQRDLIGKCTFEPTRKRAAKALLPAQRFRILQDINNLKVLNPINREMRDLTVDERELLFDVLENAKTLTWNSARKKLGLHEGEKFNLELGNKSKLIGNRTACDLRNIVGKTCWNDWDSEQRNQLVTDILTIDHEDGFLRRMKEHWHFNDETAEKLLNLELESGYMNLSLKAVNKILPYLEKGELYDKACLSAGYIHSVPDAPIEPEEKLGTPVELRNPVVQKALWETRKVVNALIKKHGRPEVIRIEMARDIKLSQKQRQDVQKRQIKQRDENERINEILRDEFNFQQPSRDDRIKYQLWEECSHICPYTGKPISREMLFSPEVDVEHILPYSQSLDDSYMNKTLCLAKENRQVKRNRSPYEAYHTNEEKYQEMLLRLSKMKSMSYFKRRKFEQKEINTDEFIERQLNDTRYICTEVKKYLKQLGVNVDVSKGFATAQLRRKWRLNDILPPPKDVMKGRFVEKIRTDHRHHAIDAIVTACTTRGLFQRLSRESKQSYAHYGIGDGRLKMDPPWLVFNEEVQEAIDEIIISHAPLRKIHGALHEETAYGLVGEGKKKGMLSMVYRVRLDGITLAQVKKIRDETVKELALNRLEEFDGNLKKAFGDIENPLLHKDGKTPIHTVRILTEMSEVSMHGISKGQDKQYKYFAYGSNHHVEIFENTKGKRQGRFVTTFEAARRVRRLKKKSPIDMNPSPEWGDGWRFITSLHINDMVEFEEGDVKRIYRVQMLSDPQITFRLHTAATLNEKSEVLRKNHNVFRGRKINIDPIGNVIDAHD

SEQ ID NO: 6429 - protein, 1057 aa, unidentified
  REGION 1..1057: note = Description of Unknown: Cas Enzyme sequence
MKNYRLGIDLGATSLGWSLIELNEENVPINLTNMGVRIFPDGREAGGKKEPLNVTRREHRGTRKNRDRYLQRRMNLMDCLIENDIMPKNEKERKELEKIDPYLLRKNGLDNELALYEFGRIIFHLNQRRGFKSNRKLDASDKETTNMKKAIEELKQEMKKTNSRTLGEYLYNLNKELPKNEQHQRIPLRVKTTIKKSKNVYNFYPERKMYEEEFEILWEKQSKYYPKLNEELKKRIRNIIFHQRDLTPQPKGKCRFEPDEPRCPVAFPVYQQFRIYQEVNNLRILDFDRVSHNLSDEQRTLILKVVFTQKKTAFKAIRKKLGKEYEQDFIFNLESEKRKDIKGDETSFTFRKDEFFGNKWDKLPDTYQDEIIIRIINEDNDPEIEKTLVSWLCKTFKINKENAENISNVRLSQGVGSVSKKAIKKILPYLKQGFIYSESCKKARYHHSDFRTGERYNEGDLPYYGEVMPQHVVFGTDDPDDIDDVRFGKIPNPSVHIALNQLRKFVNALTKKYGAPQQIVVELARELKNGRKRLREIEYEQTKNRKKNETIVEELEKIGIENNYENRLKYKLWEELGKDQINSCCPYTGKPILLNAVDGLYSNKFEIEHILPKSKTFNDRPVNKTISYFQANRDKGERSPFEAFGNNPSGYNWNDILARAENLPKNKRWRFYPDAMDRYKDEGELISRLLTDTQYMSRIAREYLSYVSGSNNVWAIPGQLTALLRSKWGLNKLLSDNAKKNRHDHRHHSVDAFVVACTSRSMLQKIARASEKTRQRFIEKMPSPFENFNHKEMEKIIDKIVISFKPDHGFAQKAIKDGKTIGQLHDETAFGFVSEDVEKGKITLSVRKDLSYFKSKKQVQEIADEKFKECLLNKIENKSDTEIKTIIEDFFKTNGIRKLKIHLEKDKKTVIPIKNKDGKIYKYYTSGNNYCADIYCPDKGKKAGKWQVEIIPMYYAHQPGFEPAWHKKNPTAKKIMRFFINDMVAYDDEEKIQVRRVRKMTGNTVYLREHNIAVKEKGKEDIGEQFKPFKLQERNARKIGIDIIGRIYDPLKKNENS

SEQ ID NO: 6430 - protein, 995 aa, unidentified
  REGION 1..995: note = Description of Unknown: Cas Enzyme sequence
MAITLGLDIGSNSLGWSILDMNNATIIGTGVRVFPEGVDRDTKGTEISKNQTRREARGARRMKFRRSLRKSKLVKLLQDNGLLPKKAEELFELMSVVPYDLRSKGLDEELSLYEFGRCLFHINQRRGFKSNRKTGKSNEDGVVAKSAGELQMKVNSINCRTLGEYFAKIDPEQERIRGQYTFRSMFEHEFDLLWEKQSEYHPDILTEEFKPKIKEETIFFQRPLKPSDDLIGDCSLEEDEKRCPRGDWYARRFRILQDLNNLIIRNPDGSEAILDNDQRRQVLGELLLKKEVRFDRLRKLLGLLETQIFNLEDDGQETKLKGDEFAAQLRSKKILGAKGWKALDIKEQIEINEVIIDDDVTDEQLIEMLVEQHNFSKKQAEETLSLTLPQRYMRFSRIAIQKLLPFMEKGFKTHEAVKEVYGDQVFKQQKVGLDKLDMPEDLRNPIVQKALYEVRKVVNAIIREYGKPDSITVEMARDVCGSKDQRRKVAFKNKENEKLNDMARKELIENIGIINPSRNDIIKYKLWNECGYECPYTGRSISQNSLFGNNPEFQVEHIIPYSRCLDDSYMNKTLCYVRENIDKGNQTPYEFYCGNTEQYEGIKQRIACLPYPKKQRFLEKDVELDGFVQRQLNDTRYISKEVVSYLKRLGVAVRGTKGQSTAALRHSWGLNNILSYTAPGIKNRDDHRHHAIDAAVVALTTSKHLKELARCKYSVEGRKFTEPWEGFRDELEHKVNEIIVSHRVTRKLSGQLHDETAYGPTGLKDKKGQFIFVYRKKLEDLTLPMVNKIVDPVIKKIVIGRLKEYGIDPVKKQKIDKEVWSEPLYMITKTNKRGPQIKKVRIRDVFNNMINIKDRDGKPYRSVAPGSNHHIEIVEYKDKNGKIKKEGHVVTMFEAVKRSQNKRPVIKTNHGPDKKFFCSLAKNEMFMLEVADGTHVPHRIQKIVQDGRISLRQHTFAGKISESDLPPLIQRRTPNTLRGYKISVDPLGRIYSAND

SEQ ID NO: 6431 - protein, 1059 aa, unidentified
  REGION 1..1059: note = Description of Unknown: Cas Enzyme sequence
MRVESAYEQAADSYRLGIDLGSGSIGWAAVTEPEDGPPRVLALGVRHFEAGVLGDIESGKDESRATARRDARGPRRLTWRRQHRLRTVFRALQEIDLLPSSEDDSHDVRHSVLAKLDRELRSQPGLDDGRTAQHLLPYLLRAKALDEKLPRHALGRALYHLAQRRGFLSNLKAAKDDEEVGKVKEGIGELEQLIEQSGARTLGEYFSTLDPEECRIRGRWTARYMYQEEFREIWAAQAAYHSDLTDEQGDKLFATIFFQRPLKSQKALIGICDLEPYRRRAPKACLEFQRFRILQKANDLEVYCPDGQIRALLDEERSMLLKELDQNPHVTFGRIRTLLKMKKSREHGRNYSFNLETDGEKNMVGNRTAARLVDILADQWQDMSALRQKQLVDEIISFESEGPLVNRLVNGWGLDAVTARSVAETPFEPGYASLSRRAIGRLLPLMNDGTAFATAKKEVYGEADSDNDPCDFLPPNHQCALLRNLRNPAVERALSELRTVVNALIRQYGKPSRIHVELARELKHARKTRKNITDRNKANQKSREAARRKILDEMEDGRYCTEANLLKVRLAEECNYRCPYTDRQISMHALVGDRPQFDVEHIIPFSRSLNNSYLNKTLCHMEENRNVKGQKTPSEAYGGTDRFQEILARVRRFKTDAKTRSRKLDLFQTEELPDAAEFIERQLRETAYMSRLATEYLGLLFGGQIDAEHKRRVHPIPGRATAYLRHRWELNSLIGHPDKKDRADHRHHAVDALVVALTGPREIQLLSRAAEEAERLGQTGLFVAVDPPWDGFLDQARAAVEAINVSYRVRRRLSGKLHDATIFSHPIPCPDDKGRESTVHHLRTRLEKLSSGDVEKIVDPRVRRLVREKLAQIGGTPDKAFQDKANHPYLTAKDGRIIPIHKVRVRKSDKPMGVGQGSKKRYVKPGSNHHMEIVALLDKDGNEKKWEPHLVSTFDAIQCKSEGETIIERDHGKGRKFKFSLAKGEHVEMEHKAGKKNLYRTLGISEKEVEFCMHTDARPSTIVRQIKGARVRCSPESLRKANARKVVVDPLGNVLPAND

SEQ ID NO: 6432 - protein, 1014 aa, unidentified
  REGION 1..1014: note = Description of Unknown: Cas Enzyme sequence
MNRPQKERPLTNDERDKIIKLLQGPLFKKSKGKLEPKKSASVADIRVVLGFKKIDKSVGLNIEKDEEREINTDWFYREIIHNAFGEKKWVKLTEEQREYVNRAVLRFDPSNDRHRDKLRKGAIDWWGLTKEQADKLIEAWEGRPKKEKRLNLSRRAILNLLPYMNRFDEKNNRWPTQQEASKSFADDKELDEHARRRYLTGTLGANYEQRYYMKQKKHWINCEDGENLPPLPPAPMMTNPVVRKAIHEVRRHIMTYIRRFGCKPDRVVIEFARSAKQAGKVRDATLALNRKREKKRKEILESDVFKTAFGATFINLSLNQQRAAVDRVLLTQQQMGTCPYCGKGGLNDTIAASGEGVEIDHIVPFSRCGDNSMNNKVLCHIECNREKRKRTPREWWGDNFKERVNFAKKRYHEYKPDKTEYFTKKDYSRKWKNFTREVKVNEWRNSQGSDTAYAAKQVAAYLADALFEGKGLPERGGERKIFVTIGKYTAMLRRDWQLFEKVKRFQADGEVIMSKQEEKELEQKNRGDHRQHAIDAVVIALTEPGIISSIAKRAAIEEEIFAEHGHWPGQRSRREACSRCKGFYGRTEKWPGIYESIKPPEPWDDVKKFRKLILSKVYNSLIVSHRPAKRRIAGEFHEDTLFGTVKDRKELFTGRIQCFNPPDTWLEPKHLRLPQAETEKQAVNRLIKQYMKEGLEKKGARKKAKETAAKLDFRPQLIDPSPGKGGLVRNLGLRRQIRQCLKSYDYDPDDYSKEDMKKMVEQGLLRMYTKKEWNGNATLDKPEKPNGIPIKSVVLLRIHKDPEIVPRKKWDPIEKKMVQDKDPRTLRVYVGGNNHHIEIYEDEQGKWEGEIVTNFEAAKRNAKRLQMMKKAGLPSIQKLRRMRRHERQNFSSIIREINHDYSIVNHADIEGKRFIMSLAEGETIKMRHHKTGEEGYFVVFKLQKPRTIYFKHHWDARLAGGQKDENKKVIPSSKRENIAISASDLKTKCLLSEGKVPCKVRVNPLGEVKELYRD

SEQ ID NO: 6433 - protein, 1006 aa, unidentified
  REGION 1..1006: note = Description of Unknown: Cas Enzyme sequence
MWHVRKGATVKRVLGLDLGTNSIGWAVIDVPDDDDDAGSVVAMGSRIFTMGAEEAGSALVTPAKERRQKRSMRRQISRRATRRRRIRGELTRIGLLPEDDAQFDGLMNSDPHDLLRRSADGEGLTLREIGRVVYWFSSKRGFLSLRSEGADLTDDDDERAVRPRYRRPQVHSETGEILTQGQEDLLVGFLRDQAVHHPDLITDQLIFGARGQLTYPMRPISRDRFIGDGTWLDEFGIHGLVFFQRSIYWDEKTIGDCSIDPRRGGPRALRADRLAQKYRAWKTIVDLRVDFDERPLTEDERSVAFDALMTQGTLAFTALRKRLRLPEGSPINFERSDRTNLKGNETDAAMRKALGTGHWRDLDEDTRDRIVMLLLGDAQEEQIRATLAGEYDLGDDQIAKCLAARFPGGRVMYGRRTLRRLLEVLPECDTERKALEAAGYRMPEEVRRERPVVVSDLTNPLVRQTLSQLRKVLHAVAHAYGKDSDDPFDVVRIELSRDVRANRKDRERTNKFQRANEAANKAAEEFIEEFAQGSKANRDRKRRHRLWQEQNQQCLYCGQPISSTSVLSSATELDHILPRSRTLDDSMANMALVHAAENQEKGNRTITEWEGPDKAAEVAERLMHASIPWAHKKPKLRRIEAVDVADSPVPEALIVQTGYINSVARDFVRQELGVEPEVSAGRITAQLRYRIGLHKDNEDHRRHALDAAMVSICDISTARKLSDRFRKERDHGIRRDDKYGSWEPWEGLRSDIEANYEAINVSHAVKGKVSGQLHEETRYGKVTSPYRDKEHTWARRRLLSGGLTLPQLAEVADPVVRAALESNLRLRGIDPEVGVRKKLTFDPKIPPVMPDGSEIQRVRCHMELPSNRVLQPETAPKTSVTMGRNHSAYIYENEETGKWRIHVVPRFEAFRGRGLPPDSMRDAHIGDGERFVFSVTIGTSLLLEIDGTDELSLVKSLDAASSRLDVQPATSSGPLKLAWHSGTKLKRLNTRKVVVLPSGEIRSARD

SEQ ID NO: 6434 - protein, 1025 aa, unidentified
  REGION 1..1025: note = Description of Unknown: Cas Enzyme sequence
MKETIWGLDLGTTSIGFAVVENDPQENIGEIKKMGVRIFPEGVTEKELEPRNRRRREKRLMRRQLRRRKLRRVELTKRMAEVGLLPKFESIEWKELMNTDPYLIRSDAFERKLEEFELGRALYHLIQRRGFKSLRKSLEEASGEGEEETGKVKESIAAMREEMGGKTLGQHLNLKSKKRGNYLGRQMVEDEFDRLWEAQRNHHPQLLTDDLRMELRTVAFKQRPVFWRLETLGKCHLEPDAPLCLKSSWVGQQFLMLQDLNALGISGTTEALDKDQRELVLERLSKQESMTWGGLRKNLKKLWQDAGIPLRSKFNFEVGQKPKLAGNVLEAKMNQVFGDKWGNHPQKNRIREELPQKLWEIDYKKIGNKKVVIRTDEVTHQARKDFIEEAQKSYGVISSEAKALSELVLPQGWLSHSEKAIRNLLPHLEKGLMYSEACDIAYPKHRDVEGEGLDVLPSHQRHLEHLRNPTVKRALNELRKVTNNLIRTYGKPDRIRIELARELKLPGARRRDYQNRIKKQESERDKARTDLVENGLLNPKGSDIEKWLLWKECEERCLYTNTTISFGDLFDHGRFEVEHIIPYSISLDNGFMNKTLAEKDFNREKGNRIPYEAFSDDQWKLFIARVRDSKLPPFKKSKLIATQPEDVLGEDFSERQLRDSAYIAREARDFMMKLFKKPEGKAFPVETSNGMITAQLRRFWGLNTLLSDGDKKTRDDHRHHAVDALAVSLVSRGGVKNLSDRHKFFMQGTKIDFPPPWDGFREEAEENLSKVVVSHKVQSKVSGKLHDEMVYGSTTGLRKKSGVNYRIFTRRVDLQSLSKSKLKSLAEDKLEVLWDNSHRNKKVVMAHLLKHGDFKEYPSFKLPSGESRQIEHLKLLEPKNPELMTSHGRNQAHVIKNENHHMVLYQTPDEKFVFDVVTRFDAAMRLSKRQPVIQKNNGNNQFLMSICSGETLFIPANQEQSTKNRYVNVVSLESDGRIKFRDINQAAKNSKGEVVIERESYKTLIGLGVEKVTIDPIGKIFPKND

SEQ ID NO: 6435 - protein, 1022 aa, unidentified
  REGION 1..1022: note = Description of Unknown: Cas Enzyme sequence
MKERILGLDLGTTSVGFALIEYDQANRNGEIIRMGSRIFPEGYEQSQTAVEPKNKQRREKRLLRRQVRRRKVRKIAFCKRFYEVGLFPRFESEEWKDLMNTDPYVLRTKGVDEKLELYELGRSLYHLVQRRGFKSSRKTLEESSSEGEKERGVVKEAIEELRKDLKGDSLGKFLNKLSKEGDKKRNRYLARQMVIDEFELLWDTQKSYYPKILNDDLKSEIKGIAFTQRSTFWRLETLGKCNLEPGKSLCLKGSWLGQEFLMLQDLNNLKFNDTEEPLEEEQRTKLIEELNKQGQMRWGKIRKFLGIPGKLKFNLEVGKVTDKLQGNLVEAKLYQVLGDSFLNHPMKQRMLEEVPQRLWDIDYERLGKKKVIIRSDKEAEKSRAEFVQYAISEFKLKKKEAQGISEIALPQGWLAHSSEALNKLLPHMKEGTGYAEAKKAVYPDSAVMKGGDLEKLPSDQRHIEHIRNPGVKRTLNELRKVVNNIIRVYGKPDRIRVELARDLKKPGALRREIKFEMDKQKKKRDEAREDLISRGIPNPDRETVEKWLLWKESEEQCLYTGRDITFNDLFLNNKFQIEHILPRSETFDNRFSNKTLCEAEFNNHKDKRIPFEAFGKNEWGEFVMRVKKSKLPFYKKTKLMAKSLTDVFGEGFTDRQLIDTAYVAREARDFLLPLFEKKEGKALPVETSNGMITSQLRGLWRLNSLLNDENKKTRDDHRHHAIDALVVAMVSPGVAKQMSDFSKRYQKGNEAQFPPPWLTFRGDIEEAIDSIVVSHKVQSKISGGLHHETVYGYTKQTRKKQGIEYGIFYRRLNLNEAKEGIIKKLKEGSDEFIWDDGGRNKEVIIKHLKKYGDFKKYPEFRMKNGEKRKIKYIKEIVPQKQKLMTGIGKDNASYVIKQENHHMVIYETPEGDKKSEVVSLFDASKRLSKKQPVVQRDLSKGRFIMSLTKGDTLRVPDDKETDKNKYILVESIWESGQIVTTDVTDATGERKNKTQKMAHSWINEGGEKVTVDPIGRVYPKND

SEQ ID NO: 6436 - protein, 1019 aa, unidentified
  REGION 1..1019: note = Description of Unknown: Cas Enzyme sequence
MKYRLSLDLGTNSLGWSMYEVDSEKNPVSVIDSGVRIFTDSRDPQSGQSLATERREKRGARRNRDRFLIRKKELINVLEKYGFFPSDTEEQKDLEKLCPYRLRAKAVYEKLDIYELGRAIFHLNQSRGFKSNRKTDNKDSESGAMKKSISEFKQLIHDNKARTAGEMLYRLKKRKKSVKARLHGSGKDAKYDIYCDRSMIEHEFDYIWRQQQKFGCENMSDEAYNAIKYVIFYQRPLRPVKPGKCSCLNSEDRAPKALPISQRFRILQTITDLRIISFEHTSEPLSPKQQDTLYNMLSTKGSVSFNSLKTKFDLDSTYRFSHETDKNSKLEGDKTAFVLRKKENFGKDWDNLSFEEQTEIVHMLLEEEDEEKLINTLVEKWHLSQDNAENVANAFLVDGHMSYCETVLNQLSESMADHKTLTESLSENGYDNLNPNLDGSMEYLPYYGTVLEKYIGTGTGLEEDNEEVRYGKISNPTVHRGLKQLQKTVNMIIRKYGKPYQIVVELGRELKMSRKQKMEVLKNQRNNEKTNERYKDILEELGHRNNRENRDRLRLWEELSESPVSRCCIYSGQPISKEQLFGPQIEIEHILPFSKTFDNSLANKTVSYRHMNKIKKNQSPYQAFSKNDNWPDIVARSNSLPLNKKWRFSEDAMERFIEDNKFLDRQLTDTQYYSKVARQYLTAVCPDIWSVSGKMTSLIRRWSGLNGILSSDKNKNRNDHRHHAVDALAIGLIDRSRLQKISELSGKNELENTDKILSKDMSVEPWDGFYQDVEKSVNKIVVSHKQEHGKNAKLHDETAYGLLEEDGKKYLVTKKIISEMSPKELENIISSSVKNKVDDALIGIDRKNKNERERALKEFSEKTGIYKARYKKDQDNYIVIKHKNGERYKAYIEGSYHHVDVYQTEDGKMHGEPMTYMNLDNNRPAKWKTIKPKPKLFLRIHKKDILKINEDGMDRYYTVLKLSPAAKTIFIAETNIAGKLSDILSDTTLYKQMSYKQLKEKNVVKVSVNEIGEITELGY

SEQ ID NO: 6437 - protein, 1104 aa, unidentified
  REGION 1..1104: note = Description of Unknown: Cas Enzyme sequence
MKKIIGIDLGITSVGWAVINENLEILDQGVRLFEESKPSNNVDRRIHRGQRRLKRRKAQRIIDLKILLRNEGIISSGFKNLDNPYQLREKGLTQKLSNEELATALLHIAKRRGSCLETIEEENVKNEDSPKVILSKNDESLEKYEYISLVQLERLKNDHKIRGTHNVFRLEDYIKEVHQILKQQKIDQHVQQKIIDIISRKRSYERGPGSLESPSKYGAHREISFKDKQTMLPYIKEHYHDIYGKNQFEFSVDDISYTALKNGRIVNSEPYSLVDLMRGRCSIYNEELRAPKNSFSAELHDFLNDLNNLTIPKRDNPKLTKEEKEEIISIIFENGDFKPKGVKGLAKYLKVDIEDIKGLREKYSGNKVTYLITEFKGYKAIKKAVNNDKKLLDNKNKLDVIAEILSTTQDIETRQDRLLQVVDKQYVERLSECTGFTQFHAFSYKALYELNKELLDTTMNQQQIIIKNKMKPEITQIDFLEIQEDVLNPVVKRAHREALKVIAALTKEFDDIDKIVIETTRSKNSDDERKNLRDQQAYYKKSKIEAEQLVTNSGYNDMQLSNQVINKIKLYQEQNGKCAYTGTPLSIDQIIRDHKSYEIDHIIPYSISLDNSQNNKVLVIPSANQIKGNQTPFGYFKSGKIASHAMIKDWHEFKLSVEMNSNYSKKKKENLLLEKTLTKFDDMEQFIARNLNDTSYAVRVFMNHLKSYYKFNHMPIKVVTVKGKQTSHYRGLAVREWNKHHQTIGTDLVNPMVKNRDQYMHHAIDALIIAGLSQQKLIQAMQDKKREKIVDSITGEVSFVDPSQDSDFIKYLRKISEIESSNVKFSWKIDTKPNRKFSDETIYSTRMINNKEFKVSKEKDIYTLESNKIQKILIDQKDNLLVYRYDIKTYEKLLSVYLQYKHEKYPYQTYKEQYGYITKYAKKNNGPQIKQLKRLDGTISYPLDISHKYTTKKKRVILTGLKAYRVDIYQNKKGRYRFVTIRFSDVKPKGKYAYINQDEYKAKLEEKKVDQTYAFKFSLYRNNIVKITKETKGTIEKELYRFIAIKSDKTNVLEFKYIHKNTEANNRITPTIGPSIKKIEKYNVSVTGKYNKIDSEQLNLKVHL

SEQ ID NO: 6438 - protein, 1043 aa, unidentified
  REGION 1..1043: note = Description of Unknown: Cas Enzyme sequence
MQLKAQKKRVLGIDLGIASCGWALIELIADDCDTPPSGTITAAGVWLFDAPETDKERKPTNQIRRTNRGQRRVTDRRRQRMNAIRELFSRHGLLPHAKKDALKRKDAQSGRVLDPWRLRAEALDRLLTAEELAVALGHIARHRNFKSNKKSDGANKADESSKMLKAIQATRDRLAIYRTAGEMLARDPQFKDRKRNRDGDFSRSFLRADMEHEVRQIFAAQRRLGHSKAGETLEQAVFDIAFFQRPLQDSEDLLGDCPFVKDETRTAKRAPSFELFRFLSRLATLRIREGRNERPLTETEIGAAMRHFGQTKKFTYRHLRKQIDLPDTQSFAGVPADDEKNDVAARHGEAAFGTATLRDVIVEGAGETAWAKLRNEPARLDRLAEILTFREAPERIEQGLRDIGIEDETRIALMDRLTEFAKFTGAAHISAAAARAILPGLRQGLTYDKACTAAGFDHAARPIIDLTTIGNPVARKALSEAMKQVNAIVREWGVPDAIHVELARDVGKSAEEREEIRSGIEKRNKEKDKLRQQYEATVGRPPRTGEDLLRFELWKQQNGRCIYTDDEIHPDWIGAEDNRAQVDHILPWSRFGDDSFHNKVLVTARANQRKKGRTPFEWFSADLGPEDWDRFVSRVESSKSFRGYKKRNLLLKNAEELADKFRTRNLNDTRYAARALAGLLEQKYPPEAGKRRVFARPGAITSKLRQAWGVQDLKKTETGERREDDRHHALDAMVCAACTESALQRLTNSFKEAEKRGIPRELISMPLPWDGFREQARDAVANIFVARAERRRARGKAHDATIKQLRPTDDGQVIYERKAIDKLSEKDLDRIKDPDRNAALIAALRDWIAAGKPKDPERQPRSPKGDPIRKVRISTNDKDGVIVRHGSEPDARPAIVDRGDIVRTDVCRKRDKKGAWKFYLVPIYPHQVANAKDWPKPPDAAVRVKTPEPNWPRIDQTFEFVFSIYPLSYVEVTEPSGELTEGYMRSLDRSDGRITLSNHLSKTLTDRAATVTARNIRKFAVDRMGRRAEVKKEVRTWRGAACT

SEQ ID NO: 6439 - protein, 1138 aa, unidentified
  REGION 1..1138: note = Description of Unknown: Cas Enzyme sequence
MNSEKITTLGLDLGTNSLGWCLLETNGEPGAGPEGNIIALGARIFSSAEMAGRDAKTKASLAIERRNARSMRRRRDRYLARRAKLLNRLTGFGLMPARKDERKALVDAVQDHKGGDQTGAIYGLRARALKEPLQPYEIGRVLFHLNQRRGFKSNRKADKGDNEAGKIAVGAERAYHAMQEMGAATFGEMMHLRRLKGETVRARLRPEAEWNNGLDADGKPLKGDGYDFYPTRGELEREFDLICKEQARHHPRLLTTEVIAQLREVIFYQRPLKPVEAGQCAYNAAEKRAPKAHPLFQRFRLYKEINELALINKEEGKSSKGRKLTREERDILILAMRDKKSSSFAQLRKALKLGSEYQFNKETANRAKLEGDLLEAELAQEECFGPGWRKLSLADQARIAEKLRTEEDFTKLIQWLRQEFHLDEERARKVAAVHVSDGYGRLGESALSALLDELINTTDDNGHVITESAAAIRVYGRTNSERDPDDPAHDLLPKYQEVLQKHIIPGDSPGAEIAFDDPQYDEKKGRITNPTVHIALNQLRRVVNAIILKHGKPDRISIELGRELKLSDKKRDEVNTEIGKNTKAAIERSKELKNLNITDNGYYRLRLKLWEELHENPLNRCCIYTGEPISKIDALSDTCEIDHILPYSRTMDDSQSNKILCLRAGNRNKGSNAPSEMKGWDIDAIRARAAHLPANKRWRFADDAMQRFEETQDFAARQLTDMQHASRMALKYLSYLYPAEEPDEHDPAEEADEHGKLRHRHVRALPGKMTEMLRRYWGLNDILHDHDFAQTVKPKNRKDHRHHAIDAAVIACTTQAIIQKLAAAARQAEERGAERKASKIAPPWPTFRDELRGKINAAIVSHKPDRGTARPDQSHQTAGQLHKDTAYGPTDERDDKGNLQVVRRKALSAFEKTGDLDAIRDDYLRRTLQEITAGLEGKDFKQALLRFAGPTTLEGKKNPFFNLRHIRVLETEYQIWMEGKDGRTTRGGKPPKGYLAGSNHRFDVWELPPSGKGKFGHEKKWAADVVSKFDAHQSGYTSPIRAHYATARKIMSLHIGDMVAYNHPETGKRVIARVRKFDQSGKIYFDPHNEAGELDKRHKDPDDPFRSFGKLPNTMRPLQFRQIRIDELGDVWDPGPRR

SEQ ID NO: 6440 - protein, 1359 aa, unidentified
  REGION 1..1359: note = Description of Unknown: Cas Enzyme sequence
GLDLGTNSCGWALTDENYSLVKKGGKSLWGVRLFSPSETAANRRFKRSARRLQERRKLRIDLLQEIFSEELYRLDSTFFLRLNSSFFYEEDKSTGKYTLFGDRLFTDKDYYKKYPTIYHLRKELMNTNSKPDLRLVYLACHHIIKYRGNFLMEGKDLAMTGGNASYFIESFNDSLRLLNEFIGDDSYSATAFESDGEKLIEVIEKESNATRLYENLNQILNPSGDKNNKPLIKILTGASVKVSDLFQDDSFDDSDHPKLAFQDEEYELKIEPELSNLYGDGSEIIALLKQIYDWMVLRRLLHGSSGISDAMVNIYEKHQYDLRTLKQFVRKYYSKEHYFDIFKSTIIANNYPAYVKNNMKNHKSIAFEKCNGQDSFCKFVLSQLFSSDRVFSDSNEQYLRNELENFTLLPKQKSKLNAVFPYQLNLSDLRSILSNVERFYPFLSEMDESGVAVKDKVESLLTFKIPYYVGPLNDYHANDPKHGHAWIVRKDKGRITPWNYEKMVDEDLSAEKFILRMTNKCTYLKGKDVLPKNSLLYSEYTLLNEINKMKINGEPISFEVKRMMMEQLFLHYKKVTHKRVTDFLKKEGVIQYSNEALITGVDDPIQGDLSSQMNFIKIFGKINGSNYEMIERIIFLMTIFEDKYMAMRKINSEYKLEKSIFDQLKKLSFKGFGKLSRELLETEVVSVDENGEVSSVISVMRAESMNLNEVLYDRRYNFVRKIDDINSGKADINQGNWKAFVQDSFVSPGIKRSIIQALEIVGEIKHIVRLPINRFFVECSRESSEKKRSKSRRTQIQDLLKHAKLTKAELEPLQKTLGLKTDGELRSDKMFLYFLQLGKCAYTEHPIDLDNLAIYDIDHIIPRSFLKDDSIDNRVLVEGNANKEKSDTYPIDSEIRRLRAPFWNYLKSIGLLSNKKFDNLTRANELSDDEIGGFINRQIVFTNQSVKALAVILKLMNPLAEIIYSKAGNISDFRHEFNLLKCREINDYHHADDAYLNVVVGNVYHTKFGFDARPFISKYRMEKSGLNTQRIFDWNTKGAWDSKTTITKVKSILSQNDKLVSYRSTDKTGTLFNDTVYKKEENLIPTKGKAGAIVSDTSKYGGFKGQTNAYFFVVESEGLKGKLVTSIETMPIRFVHHYHSNSNDLLQYCVNQLKLLNPRILVSHVKMNSLIKVNGSYAYMTGTSGNSILLNNAIQMNSTQEILDYARIISKHRENVKSIEEIRNYSGTEYIVTESQFNKAYNKKITKRQNESFFTMIVSQLSKPIYQALPVSNYSNKLSDSFHNFEMLNVRLQAYLLFEMFHLIQCDASLANLSLIMEDANKVGKNRISKYISGKNIAIIDRSVTGFFESIRWRNDNAI

SEQ ID NO: 6441 - protein, 1011 aa, unidentified
  REGION 1..1011: note = Description of Unknown: Cas Enzyme sequence
MGYTLGLDLGSNSIGWACIDPEKKQIIAMGSRVFKEGVNRDNKGGEISKNTSRRLARQARTQYFRRADRKQKLKEVLQLAGMFPTSPAEVSEYLNCHKKYNPYSLRKKGLDKQLSKLELGRALYHLNQRRGFKSSRKSGDSKEAGVVAQETAELQEKINASKCRTLGEYFSQLDPSKTPIRGHYTLRKMYEQEFDLLWEKQATYYSELNENLKEDIKDKTIFYQRPLKSVAHLIGKCSLETDKRRCAKHAFEGQTYRILEQVNRLEFIDDDGVVYKFSRTPDEDFTEDIKELRDRLIEALENKKEIKFEGKKGIKELLGFTPATICNLEKGGLKKLIGNRTRHQLRSLFKKTWDDFPEEEQKKIHQVISQAEDSEWLEKYALNNWGLTEEFAKKLAKANLEPGYFNYSSKAIKKLYPFLLEGFSLADAKEMAGYKENSETLSVEDLLKNLRNPIVSHALYELLRLHQVIVREFGKPEKVQIELARNLKLPLQKRKELHFKNQELRDINDKARDEVEEMGHKPTHDALLRYKLWEECGQTCPYTGKKISQSKLFNNNEFQIEHIIPFSRSLDDSYMNKTLCCTKENAKKTNQTPYEFYTGKPVYDEIIMRIKNLPYSKQKKFKQKEIAKDFVARQLNDTSYISRQAKSLYQQMGYTVVIAKGTATAELRYLWGLNNLLDKTNQNLKSREDHRHHAVDAAVVAMTTTTALKKLSQYNKYLRDPSQKAFPAPWNSFRLDAKIVIDNVLVSHQINKRVRGTLHEESLFSALNKKDNQGVPIFAIRKKLTMLNTFSEIKNVGDPAIRKILVDFLAEKGISVESGTGKLPSNCFKDSQLFLTSKKGNKTPIKKVRLHKPSKNMILLPKQNNKAGVKPGNNHHIVLYRCKDPNGNWVQKGKVCKLFEAARRLSKGEPIIRKKMDGGDVFLGSLSIDEMVLLEIAESDINWENPDNKKLSPHLYRVQKISDSITFRHHLVSKLKNDAGEEVGRETRTPSIFNGIKCYIDRLGKICKAND

SEQ ID NO: 6442 - protein, 1061 aa, unidentified
  REGION 1..1061: note = Description of Unknown: Cas Enzyme sequence
MQSTVNDKAGATIMTWRLGLDIGTNSIGWAVLSLAGEKGAWQPSGIIASGVRIFSDGRNPKDKQSLAVSRRLPRQQRRMRDRYLKRRNRFMDALVSYGLMPAKADERKALEHEDPWTLRVKGLDEKLSLHQLGRALFHLQQRRGFKSNRKTDKGGDDESGKIKSAAAAAREAMDKSGARTLGELLATPRISDPKLAHTHPVRTRLKGAGAKAHYDYYPTRDLIEQEFNCLWDAQKSFHKSALTDAARDELHDILFFQRNLKPQPVGKCSLDPTQERAPKALPSVQRLRIYQEINHLTVSLPGEAARALTIEERDSLVRKALGAMQLKFDGARKVLKLPQTARFNLESEKRKHLDGDKTASVLASAKRWGKEWRNLPFEGQETIVEKLLKEEDESTLLDWLMSNYGLTAETAEAVAGSPLPDGHGQLGRTATNRVLAELEKGIITFDKAVVDTGYQNHSQLDFDGEVFDALPYYGEVLERHVAFGTGELTDLPEKRYGKIANPTVHVALNQIRRVINDLIKRFGPPDEIVVELARDLPLSAKGKSELEKTQRENQNANDARRKIIAEMGQSDSYENRVRLRLWEELNPDDPLDRRCPYTGEQIGLNSVFSAEVEIEHILPFSRTLDDGIGNKTLSMRHANRFKGQQTPFEAFSLSPKGYDWAEISTRAVNLPKNKSWRFNPDAMDRYNDSERNFLARQLTDTQYMSRLATLYLRRTGADVWVTPGRFTSDLRWAWGLDSILAGHNRDESVSPAKNRNDHRHHAIDAVVVALTDRGLLKHVATVAARAEERFDKRYLADIDDPWTEFRDTVRASIEQITVSHKPDHGVQGALHNETAYGVFGKDDNKGRSQVVHRVPLESLKPNQLSLIRDPLIRDHLIKASAGLEGKAFTESLVKAGEAMTPPVRKARIVETLSVIPTLMEGEGKIIKAYKGDANYCYDIYPDEKGNWTGHVVSRFAANQKGFKPDAKVLPDGTPLKMRIRGNDMIGIGEGGERRVMRIVKFSAGQIALADHFESGALKARDTDKEDTFKYLIVSPSRLQKLKARLVHVSPGGRVFDPGPHG

SEQ ID NO: 6443 - protein, 1051 aa, unidentified
  REGION 1..1051: note = Description of Unknown: Cas Enzyme sequence
MGWLMAWRLGLDIGTNSVGWAALSLDGEAGNSGPSGIIASGVRIFSDGRNPKDKQSLAVARRLPRQHRRMRDRYLKRRSRFMDALVKHGLMPNEVEDRKALEGTDPWTLRVKGLDEKLPLHELGRALFHLQQRRGFKSNRKTDPGEDDESGKIKSAAAAVETAMQEKGARTYGELVAAPRVNDPKLAHTNPVRTRLKGSGAKAHYDYYPTRDLIEHEFTCLWESQKKYHESEMPDVARDELHDILFFQRNLKAQPVGKCSLMPDEERAPKALPSVQRLRIYQEINHLTISLPGESARPLTILERDQLVAKALGTKQLKFDAARKTLKLPEGARFNLESEKRKHLDGDKTAAVLAGKKRWGSDWRDLPFEDQEAVVEKLLQEEDEAALLNWLKSDYGLSKEIATAVSGSSLPDGHGQLGRTATNKVLAELEPDAISYDKAVIAAGFHSHSELDFDGEVFDALPYYGEVLERHVAFGTGEPNDIPEKRYGKIANPTVHVALNQIRRVVNDLIRRHGVPREIVVELARDLPLSAKAKSDLERTQRENQNANDARREVLARLGQSDTYENRLRLRLWEELNSGDPLDRRCPYTGEQISQSKLFSSEVEIEHILPFSRTLDDGVGNKTLSMRRANRFKGQQTPFEAFSISPEDYDWEEISSRAVNLPRNKSWRFNPDSMERYNNEERDFLARQLVDTQYMSRLATIYLKRTGADVWVTPGRFTSNLRWAWGLDSILKGHNLEETVEPAKNRDDHRHHAIDAVVVALTDRALLQSVSSIASKAEEQFDKRYLANINTPWEGFRDSVGQSIGQIVVSHKPDHGVQGALHNDTAYGVVEPPDSKGRSRVVHRVPLESLNPKQLDLIRDPLIRDQLKAKTEGLDGKEYSKALVDAGSSFSPPVRKVRIVETLSVIPIGENNKGKTQKAYKGDANYCYDIYSDNNNKWVGHVVTRFTANQKEFVPDARTMSDGTPLIMRIRGNDMICIGDGGERRIMRVVKFSTGKIALAEHFEGGALKARDTNKGDTFKYLVASPSSLQKKNARLVHVSPSGRLFDPGTG

SEQ ID NO: 6444 - protein, 1043 aa, unidentified
  REGION 1..1043: note = Description of Unknown: Cas Enzyme sequence
RLTRGIKDEASGDDKQQKEDAKERKTMAAAANDTKAALEALSKTMELVGPAHPAQLLIARTKAGEMRGTRLKKDIEGMPVFTRPIMEGELAALLKAQGAHHPELTDEVQNWLFDKAFAEAEPASQEIGSCRYGVGDSSGNIERRLPRGSDLFQRKRIFEEVNNLRVISARTAAERLLTLEERDVLAEILLTGTDLTAAAVRKELKLGKGALADQTSLDIKETRKGRKTPGKLQGHPLAAAMVKADALDQWQNFDEAARERVAQLVRTEDDVDALETALMDLGIDEPARKALSEARLPATYSAAGETATAMLLAELGKDVISNHEAEQRAELEPLDPEVPSLDRLPYYGEILKASCVKAKGAAQGTPEAEFGRIPNPVVHVALNQIRKAVNAYLELYGKPHRICVELARDMNKSAEEREKTEKEIAQNRKKNENYLKTIGDHRRLLGPDDLTRMKLHDMQGGECIYTGRCISMEHMFDGSVEIDHILPRAETRDDGIANLALAFKEPNQYKDKRPPFEAFHPAYQDQDYGCILKRAWKRGAGVYWRFKEDAMDRFRDEDKFLGRFLGDTRYVAKMAGKYLAVVCADPNGIVSLNGRITSGLRYEWGLHNLIRELMVEDGRLIEADVKPRKNGETRLQILERRKRTDKVRWDHRHHLLDAIVAACVTRSDVKRLQTLAGRQEEGRRSEQILADVRRANLDFKNVGFCWQEGFRETVKAFLEGKGRGEDTEKPPASAVVHKADHATAGQLHKETNYSVICPVVGKPGQYVVKSHVMLKGLSPKQIDGIGVPAAAITNVEVAIAAGEPIWWGGDDPLAALRNNLAPELERMRGELLQLMVKTPKEHFDGVQSPEGCEKVRAKWAVEEYTKRPRNEECDTSNNPRRYTKIETLSVRILKGAAHQHSKPRRANATGGNDRLVYFINTDGERDLEVISTLDANTQGFQERWRRQGGRMLFVLRKDDLVEMFVDPSDPSLGRRIYRTVSFSPTNAAADLELLPVEEGRAPKEVPGGVRKRITSLSLFRDHAPVMVLLDATGRVRWRGPAMN

SEQ ID NO: 6445 - protein, 1106 aa, unidentified
  REGION 1..1106: note = Description of Unknown: Cas Enzyme sequence
MIATDFEEWRETGKDGDDRLKVQAVNYGGFYDTSSANHPAMGVRVFEAGLDNFNSAKEKALNQKRRESRSARRVHARRNARRKALRKLLAKHNFLPSDDNERERLLVATDDTGQLLLNPYKLRAEGLDRKLEPFELGRALYHFAQRRGFKSNRKSGKEQDDEGMLAEIKALGQDIEKAGTRTLGEFLWKLGWGEDGQSEILRKGQLRLRCRHTRRNMYQNEVELLLNKQEEFYPELAQIRGDESTPNTIVHSIFFQHPFELTDERRERAPSRANLHRAPQTKPCPLERGEYGCPKSAWIAQRFRMLKEVCNLQIIPRLGDGLDWKQKRFLSKEERNHLVTFMSKQKSNSFSSIASELAKNFGTNKKAFFNLQKGGREGLDGNFIDATLAGLVGKKVWSNLQHEQQQLLRTSILNEEDPEALVAAFSEYGLDEKKEKTLKKFNPDQTSGYLSFSAKAMERLVPILENGEPGEGEYEALVKAYPDRPVANAFTRTYQDGSVVPALPYLQHPDLPHELKDITNPLVRRALGEIRKVVNAVVREHGLPGQIVVELARDIKMGPKQRKEVSKRNNLNRKRKEECRTQVQSILGSERAPLFADVQQYMLWCEQDKCCLYSGKAIPQSALFSGALDVDHILPHWQSLDDSQVNKVLCYREENAAKGQRLPIDWLGANGKKYEALLSRTMDLVEKNNTGLRKRFEAIDKWGVSILERAKFYADNIPGPWSQRLRRILLEEIDTDGFSSRQLNDTRYISRSAIRFLELLYHPERRTGEKAVRATRGGLTSELRWQWGINDLLKGDPLRNIKGEVISELDADGKKSRSDHRHHAIDAVVVALSSRSMLRKFQIHHKQRENIELSREDLVDLESGTFYGQLKDPHGVVVEGKYVTRKTLENLSGKDVRSIKDKGIQRIVNSRLIESGWDGKATALPKDWWQTELISPAGLPIRKVRVVLQKDPSKMITLGDKQHRHAVKGNNHHTVFVEIPGKTGPEIRVAVLPKVEAANRVRRNATKAVQDLWPEDGKFLFSLSRKESIIIRSDDRETLCLLQKQSGKFNLSTGCQIVFREHLDSRPAGTGNKSPFALLASGSAIKKAAPAKVTVDPIGRIFPAND

SEQ ID NO: 6446 - protein, 1036 aa, unidentified
  REGION 1..1036: note = Description of Unknown: Cas Enzyme sequence
MILGLDIGTNSVGWALIETDSDGDPSGVHAAGARCFDAGLDGDVGSGRGEPRNAKRRDARQARRQGWRRKRRRKKLIGVLQKHGLLPESIERTPKGIHEGLVTLDTSLKESNPPKNHREEQLLPYLLRTKSASEKVALFELGRSLYHLAHRRGFLSNRKESGEEDDETGAVKGGIKNLREDMESAGAKTLGGYFATLDPSEARIRQRWTARQMYIDEFNVIMDEQQVHHDFSDEMRKEIYRAIFDQRPLKSVAHLVGKCELEPTERRCLAALPIHQQFRLLCAVNNLLIEEDEYSQRALTPEERDTLIEALTAQGDLTFAKIRGKTVLGLPRGTFFNLEKGGEKRMCGDRTTSSMISIFGDRWKKMSDKDQERVINDLRSYEKTDALRKRGKDEWDLSGEALQAFLDVRLEQGYGNISRKALLKIVPNLEEGTPYSTARKNEYRKSFSADEPQKSIPTVESLFPNLRNPVVSRSLSEVRRVVNAICKEYGTPEVIRIELARDLKQSQKHRRDATKKMRDQESERKKAKERITTETGIENPSRNDILKVLLAEECGFICPYTGRSFDMRDIISSSPTMDIEHIIPFSRSLDNSFINKTLCDAHFNRNIKKNKTPWETSGKTDEWNKILNRVGKFKTQVRHLKLKKFEMQEVGEELIEEFASRQLNDTRYASKLAAKLVATLYGGTSDKDGTLRVQTCAGRATAYLRNGWEMNGILDDGPRKTRDDHRHHAVDAVCIALCDAKSVKLIAKAAEQLEERHHKLLGNIQAPWDQFVPSVREVIENIVVSHRVDCRLNGALHEETNYGVSTQDNGEKITRIRKPIEALSSGEVNRILDPRVKKAVLDALDGKPAKTVFKDRKDHPKLITKNGDEIPIHRVTVEPKIKNTVAVGSKGAPRHIAPGSNHHMAVVAVLNDKGEEIKWEGHIVTRLEAIQRKSRGDAVIQTEWTDTEKGQKREFKFSLRSGDTLSIGSGDYKGTWIVSGVAASLQIQLRMVNDARLQKDVKASGDYWQPRINSLKEMDATRLAILPLGLQRNWNA

SEQ ID NO: 6447 - protein, 1063 aa, unidentified
  REGION 1..1063: note = Description of Unknown: Cas Enzyme sequence
MSNFETSNFVLGLDLGPNSIGWAMLEHTPGNPDDIIGFYDTDYANHPPVGVRVFEAGLANFDSSKEKSLCQDRRTARAARRTIGRRNARRKEMRQYLRKINLLPETKETKTLFETDPYQLRSEALDRKLENFELGRVLYHLCQRRGFKSNRKGGKENTDSKMLASIGELAKSITDTGARTLGEYLYKINEAGDKHIRIRNRHTKRDMFEFEFNAIVEKQRELNPAVLADADVENLHKFIFFQHSFELTDERRERAPSRANLHRAPSVKKCILEPDEFCGQKGEWISHRFRILKEVNNLKISENYSKDRELTEDEREAVINRLSESATIKFDQLRTLLAKMGVDPEATFNLERGDRKTLNGNIVDAKLASAFGKSKWAKFNDVIQVECRQSLLHSESPEDFIRLMTQHGMDDKKADKLSGWTPADGYVAYSLKAMKKIVPFLEEGLDEYYAVEKAYPNRTSADAFYRLPTLSNKDLPQELQNITNPVVGKALVEVRKVINAITREHGIPTRIVVELARNMKAGPDARKRMSKQMREQQEKRDEARDRVDEYGGNRYSRSDVNRWMMWNEQNGQCVYTGQAIPPSELFNGAEWEVDHILPHWQSLDDSYMNKVLVSRNANHDKGDRTPTQWLGKGSQKQLDIIKRAYFMLKHGFPNGKLEKLKQEKVEADGFAQRQLNDTRYISKSVAQYLNLLYPQELRVGQKAVQTCTGGLTSELRRQWGLNNITDDMLDKDGNVVMAVETNLRGEPVKSRANHKHHAVDAIVVALSNRKTMKQYQDYCKVRREDQRPEFPVPWNGLREDTALYINTMFVSHRVMKKLSGALHKETFYGAVKDENGKVVPDKYVTRKKLENLSGKDVDNIRDDEIRSLIQQELYEKGWKGGTAVPKDWSQDGLVSKSGVPIRKVRVEVTMSNVATLGDKQHRFAALGNNNHVEIFKDADGKLLASVVPTMVAASRIKRDNIPAVKNDHGPGTEFVMSLSRKESVMITNPATKERVLCVVQMLSGDLEASNSMYLVLRDSQDSRASAEGNRYPLVRVVSAPGWNNLDIEKKQVDPLGRIFPAND

SEQ ID NO: 6448 - protein, 1036 aa, unidentified
  REGION 1..1036: note = Description of Unknown: Cas Enzyme sequence
MILGLDIGTNSVGWALIETDNEGKPCGIHAAGSRCFDAGLDGDVGSGRGEPRNAKRRDARQARRQGWRRARRRKKLIGILKKHGLLPKNMGTNPEEIHQSLIKLDAELKPNNVIDGDHRSNQLLPYILRAKAANKKVELYELGRALYHLAHRRGFLSNRKESDKEDDETGAVKGGIKDLREAMESTDAKTLGAYFATLDPSDARIRQRWTGRQMYIDEFNLIMDEQQQHHDINDENRKAIYKVIFDQRPLKSVAHLVGKCELEPTERRCMMALPIAQQFRMLSSVNNLFIEEDEYSQRPLTREERDTLINALTTEGDLTFAKIRGKTILGLPRGTKFNLERGGEKRMCGDRTTSAMINIFGDIWNEMPEKDQDRVINDLRSYEKTDALRKRAKKEWKLEGEALQAFLDVRLEEGYGNISRKALMKLVPLLEEGTPYSTARKDEYPESFSADSPSEIIPTVDSFFPNLRNPVVSRSLSEVRRVVNAICKEFGKPDVIRIELARDLKQSQKHRRDATKKMRDRESERLKAKDRIIAETNIASPSRNDILKVMLMDECGGICPYTGRPFGMRDILSSTPTMDIEHIIPFSRSLDDSFINKTLCDAQFNRNIKKNKTPWETSHGTDEWNKILNRVGKFKSQVRHLKLKRFELDEVGEELIEEFASRQLNDTRYASKLAAKLVATLYGGTSDEDGTLRVQTCAGRATAYLRNGWELNGILDDGPRKTRNDHRHHAVDAVCIALCDAKSVKLIAKAAEQLEERHHKLLGNIQAPWNNFVPSIRQVIENIIVSHRVDCRLNGALHEETNYSVRKQENGETLTKIRKPIEALSASEVNRIIDPRVKRVVIEALDGKPAKTAFKDRENHPRLETKSGQSIPIHRVTVEISSHKIVPVGSKGAPRNILPGSNHHMAVVAVLNDKGEEIKWEGHVVTRLEANQRKNRGETVIQRDWEDTEQGQQRKFKCSLRAGDTISIDHVERSGIWLVCGVSGKLIQIRRNNDARLKKDICSAGDWWQPAINSLRGSNLKRLSAHSTGFVRDWNA

SEQ ID NO: 6449 - protein, 1049 aa, unidentified
  REGION 1..1049: note = Description of Unknown: Cas Enzyme sequence
MAQDVVVDTVLGLDIGASSVGWALIELEDSQPVRILDGGSRIFPAGVEGDLASGRDEPRTIARTQARQARRQTFRRRQRKRRVWRRLQDAGLLPESCDIRPATIDATLKGLDRSLFAQHITDGDHRKAQILPYLLRKKAATEPCDPHTLGRALYHLAQHRGFLSNRKGGDDDDERGKVKAGISELAALIEASGEPTLGAYFASLDPTARRIRTRWTARSMYEDEFEVIRAMQAAHHPQLSEKFWARLRHDLYFQRPLKSQSHLIGRCTLEPDQQRAAACSLVSQRFRMLQSVNHLRVEESETSDRPLTDDERAGLLNALPNGGDLTVAKAKKAIGLPKSMKFTIERGGEKRIPGCRTNALMLGMLGEAWTEMDADTQTHFVETLEAFERDAPAAKWIRRRTGLGKAESEELAGLRLEPGHANHSRKAMLAMMPMLESGRSYMEARQEAYPESMVSTEPQPLIPPVDIALPGIRNPAVERALTEVRRLTNAIVREYGKPGFIRIELARDLKAGRKQRKALSDRNREIEKQREEAKRQLLDEAGIQTPSNRDIRKAILLEECGGICPYTGKSISWGSLFGAHPQFDIEHIIPKSCGGEDGFQNLTLCYNEENREVKKNKTPWEAYGGTPKWDQILDRVGRFNGERRMVQAKYKRFTNDSPQEDLLDGFTERQMNDTRYSSKLAMQLVGTLYGGTSDQAGTLRVQATAGRATATLRRLWGLENLLGEEGKTRADHRHHFVDALVTALTTPSAVRSIARAAERASEAGDRDLRVHVKPPWATLRSDAEAQIDHMVTSHRVDRRLQGALHQETNYSPLRGDLGGRDAEGTWRHIRKPIASLSASEVGQIVDAEVRKIVLAALEDSGKPAKDTFKDEADHPVLARKDGTTQPIHRVRTRKRQKAVPVGKKGHERYVAPGANHHMAVVGVLGPDGEVAKWEAHVVTLLEAVLRRKRGEPIVQKDWGEGRSLLFTMRSGDAIQIELEGHDEPQVCVVNTVSGTSMEAKLANDARSATDIRKAGVAGGRLVFSLKKLHASGACRVSIDQLGRIRRCHE

SEQ ID NO: 6450 - protein, 1003 aa, unidentified
  REGION 1..1003: note = Description of Unknown: Cas Enzyme sequence
VQRVLGLDLGTNSIGWAVIDVPDGDEDLGQVVAMGSRIFAEGAEAAGAALVTPAKDRRQKRSMRRQVQRRAKRRRRIRTELSALGLLPVDDREFESLMASDPAVLIDRSDRGEELTLREIGRVVYWFSSRRGFLSLRKGGGDFTDDDDDRSERPRYRRNQIHGETGEIVQRGQEDKLLGFLAEQAVHHPDLLTDQVIYGARGRLTYPVRPIRQGDFLSSGSTVDEFGIHGLVFFQRSVYWDESTIGRCSIDPRSGGPRALRADRLAQKYRVWKTVVDLRVGPGEGTPLTSEEREKVVGLLSNQKTASFGGLRRTLGLEPDEVINLERSGRDGLVGNETDAALRSALKTTWDALEENQRDRVASILLGNAPEDQVRRALASEFGLPPGEIDAAVDARFPSGRAAFGRRTLRRLLVEIPTCDDERDAIDNAGLETPEKVRSEREVVVSEITNPLVRKTLNELRKVLPAVAASHGREGSEPFDVVRIELTRDVRANYRSRQETNRRQRELEKANDAARTAIDEFGSGLKVSRDGLRRHRLWVEQGECCLYCGQPISAVALFGNQYELDHIIPRARTLDDSMANMALVHASENSDKGDRTPVEWRGIDGAQRIADRAKGDHPWRLIRGKVDRILREEVDEEIAPAALVVITGYINSLARDLVQQEVGIKPEVSSGRLTAALRYRMGLNKASNDHRRHAMDAAMVALTDLRTARSLADRYRRERDHGRRRDDQWGSYEPWPGLRDDIVAHYDTINVSHAAKGRIRGQLHNETNYGRVNSPYLELEDGYAFRRPVTAIDKPARLAEVADPAVKAALIDNLQRRGISPDATSFKFDVNDPPRMPDGTAKDGSRVPGTPILKVRCHKNYPGNRIIRPESQPKTGVAMDSNHTAYVYENSSTGRWRVHVVQRFDAFTRRNRSLSELRTMYALDDESFLFSVTVGSTLQLATEDGSRLFYVKSLNTANRRMDLRPVADTYGGKKVNYSAKKLRDAKASKVVVLPSGEVRTARD

SEQ ID NO: 6451 - protein, 1116 aa, unidentified
  REGION 1..1116: note = Description of Unknown: Cas Enzyme sequence
VAKNSNQKTSSHIPYILGLDIGTNSCGWAVVALSKTGQPIGLLKDPDGKHPAMGVRIFDAGMENLGQGKREESPAVKRRTARHQRRQLTRRSRKRKKIFGLLQSAGLLPQFAQGAYDDAGGEQPARDQLLKALDQELSNALASREPEMTADAHERLPLLLRARGLDEPLTPLELGRALYNLAQRRGFLSNRKSDAQDDEELGVVKTQIGELGKAMEAIDPETGEPRARTLGEYLFKLNPDEERARSRWTARKMFEVEFEALWKAQAPHHPKLLTDDFHKKLHRAFFHQRPLKSQRNLIGLCEFENGRERVHTETGEVYTTLKRRRAPACLPIAQRFVLLQKVNDLRICAKNANDKGVPLDEDQRRILIGALEENGRMTMAQARKLVGIKPRDKKVFSLERGGEKSLPGNRANAEFLKLFGERWKALDEQDQELAVLALWDGTSDEVIKRHARERRGIWAKLKPTSSEAEGIPKIPLSQDYMSLSRRALSKIVPELEKGIPYATAWNDVYGPSMSKDIHDTLPPLLEGFGDLRNPVVTRALTEVRHTVNAIIRYHGKPSLVRVELARDLKKNAEQRQEAIKLGRANEEKREAAAKRIIEEAGLSNPRGGDLLKARLWEECGHLCPYTGATINFTDLFGADVDIEHIIPFSRSLDDSFMNKTLCMANYNRKTKGNKTPVEVTGGEGEDWEKMVNRMTLAVQEHGMPKYKLELFQLAGDELDAHLDGFANRQLSDTRYISRQARAYLTLLFGGHLERGVDAEGKTRVQVGNGQATALLRNSISGLNRFLKENGKKSRDDHRHHAVDALATALTSPSIIQELADLANDPANPRPGRIPPMEEPWEDFSTDVNDALDALWVSKKVANRVRGALHEETLYSPPRDDRGRRVDETHEGDRWVHFRKPIWNLRESELERIIDPGVRDAVKKKLQSSGKSDPGKAFKDDDPSTWPVFGTRRPRRIRHVRIRKKDSSRPLAKGHRIRFVDNKENHHLEILKTTDKRGREKWIGEMVTLDEAYRRTRAGNPVVRRDHGEGREFLFSLAKGEVFKTASPTETGQVFRVRGLTQNAKETIIITFQEINDARVYSKISNKGLSATPSALQKLGARKLTLDPGGIARDSRA

SEQ ID NO: 6452 - protein, 1035 aa, unidentified
  REGION 1..1035: note = Description of Unknown: Cas Enzyme sequence
MSEKTVLGLDLGAASVGWALLRYDADDSTGSIIACGSRIFPQGVDGDLARGREESRNVKRREARQSRRQGWRRKRRIWKTYRTLQDGGLLPPGGEKDSRERHQCLQELDRQLREELYPDADRRESHLLPYLLRRDALDGELPEHAVGRAILHLAMRRGFQSNRRAPIRDDEEAGVVKSSIESLKTEMEAAGCRTVGEYFSTLDPEQQRIRQRYLGREQIRQELEQIWKCQSGYHSAMTDELWKKVFHALLDQRALKSQKGLVARCDLEDDQRRIARAHRLFQRFRTLHKVNDLNIIDKTTGEITIPDAEQREALLEQLSRGDLSWTKAKNALGVKPRGTKLNLEDTGDKKLIGDRNAEKLIPIFGEERWTALEDDDRDQLVEDLLTIEDPAALKRRGIHHWGLEAEAAQKLSETALEDGRGSLSRRAIEKMLPRLEEGVQYATVRKEFYPSLLDAGNPVDHLPSVKEAFGMLRNPAVERTLTELRKVVNAVVREHGKPDLIRIELARDLRKPKTVRQKIQKRQRDQEKRREAAKQKLLDQHLVKAPTRNDIEKMLLADECNMQCPYTGQTFGLHDLFGAHPSIDVEHIIPYSRSQDNSYLNKTLCLRQENARKNNRTPFEMYSGDAERYQQILDRVARFQGTGRQRKQNLFQMEEIPDGFAARDLVDTAYASRLAMEYTGLLFGGEVDADDRRRVQASGGRTTSLLRWQWGLEDVLGGEKGKNRSDHRHHALDAIVIACTGPATIEQISRASERAEQERSRRLLETPLPLPWSRFQIEVEEALAGVIVSHRPRRRVRGELHKTNELGSPRPIPGSEKPEHRSRKELVNLNLKDIPKIIDPTVRQAVQKALEATSEKTPKEAFKSPANLPYLPRPDQPDVVIRRVRLIDRRHPINIGSDKDQRYVLKGRNHHLVVVAALDPETDEVTEWEEHLVTLLEASRRKEAKEPIFQTEWGPGRRFLFSICVGDILEQDVSGERRLVIVKGISRNDIERSLINDADNSKTKLRIRGGIANLKKVGAVKKSVQVLGVVRDSHD

SEQ ID NO: 6453 - protein, 1015 aa, unidentified
  REGION 1..1015: note = Description of Unknown: Cas Enzyme sequence
VTYRLGLDLGTNSIGWAVIRLDDELATAELLDAGSRIFSDGRNPKDGSSLASRRRMARSARRRRDRGTTRKRLLLNALVRHGLMPGSEADRKALQARDPYAIRAHALNHRVDLHELGRALFHLGQRRGFKSNRRSASDDDGVVRTGISNLQARLDEHRCRTVGEYLHQLKRAGSSVRARRPGPRDEYPFYLSRQLIEDEFLLLCSVQARHHSELTDQVRDDLHRIIFHQRPLKPVDPGVCALDLSQKRAPKALRLTQEFRILQELANLRVEVAGETAYPLTESQFDGAYEKLRWSQKVTFKGLRKQFSLPKESSFNLEASGRAYLDGDKIAAVMGANKRFGKAWRSFDEAFRDSVVDALTGDLSDDELLTLAQEEWDLDADQADQVVRAPLPDGYGKLSQCALERIVPIMRDQRLGYAEAAKLAGYNHSNQGPEKLLQQLPYYGRVLGSHVVGDSGNKDDSEEQRFGRLPNPTVHIGLNQLRKVINAVIRRYGAPKQIVIELARELKMSKKAKERVSKLQANNRQVNDDARAELATLGQKDNGENRMRYRLWLRSAANPLDRCCVYTGEIISLSRLFSAEVEIDHILPFSQTLDNSASNRILCLRRANRHKGNQTPWEAFSGSPEGYNWNAILASVEEHGQYVARRFNEDAITRFSEEGSFLDRHLTDTAYLSRIAREYLCHVCPSNQVWSVPGRLTAMLRGVWGLNSVLGGARGKNRQDHRHHAVDAVVIACTDRSTLQRVSRNAEGARERLLADLEHPWEGFRDEVKAIIGAVLVAHRQDHGTGGALHNDTAYGIVDGPDSNGIYTVVSRKPLSSLKPNQVEQVADPTLRASLHEAVERAGSDNKSWAAELATFTRTHGVRRVRLHERLGNLVLVGNSAGEPYKAYKADGNHCMDALRLPDGKWRGFCFTRYAAAQKGVTPPWKQRWPAARRIFRLHKNDLLEVPEGSNAGLFRIVKMSKESLTLVMHAEAGDLKKRDADGQDSFKYLTTSVGKLGELKARPVRLDVLGARMD

SEQ ID NO: 6454 - protein, 1058 aa, unidentified
  REGION 1..1058: note = Description of Unknown: Cas Enzyme sequence
MTTHNVRYRLGLDLGTNSIGWAAIRLDERDGPCGVLDLGVRIFPDGRNPQDKTSLAVQRRVPRGARRRRDRYLRRRSGLMDELAACGLMPPDRDACKELERLDPYVLRARALDHPLKPFELGRALFHLGQRRGFKSNRKARGRDESQDKKTRDDIGQLRRRIEESGARTLGEFLAARHAARRTVRARAGEGLYPDRALYEAEFDAIRGAQQAQQALRPDQWDSLNSIIFFQRPLKPVDPGWCLLEAGKPRAPRALPIAQEFRMLQEVANLRMRNGAEPERPLTSEERARAMARLRLGRDINLKKKPTRDLRLPTDTVFNLSRGGRSTVTGDQTAKCLAKDGIFGKRWLAMGLDERNEIVRFLLETEDPEAVRAKAHSDWSLSNGEASAVAEATLPDRYANLSEEAIRRILPFMEEQGLGYSDAVVAAGYPHHSDFRNPEAHDTLPYYGVVLERDVVGADPKASGKDAPARHGRIPNPTVHIGLGQVRRVVNRLMERHGKPEEIIIELARELKSNREQLAQYARRQREGGERNRRFTDMLESAELPVTPDALRRLRLWDEQGPAQARVCPYTGTVISFEMAVSAATEIDHILPFSRTLDNSMSNMVICIADANRAKGNRTPYEAFGHSPAKYDYDRILARTAPPGFPDNKSWRFQPDAMEKFEANRGFLDRQLNETRYLSRTARTYLAHLYDEKDEQRQRVRVVPGQMTALLRRGWGLEGMLKGASDGAGEAPLRKQRDDHRHHAIDAFVVANTTQGLLQRFASAAAAGHDVAGRLAALVPCPWQEFRRGDLRLYLDRMVVSHKPDHGTRGVRGKTTGQLHNETAYGLVEPVGDDAWTVVVRKPLSALKIPGDLAAVRDPALRAALLELWERVKAEGGRPADFAERAAAEGVRLSGKVQRVRRVRVLDTQRVIPIKDHEGHPYKGYVPGGNEFAEVWCMPNGEWKLVVASTFDANQPGFNPAHLRPHPAAKRLARLHRDDMGALGHGQNRHVVQVRKITAARAGVYVVLDDHNEANVPARVGKDMKENRYSARQLKRHGFRKVGVDEIGRLIDPGSHVP

SEQ ID NO: 6455 - protein, 1033 aa, unidentified
  REGION 1..1033: note = Description of Unknown: Cas Enzyme sequence
MSRKILGLDLGSNSIGWALLNEEDNGPAGFIGSGVRIFTRAVEEKTPTPKNAKRRQRRLARRVVQRRARRKQRLLAYLIKLDLLPATLAGNSQPEVTLNSLGDPYALRAKALDDPLTQHELGRVLLHLVQRRGFLSNRKTTLGDMVDDPDVQSVLEELEGEEDTSSERAKEETAFKKDISQLRDDITASGCRTLGEYLSKKSLHELKRNRAHDGGHLRTDRQMYREELAAIFASQTPHHDTLTDEVRSEIEEIIFKQRPLKLRSDRVGRCSLEKKNTRARMARLEVQRFRYLQDINHLQYFDPYSDAYVSLSKKDREKLVELFESKSAVTFPQIRATLGLDKKTEFNLDYGTKKLKGNITATTIRGVWEDWDDLDSEQQHALVEDLITINKKSVLKTRLMKHWGLDASDAVNLAMLEFEPGHANLSLKAIKKLLPFLADGEIYSDARVSAGYGFDVDEIDPEENLGLPPEIPNPIVAKGLSELRRVINALIKEYGKPDAIRIEMARDLEMNTKRYGQYLKQQKANTVANEEATEEFKSIGDKNPHLGLSAYPSRADKIRYRLWKDQNQLCAYSGKTISLTQLFSGEVEVDHILPLSESLDDSYMNKVVCLTAENREKGQRTPIDAFSADEDKWNQIVSRVSGWDKKLRSKRERFFMTADDVVKRDFLNSQLNDTRYIARVALEYLATLGCDVSTSKGVTTSWLRHQWDLNSLLGASSLKERTDHRHHLIDAAVVACVDRGFYKTLVGLAKSLERTRSDLTMNDLHTDAPWDEFREDLRGQLDSVIVSHDPQRKITGALHEETGVGFVEGLGNVYRLALTPDFKATQVDKIIDPAVRECVRTHLATHGDDSKTAFAPDQTVFHRNGRTPIKRVRVLQSKTTLAKLQKAKFGVKDQTGEVFKWHAYGNLHHVEVLREKSSGDISEIFVTMMEAAHRVHGVNGPKRPVIQTDHGPDFDFVMSLCINDLVNVPAVGGDRIYRVQKLDAGHKAVALRLHTASTLSDAAETLPIRESTVKKLIEVGARKIEVNSIGKIV

SEQ ID NO: 6456 - protein, 1031 aa, unidentified
  REGION 1..1031: note = Description of Unknown: Cas Enzyme sequence
MVKKVLGLDLGSNSLGWALLEETDGSASGIIDIGSRIFTKAVEDLVPTPKNVKRRDMRLGRRVIQRRSRRKQRMLNYLVSLKLLPRELQGNTQPEIILNELGDPYELRAKALDSQLTAHEFGRILLHFVARRGFLSTKKQVAGDLIDDPDTIVFLSELDNKPTKDKEEGVFKADIGEVRAAINESGARTLGEYLHKLAQGQCKRNRSHEGGHLRTDRKMYQDELALIWERQKQYFEHLPDDFMAKDQGVKQIIFYQRPLKLKKDRVGKCSLEPKNNRASMARLEVQRFRYLQDFNNLQYFERHTDQWLSIRDEDKQALADHFESHPKITMSQLKKILGLDKQTKLNLEAKNLKGNITACEIRSVIHEQWDNYSEENQYALVEDLLSIKKKSALKTRLIKHWSLDKSKAIELCLVEFEPGHSNLSLKAINTLLPFLKQGLIYSKKDHESGELGALQAAGYDDVSEELEILDKLPKPIETSNPIVNKGLHELRRVVNAIIKQYGKPDVVRIEMARDLEMNTKRYKENEARQAKNKKENEKAVDAFRDLNLGKYPSHNDKIKYRLWEEQGHCCAYSNNTIPLSTVFTAQVEIDHILPYKKSLDDSYMNKVLCFTAENRTKGDRTPRDAWGGNDEKWTQITQAISHWKGVDSKVKRFSQTETDLQTRDFISSQLNDTRYIAKLALEYMKHLGCDVSVTKGFVVSQIRHQWGFNDLIGEVNKKDRTDHRHHAIDAVVIAATSPQLYKKAVNQIENNKLKIDPPYLEIRDELALQLKDTVVSHASQKKLSGELHEVTGAGYIERHGGLVYRKTLTPDLTAKKAKGIIKSIVDKTVQGIVQDHLENHEDDPKKAFADGVTIYHKDGKTPIKRVRILQSTATEETLRQNKFGVKDKSGKVFKYMTYGNMHHVEILKHQGTGKFKGEFITMMQASHRAKGVQSALNPEGYKQPIVRMFHGGEWQFVMALHINDLVGIDREGVTVLYRVQQLESPNRLTLRLNTAATIGNKDEKIRRAISVLMSQGLVKYNINAIGIIAND

SEQ ID NO: 6457 - protein, 1143 aa, unidentified
  REGION 1..1143: note = Description of Unknown: Cas Enzyme sequence
MIATDFEEWRETGKDGDDRLKVQAVNYGGFYDTSSANHPAMGVRVFEAGLDNFNSAKEKALNQKRRESRSARRVHARRNARRKALRKLLAKHNFLPSDDNERERLLVATDDTGQLLLNPYKLRAEGLDRKLEPFELGRALYHFAQRRGFKSNRKSGKEQDDEGMLAEIKALGQDIEKAGTRTLGEFLWKLGWGEDGQSEILRKGQLRLRCRHTRRNMYQNEVELLLNKQEEFYPELAQIRGDESTPNTIVHSIFFQHPFELTDERRERAPSRANLHRAPQTKPCPLERGEYGCPKSAWIAQRFRMLKEVCNLQIIPRLGDGLDWKQKRFLSKEERNHLVTFMSKQKSNSFSSIASELAKNFGTNKKAFFNLQKGGREGLDGNFIDATLAGLVGKKVWSNLQHEQQQLLRTSILNEEDPEALVAAFSEYGLDEKKEKTLKKFNPDQTSGYLSFSAKAMERLVPILENGEPGEGEYEALVKAYPDRPVANAFTRTYKDGSVVPALPYLQHPDLPHELKDITNPLVRRALGEIRKVVNAVVREHGLPGQIVVELARDIKMGPKQRKEVSKRNNLNRKRKEECRTQVQSILGSERAPLFADVQQYMLWCEQDKCCLYSGKAIPQSALFSGALDVDHILPHWQSLDDSQVNKVLCYREENAAKGQRLPIDWLGANGKKYEALLSRTMDLVEKNNTGLRKRFEAIDKWGVSILERAKFYADNIPGPWSQRLRRILLEEIDTDGFSSRQLNDTRYISRSAIRFLELLYHPERRTGEKAVRATRGGLTSELRWQWGINDLLKGDPLRNIKGEVISELDADGKKSRSDHRHHAIDAVVVALSSRSMLRKFQIHHKQRENIELSREDLVDLESGTFNDPWENFRHSVQQEALQINVSHRVQRKVGGQFHEETFYGQLKDPHGVVVEGKYVTRKTLENLSGKDVRSIKDKGIQRIVNSRLIESGWDGKATALPKDWWQTELISPAGLPIRKVRVVLQKDPSKMITLGDKQHRHAVKGNNHHTVFVEIPGKTGPEIRVAVLPKVEAANRVRRNATKAVQDLWPEDGKFLFSLSRKESIIIRSDDRETLCLLQKQSGKFNLSTGCQIVFREHLDSRPAGTGNKSPFALLASGSAIKKAAPAKVTVDPIGRIFPAND

SEQ ID NO: 6458 - protein, 1098 aa, unidentified
  REGION 1..1098: note = Description of Unknown: Cas Enzyme sequence
MLYNCEKGLTVGIDVGTTSLGYSVARQVNGFVKILETIGTVRFRESVNSKGTKSLASKRTKHKSVRVTLKRKAGRKKDLKKLFLESGLVSLAEIQGLSSLDSLSIRASACNNEVASIELLSALIHMSSRRGFKSNRKDAASNEDSNSIYEGSDKTSTVGVNKLHLEMKSRKCETVGQLALLKRRENKRFSFYRLRSDIEAEFDLVWEKQAAHNSRLNDSLKSIAHDIIFYQNPIPKQTDLIGSCCYIDGERRACKVESAAQEFIYLKYVNDNLYKHDGIESQTLTESDISVITSFCKAKVDNKAKKDFENNSLTSALTFPIAFIGLSKAFKKETGSELLTKRVKSKNGKDEFGKVPFSGAEYFKALLSCHGFSEFVSDKDIDNLIALFVEESEESIIINTFKDSAKSFSNLSEEKIKSFFDISFVCLSFKSRFLNLSFEAAQTINALMNTGMKEYEATKLIGYVNKKISKNTYSYLIPYNQFISENNLTAMTNNAVKRSMKEIRRVINEIIKKYGMPEFIHIELARETDKSPNKKSHNDFIAKNNAEKELAIAYYTERGLVIENGELDGTLLKRHKLWIECNKITPYTGVPIPAPDDRMFEIEHMIPSSLGGSDSIHNLTLATIEENAFKGERAPCGAYADNAPLYKDMLERVSAFSGANRDKKLNIFKAHGGILDNVISEESLLRHGVDTSYTAREVRNYLSTIVAPEKIFSIRAHHVAMISDYLNAHKISRKLTMDVLRADYQTNIDFSDKDTVKAVKRVIGRKGRQTNYHHAVDAAVIALITPKFLAKYLKSLEHKYKNMTNPVLKNESYMDAMNNLVKEMNISWSSPKETIGQLHDESIFGIRGSESDYKITNAFNRDVFGFKTKLLEVTKVAKTSIFKLEKGIKKFLPEKDIIKITDKRIQGLYREWMAQGDLNAPLLIPTYRNGKRIVSRCHKVTMTHEKASLISLGRGRYASNSLTYCLAVLKNKVTGNIVCTVITGIEAMEMNGFSLDKRLSCEFELLSTFKTGDLIKYDNGVASIIATINSKGRIVFYSSLRANELSIETYDDKGTVKARGKRAQGRSIAVSSKNINLFKKISVSPLGDVYETGCGDIK

SEQ ID NO: 6459 - protein, 1062 aa, unidentified
  REGION 1..1062: note = Description of Unknown: Cas Enzyme sequence
MSDYVLGLDLGPNSVGWAMLNLNASGEIDGFFDTTHAGHPPMGVRVFEAGLHNFGTAKEESLNQKRRLARSMRRNHARRNARRRAVRSLLQDAGLLPRDRQELAAVFQTDPYELRARALDEPLEPYELGRAIYHLAQRRGFKSNRKSGNAKEDKGILGLLGELARQIEESGSRTLGEYLFRLENQSSELGRVRLRNRHTRRDMYVEEFKRIIESQRPHHGAILTDDVVAHLDHYLFYQHPFEVTEERRRHTPSRANLHRAPSVKPCPLEREEKVCPKGEWIAQRFRLLKEVNNLRIAVRGSRERPLTREEREIILEKLSGTEKQSFDALRKLLAGKIGVDPDHIVFNLERGDRRHLQGNIVEHKLATAFGRKQWAALDDIEKETIRDALLHEEDPGKLKQFMAQHGVKADKLDKLIAWNPPDGYVGFSKLALEKIVPFLEQGLNEHEAIEKAYPDRSAAKEMPLLPVIDSPDLPTDLQQITNPVVRRALVETRKVVNALIREHGKPARIVVELARDMKQGPEGRRRISRQQRQREQERQEALSRIREFGGNPYSRRDVERWFLWKEQGEHCLYTGRPIPATELFQGGEWEVDHILPRWQSLDDSYMNKALVHRSANLDKGDRTPMQWLGENSQRYVQLMDRARDLVKRCGFPVPKYARLRTPEVDSEAFAERQLNDTRYITVAVTRYLQLLYPPELRVGQKAVLSSRGSLTSELRRQWGLNNVLDDILDKEGKPILARTSGDLEVKSRADHRHHAIDAVVIALSSRNLLKRYQDHWKKRQQVGVRLEFDRPWPDFQADVARHANSIVVSHRPIRKVSGPLHEETFYGAIDPGGNRFVTRKELPALTGKSVYAIRDAKIRELVMNRLYACGWDGESNDLPKGWLEEPLTMPSGVPIRKVRIESTVNNAIPLGHRYAVSGNNHHMEIYRMARNDGSPGYKAAVIPMFEAVRRIHPPKGECARPLVGATVEDGWQLQMSLCRKDTVQLYNPGTGERTYCVVQAMAGSSEPSTTIDLYLRDVRDSRPASEGNKSPFLRLKSFKHWRALCIRKVQVDPLGRVFPAGD

SEQ ID NO: 6460 - protein, 1138 aa, unidentified
  REGION 1..1138: note = Description of Unknown: Cas Enzyme sequence
MGVKRNSERYFLGLDIGIASVGWALLSGKRIIDLGVRCFDKAETADKGESLNLARRMARLMRHRLQHRKARLSRLATLLKQEGLIARKSVLRKPPRKGSPAPRLWQLRVEALERCLAPEEWARVIYHICKHRGFHWQSKAEEAAQEKDKEGGRVKQGLAATTRLMMEKGYRTAAEMVVNEFPDAQRNKRGDYSKALSRTLLAEELALLFQRQRELGNPHAHDQLEHMILGNGDKKSGLLWEQRPPLSGEKLLKMLGRCTFERDEYRAPKASFTAERHVLLTRVNNLRLNEDGCTRPLNDEERRVALSLPYQRKSDISYDQLRTAWKKAGLIGDGFTFSGLRYPPPSEEKAKNPESAKFVQLRGWHDIRKALEGAGLQAEWREMADAALSGDPEQLDGIARVLSVYKEDDEARPKLQELNLPGGDAVTEALLTVRFDKFSNLSLKALRRILPHMERGLRYDEACRAAGYHHSMVHNDNQEKKKYLPPFYVVKKGKLTLNTDMDLPRNPVVLRALNQARKVVNAIVREYGPPMEVHIEMARDLSRPLDERRRIEHEQQNYQDRNEKDRERFIEHFGREPKGLEFPKWQLYREQQGKCAYSFDSIDLNRLLEPGYVEIDHALPYSRSFDDSKNNKVLCFARENRNKGNQTPYEYLDGANDSERWRAFVAFVQSNKAWRPAKKNRLLRKDFGEESAREFRERNLNDTRYICRFFKNYVEQYLSLHESSKAKRCTVVSGGLTSLLRARWGLRKLRGDSDRHHALDAAVVAACGHWQVQQMNTYVARQGWVFNEESNSYVNTFTGECLSSREFTELDEVRKLLPLPWPHFRQELETRLYENDPEELRERLRALGAYDDAALDVARPLFVSRAPQRRNSGAAHKETIYGQSRRLKEKSAVTQRVPLTSLKLSDVDKLVDPERNQRLYDALRAWLGGKPERESKIKEIKAEAKAGKRELTTDEISKIAALEALPRKPGKSGRSSGPVVRTVTMVVDKMSGIPVRGGIAKNDTMLRVDVFTKSGRFFLVPVYVHHRVTGVPNHAIVAHKNESEWIEMDKSYTFLFSLHPNDFVRVTLKKEIWLGYYSGCDRASGTIALWAHDRAKSIGKGGLIRGIGVKTALKLEKFHVDVLGRVYPAKAEPRRGLA

SEQ ID NO: 6461 - protein, 1064 aa, unidentified
  REGION 1..1064: note = Description of Unknown: Cas Enzyme sequence
MKKVLGLDLGSNSIGWALLEEKDGKAHRIIDLGSRIFTKAVEEKTPTPKNVKRRDKRLARRVLQRRARRKQRMMNYLVLLGLLPAEIKAHPQPEKLLNKIGVPLKDNDGNPLRTIKGHPVYPNPYELRAKALDAPLAPHEFGRILLHLVQRRGFLSNRKTMLSDMMDDPDVLSVLNELDEKDEQGDATEKAKEETAFKKDISELRNKINAENCRTLGEYLSKFPHQTAKRNRTRNGGHLRTDRQMYQEELDKIWEEQKKYHAVLTANVKEQIEQIIFFQRPLKLKEDRVGKCSLEPRNKRAQIARLEYQRFRYLQDINNLQYLDFFEDKWIALNDAQKEKLKTLFETKPAITFANIRSKLKLDKSAEFNLEHGNKKLKGNITACEMQKALPAWDDLSYDDQLALVEDMLTIHKKSALKTRLMNHWNFDARTAVNLCLIEFEPGYGSHSLKAVHKLLPFLETGDIYSEARQKAGYGYEQEDEKTIDRLGIPPEIPNPIVSRGLHELRRVVNAIIAEYGKPDKIRIEMARDLEMNTKRYKAFEKQQKANTKANDDATKLYQEMGKKYPHLYLSKYPSHADKLKYRLWKDQKELCAYELVGTKISEAELFSANIEIDHILPYSQSLDDSYMNKVVCRTRENRVKGQRTPIDAFGSDEEKWQQISGRLRHWDRGLKSKKNRFYMAGKDVQKRDFISNQLNDTRYISKVALEYLKPLGADINVTKGIMTSWLRYQWNLNSLIGQDKKNKDRVDHRHHTIDALVTACIDRTFYQNLVKLAKDLEKERSQFTPKDIHTDIPWQNLRKDLNIALENMIVSHAPQRKITGSLNEETGTGFIEGVGTVYRANLSPDFKLPQVKKIVDSEVREIVDKHLLVYGNDPKKAFAEGVTVYHKDGKTPIKRVRIVQSKTTRKKLEATKFGIKNKQGNVFRWMAFGNMHHVEIVQHKDTGTYKGIFITMMEAHRRAMTGTKSARKRGILFEPMVMTNHGEDAELIMALHINDLVSIDTANSEKFYRIQKLDGAGSRAMLRLHTAATIKNTDEEINLSISSLMQREMKLCRLNSIGKILND

SEQ ID NO: 6462 - protein, 1046 aa, unidentified
  REGION 1..1046: note = Description of Unknown: Cas Enzyme sequence
MKKVLGLDLGSNSIGWALLEEKDGKANRIIDLGSRIFTKAVEEKTPTPKNVKRRDKRLARRVLQRRARRKQRMMNYLVSLGLLPAELKGHTQPEIMLNPLGDPYELRAKALDAPLTPHELGRILLHLVQRRGFLSNRKTMLSDMMDDPDVLSVLNELDEKDEQGDATEKAKEETAFKKDISELRNKINAANCRTLGEYLSKLPPQTAKRNRIRNGGHLRTDRQMYQEELDKIWGEQQKHHAVLTDDVKEQIEQIIFFQRPLKLKENRVGKCSLEPRNKRAQIARLEYQQFRYLQDINNLQYLDLFEDKWIALNDAQKEKLKALFESKPAITFANIRRELKLDKSAEFNLEHGNKKLKGNITACEMQKALPAWDDLSHDDQLVLVEDMLTIHKKSALKTRLMNHWNLNARTAVNLCLIEFEPGYGSHSLKAIHKLLPFLEKGELYSEARQKAGYGYEQEDEEVIDRLGMPPEIPNPIVSRGLHELRRVVNAIIAEYGKPDKIRIEMARDLEMNTKRYKAFVKQQKANTKANDDATKLYQEMGKKYPHLNLSKYPSHADKLKYRLWRDQKELCAYDLIGTKISEAELFSANIEIDHILPYSQSLDDSYMNKVVCRTRENRIKGQRTPIDAFGSDEDKWQQISGRLRHWDRGLKSKKNRFYTTSKDGQKRDFINSQLNDTRYISKIALEYLQPLGADISVTKGIMTSWLRHQWNLNSLIGQNKKNKDRVDHRHHTIDALVTACIDRTFYQNLVKLAKDLEKEKSQFTPKDIHTDTPWGNLRRDLNIALENMIVSHAPQRKITGSLNEETGTGFVEGVGTVYRANLSLDFKLPQVKKIVDSEVQEIVAKHLSVYGNDPKKAFAEGVTVYHKDGKTPIKRVRIVQSKTTRKKLEVTKFGIKDKQGNVFRWMAYGNMHHVEIVQHKVTGTYKGIFITMMEAHRRAMTGTKSARKRGVLFEPIVMADHDEDMQFIMALHINDLVSIATDDGEMFYRVQKLDTSNKRIHLRLHTASTIANNNETFPDRELTAKALMEKNMKPYSVNAIGKLMND

SEQ ID NO: 6463 - protein, 1014 aa, unidentified
  REGION 1..1014: note = Description of Unknown: Cas Enzyme sequence
MREKSLIFAFDIGYKFHGWAVNRNFDKTEGMSAGVYGFEIPEDKKTVENEIKREKRRRARNKERRRKVSELITKTGIAQSQKDFLDRVNQTHTHSFWQILKTAHYQPILPFDFARILYKFSKNRYYVDMRKKKRNNKEKDAQEGKIKTVFNAIEQFKEFNETWFEAFLKYREDIKKEVSNKLQLQNFPYRNKKLLKDNKKITIKDFSISPDYYQFLNNEMMVESIEEIARRQREDFKQNHPIFSKEIIDKWKKIVTDKGHLQNSLKMVGKCLSGNNKIRAPKNSIDAERVRIAELWNDLGLCEKDAKQTIKAKDLGISFDEFNALLLKLLEHSQDSENGKITGKQFIEKLKELSLLENDKTYFITKHFGQKDKANATLISLKGHSQLAKVENETFKQKFLSNVEFRDKIETELMTEKNLDRLEENLTKIISAYFKIGDTNLRNLIQKISNFESGKPSGYSAEALRNILPYIANDNKSFKEAIELSYPSSVISKNELRTYLSFELYQEENRYRNIKNPYQDAIVKNFVYIFNKLVQKFGHPDQIVFETTRAILSPDETEAEIVKINDNIKANEKIDEILKQYDLKNEKGTKERIRLWLEQGGKLNKDTQTPAICVITGDTISLQEALNGQKTNIDHIIPQSIINDNRMVNKILLSANLNQSDKSDLTPFNYLKEKLGKSTKEAKKFLEKNIKKIKSDKPFTMSSLKKRNILLSIPMDDLKKSIEDGLDGMDQRMYGVTNASVKMIMNLLKNQLHLNRPQLSKEQIASKILPIAGGVTSQFRRAWLKKYKKDRNFYDNHAVDAMILLNFDRSMLQKYATKKKKGILDGKEGKDPREIIQEFKPTIENFQERVLQIVDQFRNNKLFVHWQETKRFPKARITEQTSYKKKDALAGSCLTKKGHIKCHSGGFSKIELYEENLNEKKKLVGVRLHPFIMQNAKIKQPKDSEKLFVLYRNSIIKFEDEFYRVIGFSEDKNGAQKFEFDFVNKNKDKRIIKSFKTKNIKKCSINPFGKIKIM

SEQ ID NO: 6464 - protein, 968 aa, unidentified
  REGION 1..968: note = Description of Unknown: Cas Enzyme sequence
MAKILGLDLGTNSIGWAIVEKNKGEEFKLLDKGVRIFQEGVKIEKGIEGSKAAERTGFRSARRIKYRRKMRKIQTLKVLSEFGYCPKLTSKELDNWRYKKVYPYNREFRRWWLTDEKTKKTPYYFRHIAVTKQLDLNSEEDRFIIGRAFYHITQRRGFLSNRLEGTKESDGAVKKAIAEISEAKEEKTLGQYFYKKYMKGEKIRDTYTHREEHYIEEFNRICEFQNLPKEFVDNVRRAIFYQRPLKSQKGLLGKCVFESNKPRCSVSRPEFEEYRMLCFINNIKIKTPNDEKLRFLSENEKEKIVPQFLRKSKPHFDFEELAKLLAPKKQYKFYKGRDINPEDWLFNYSMKTTVSGCPVSTRFKDLFGEDFMDVKLEYTRERDKKTSVIDIYDIWHVLLTFDSEQKLVEFAQKRLYLDNKQVKKFLKIQLKKDYASLSLKAIRKILPYLREGLIYPHAVFLANIEEAIPAEIWNDDENKKIIRTEIHSIIQTQNEEKQIIEIVNGIIKTNRNEEAVWSEEAKGTFKNDLIKKLNSYYGLQKYDSFPEEKKNRIEENAFKLLERQMQKNMGRGEFIKVQRIDDRVKTFITDNFDVEEANLEKIYHPSAIEIYKPPIKKEDGRLYLGSPMVSSIRNPMAMRALHQLRKVLNELIKNDIIDATSKIHIEMARDLMNANERKAYKNWQDDREKIRKEYVLRIKEYFGTDYEPPEDEILKYQLWEEQKHKCIYTDKEIRLSDFLGADPEFDIEHTIPRSLSFDNSQENKTLCENKFNRSIKKNKIPSQLGETKWKEILERIEPWKEKYVELDKQIQIAVRQTKGAADKESKDRAIQKRHRLTYERNYWKNKYHRFTMEDVPEGFKNSQLVDTGIITKYSRMYLKTLFDKVYTVKGNTVADFRKMWGLQEEYEKKARVNHIHHCIDAITIACITKENYENLAKFYHDWEELHIKGVDQLPPVDKPWKTFTEDVI

SEQ ID NO: 6465 - protein, 1092 aa, unidentified
  REGION 1..1092: note = Description of Unknown: Cas Enzyme sequence
MQQYRLALDIGTNSVGWCALGLDTARTPLQAQSILDMGVRIFPDGRSPKDGSSNAIARRLARGMRRNRDRFLDRRNRLMEELIKAGLMPDDEAERRAMTAVDPYELRARGIKEKLSLHEFGRALFHLNQRRGFKSNRKSDAKDKEVGVIKEALKQQDAKMEALDAETFGEYLYRLREQGETIRSRLIETRRVDDKGKEKTQKHYDFYPSRSDLEKEFETLWGRQAKHHPAELTGALRERIHPIIFYQRPLKSPVVGKCTFERSEERAPKALPIVQRARIYQELNNLRIRDTETLSEYSLDKAERDLLAELLCQPRGKKGGKSEVKFNAMRKKLGLSARTVFNYESEKRKGLEADTTSALLAHKERFGPRWYQLSDEKQELILDALLHDTDEEELVQKLMADWNLDRQHAEAISNTPLPDGHGRLGLTATRKILAQLAAGVIPYSEGVVRAGYQSHSQFRSGEARERLPYYGEVLERHVLPDPEKGGHPAAKLEQRYGKVTNPTVHIALNQLRKVVNEVMKLHGQPAEVHVEVLRELKNSAKQRKEIEKAQAANQEQNDACARRLREEFHETVNRENIQRVRLWQELGAQNRMCMYTGETISATNLFSETVEIDHILPFRRTLDDSMGNKVLCMRYANREKTDRTPFEAWGGTDRWPDILARSTVLRKNKRWRFAEDAMERYTKDGDFIARQLTDSQYIAKLAHEYLCVLFRPEEEHKVVCLPGRLTGLFRHHLHLGDILDGINEARQASQAPRGQKNRDDHRNHAVDALIVGLMDRAFLQRAASTNARLEKEGVYRLLKGLEAPWSGFRADAEQALAKIIVSHKSDHGVEGALHNDTAYGFVKDDSRGNAIHRVSVAAMKIASIPHIKGRRLRAHLVAHLSGLGHEEAFKRLQAVDDGTGSFKELRDGMPKEDKEVAAQAQAFFRARGIRHVRLVEPIDLIPIKDRHDKVYKGFKPDANAYLDIYLAEDGQQWEGETVSRFDANQPKRQAPEAPGQQRTRIIRLFNRDMLELEHEGKRRLFYIQKMSEKQIALAEHFEANADRRTRNADDPFRFVYKGSADALRKAKVRFLVVSPAGRIRYLSDDPDDSARS

SEQ ID NO: 6466 - protein, 1040 aa, unidentified
  REGION 1..1040: note = Description of Unknown: Cas Enzyme sequence
MADCKSVFAFDLGKASIGEAVRIGKGIVHAAALLIPAEFASTKDQAQRRRAKRTRDAHKAREAWLNRVCREVGIEVLEGRKPGNRKKGIPATRGDARLEREFGPPGDTTCYTSCILRIRLLRGEHLESWQVYKALHSAIQRRGYDSDIAWRTAAAGEPERTEDEDQESTEKLSAFLQEYRAMCPRRPECQYLCYYDAWKMGLWDPKTNELTGRIDNRAGRARGYVAPRSEVEKEVRSLLEQAAQHYPRLVGRADYVLYGPANKPYASYYEACREEYGLRRGSESDWQGILSQKVPRFDNRIVDKCALIPRLNVCRAKDPLYWHVAFLLGLKNLRFLRDGKQQGLSPEEIREWFEKALKDDQKRRQKAPREKRVSTAVKAYKVTAAQWRKWCEKHGAVTVPTNEKVDEPRMAGRCRFSRPALQLVRDLILLGENPQSFHGKRVTALAVNSDPKRGLTARDLRFLLVMPDDWDRIHIPQMRGLLAPRSKREANEAIRKLLGSQKDPVVRHRLEMFWQRLQVLEGEFGCPDMIAIEFVREDFMGEKAKRRLEKYQKQRKKEHEQARADVESLNIAGKSSVLKMELLRQQAGACLYTGGTLTPTELDTLEIDHVVPRGEPHYGCDALFNKVLTTHDANKDKGKRTPMEWLCGTGRWEAYLSRVKAQAGSLGTKKARLLVSEDAPELCERYTALAETAWIARVSQSLVHLHFGWGMGEKGQKRRVVVIPGGLTARVRRRHKLDRLLVPEGVDAEAIEGKYRDDDRHHALDAMVLSYIPSWAVNPKKEGFFTFPEGVDATFLRDKLETVIPQFLCREKPRLEETIYAKRKVNGEDCAVVHRGIADLPTETGKFSASKGLRRARDILDKRIRGDLVAFFEGNPSEEEWQVFLESYSLEGAESGSKVRRVACRVGAMEELADLSKNVGDGSRGQWRRSSTHKGYFVYANKRGTAKVRPVYVHESFQAVRDELKTEGVDKPEYFCSNCIVSIERDVVLPDRTIPAGQYVCSTIKQNGTARLRGPQPFLQKTIGLTRLLQAGLRRVPSET

SEQ ID NO: 6467 - protein, 1102 aa, unidentified
  REGION 1..1102: note = Description of Unknown: Cas Enzyme sequence
MANLTLGLDLGPNSIGWALIDEETGKIVDLGVRVFPEGVDNFDSAKEVSRNEDRRVARGMRRQTQRRRRRARILQDALIQARLLPEDPDDRAELIATDPYELRARALQEKLAPHQIGRVLLHLSQRRGFLSNRKKDRGDKEVQGMLAEINELDEEINATNKRSLGELLHEKIADLDHTNRTDGDHVRNRHTRRSMYEDEFEAIWEAQRGFGHADLLTERLKYGSLGRQEYPSKPRRRPKGESLLDAFGLHGLIFFQRKMYWPKSAIGLCELEPKQPRCPRADRRAQRFRLLHEVNNLRYIDDRVECKLDDQQRTLLLDKLGKSERMTFVQIRNALGFLESVKFNLEKGQRPSLQGAIVDWRMAKAVGKSWHDRPEDDKDEIVRVLLDNEREDKAVLQRAQTDWGMTGDDAEAAMDVDFPSGHLSLSLKAINRLLPHMEKGLVYQADSDPENSALHAAGYLRRDELQRRIFDTLPDPKRSRQCPVGDVPNPVVKRTLVELRKLVNAILRQHGKPAAIHVEMGRDVKTRPQRGTEAYRKYQQKLAEMRQNEERRDAAALKLRENGIRVTRDAILRYLLWEDQRHECIYSGTIISFEQLFGGEVDVDHILPRSRCLDDSQNNKVVCFRKANADKRQRTPNEWLAESQPERYDQICQRAGKLMRDGYFGYPKYKRFLQKELKLDDFIARQLNDTRYIAKATAEYLRCLFDADHHVLGVKGQLTAELRHHWGIGTLLAELPDSPAWAEAANLRPGEKNRADHRHHAIDAVVIALTHRSRLQELSRIRQAGGTKATGEMALDPWLSFRDDLKEAVGDIKVSHRSERQVSGQLHEDTLYGPTAKEGHWVARKPIESLSPNEIESIRDKGIQRIIIDRLREHGIEFGRGKKVDAKTWKQALVDLRIPPKKERNKHKPGVPIKRVRVVKPEQTIRPIRKDTPDTAFVKPGSTHHLCLFEFEENGKTKRDAVFVTMLEAAGRIRQQQQRLAEVRKSLVDQGVDRDELKRRLNEAKSKIAQEIPIIQRTHPERPEARFLMSLSRGEMVLADWKGQERLLVFRTAASTQGQIYFVEHTDARRSTDQKKFVANANTLNARKVTVDPLGRIRWAND

SEQ ID NO: 6468 - protein, 1086 aa, unidentified
  REGION 1..1086: note = Description of Unknown: Cas Enzyme sequence
MAVRLGLDLGPNSIGWALLDDEKHEVVATGVRIFPEGLDNFDTGKENSRNEQRRAARLMRRQILRRKRRKATLRQALIDSGLFPQDSKEQELLYNQDVYELRARALDEKLGPFQIGRIILHLNQRRGFWSSRKEKAKAQEAKRKRKNKQVKKKATAEDKPEDMLLEIDQLAADIKAAECKTLGQYLYGKHSTIDHKKREENDHVRIRHTRRSMLEDEFLAVWNAQAEHYPNLLTQQLCFGALGRQKYPRKPVPKHHPRRKGTSDLETFGLHGLIFFQRPTYWPRSVIGLCELEPKEPRCPRSHRLHQRFRLLQELNNIRYIPTGGDETTLTDDQRHVLIDHLATREKMTFDEIRKKLALQEGVRFTLERGKRTTIKGMTTDWLIAKKIGKGWHKRDEDEKTQIVKALLRPGADEDALIDRLVEEYHFSREDADALVAVDLPAGFGSVSVTAITKLLPHLEKGLPYMADDEENSALHAAGYLRRDQLQRRVFDTLPLPGRVSDCPIGDIPNPVVKRALHQLRKLVNNIIREHGKPDAVHVEMARSVKMGPKRRRDYNQMARKREAARDQAAEELRASDSKVTRDAILRLLLWEEQKRECLYCGRTITRTQLLTGGVDVDHILPRSLSHDDSQSNKVVCHRRCNVEKGQRTPYEWLGETDPARYDAVCQRACALLRDAKIPYGKYHKIHRKHIDSGEFLERQLVDTGYIARATGEYLRCLFGQDHAVLGLKGQYTAALRHHWGLNTVLKELPDSPAWEAETDLRPGEKNRADHRHHAIDAIVLALTDRSTIRKLSRVSKTHHGSGFLANLPDPWDGFREHVKAKVRDINVSRQVERGIWGKLHDDTFHGPVYDEAGERVEATFVVRKPLRELSLNEVAHIRDDTVRQIVALALASEGIETGRGKELTADQKRQMKEVLSNIRMRSGVPIRKVRVRKEDRTIRPIRTGRPDEAWVKPGNTHHLCLFEWTESKETKRDSVFVTMLEAVNRLKRKEDIIQRTPPAGHPTIPPNATFLMSLSGGEMVLANVKGEEKLLVFKTAASTTGQMHFTLHTDARRSGEQTDHSAQPNTLHARKVTVDFLGRIRWAKD

SEQ ID NO: 6469 - protein, 1049 aa, unidentified
  REGION 1..1049: note = Description of Unknown: Cas Enzyme sequence
MENTASSPHALGLDLGPYSVGYAQIRLENGTPAGLLHCGARVFEAGVTGEVEQGKDASRNRDRREARLTRRVLQRRARRLSKLAHLLQRAGLLPVGKLDPGDERDRFMAALDKEIRARHVGSADPAPALDQLPYFLRARALGEKLEAHELGRALYHLAHRRGFKSNRKAPPKEDEDLGKVKAGIADLEQHMQAAGARTLGEYFAGLDPHEKRIRGRWTARKMYEDEFETIWSAQAAHHHDLLTDELKQEARQAIFHQRPLRSQKHLIGVCSLEAPARRACWALPVPQRFRMLQKVNDLLVVHTDTGEIRPLADEERRALLAALDERGDLKFTEMRKLLKLKKCRFNLEEGGEKKLPGNRTGAKLADVFGDRWEALSSEQRDLVVQDLLSVEKPDTLARRGREAWGLDEAAAERFADLSLETDHADLSTKAMGKLLPLMEEALHYAEARKQVYGEQQERAAPLDELPPVHEAVPALRNPMVARALAELRRVVNALIRRDGKPDMIRVELGRDLKKKRKDRKAIWERNRANQKRREEAKARILKEAGIEPKGRDIEKALLAEECDWTCPYTGRTISMQALVGRTPQFDVEHIIPFQRSFDNSFFNKTLCYHEENRSRKRDNTPFEAYGADPERYGAILERVRKFKGHAAKEKLRRFRLDSTEEFEDFTSRQLNDTRYASSLAADYLGLLYGGRTDADGKLRVQVGRGQTTKYLRDEWGLNAILGDGGQKSRDDHRHHAVDAVCIALTGPATVKMLSDAAARAARARRRRFAPLPEPWPDFLNDVRRGIDAAVVSHRTERAVRGALHRETLYSRPIRETDEDGTVREVHHVRKPLKWFKSRKALEDIADSAVRKAVLAKLDELGGKPDKAFADPKNHPALKTKDGRRVPIHKVRIRVSEKPVSIGKGHRERRVLTGSNHHVEIFEVKDERGRAKWDGEIVTTLEALRRLRAGEPVVRRDHGPDKRFLFSLCGGDIIEIDEESGSRGLYRIRGISAATAGGIELAFVRINDARKKKDIIAAGDWRRPLLEPVRKLNCRKVVVTPLGEVRRAND

SEQ ID NO: 6470 - protein, 1074 aa, unidentified
  REGION 1..1074: note = Description of Unknown: Cas Enzyme sequence
MNMECTVERILGLDIGVASVGWCLIETTNGTPSRLLAAGSRIYPPGVEGNVEAFSLGRDEPRNQKRRQARQMRRQLWRRRRRLLKLQRALVRHGLLPALERYDAEEIDRGFKALDAALMAGDPAMKDRVGSQTFHYRLRARAAAGFVSPHELGRALYHLAQHRGFLSNRKAQRTDDEELGKVKTGIAELEEAMRASGHGTLGAYFASLDPEATRIRGRWLGRNELIVPEFDAIRTEQSKHHSGIGAEAWDDIRDAIFRQRPLRDQSHLIGRCSIEEAERRCPVAYPEAQEFRILQAVNHLRLVELDEEGHAGAERPLSEPERATLVGRLMTESHLSFTAAKKALGLKPRSTRFTIERGGEKELIGNRTHARIAVEMGEAWAGMQPEDQRAMVDDMLEYESEDALERRLLRRWGLSRETARSLAATTLESARLSFSLKAIRRMLPHLRDGRSVQEAKIAAYPAHAGADAPWDLLPPLHPDRIWKKHCSGGRRYSGIEVRNPAVERSLSEVRKLVNGVIRRWGKPDEVRIELARDLKKPRGERMKESRRMREQGDRRSGALRRMVEEGFGHLADQNRRSDVEKVLLWEECGGVCPYTGRPIAFEDLFGPTPKFEVEHIIPFSLSLEDGFGNKTLCEIAENRSRKRRMSPFDAYHGTPQWEDIIGRVKRLRGLSAARKLKLFLSATNGSEVFGDFTERQLNDTRYASRLAGDYLGLLFGGRVDGESRRRVQVSAGGATAIVRRKLGIEGLLGGGEKNRKDHRHHAIDAIAIALTGPREVQQIARASEAAIVRGEASHRLKIEAPWPTFIDDARAIVDSMIVSHRVDRRLSGPMHLESNYSRPIRNIRGEVADFEARHARKRVDALGEKDVDTIVDPRVRDAVKKQLRALGQKDPKVAFKGGENLPTLRHGDGRDVSIRRVRVRVNKGLAVVGRGGAARHVAPGSNHHMAVVETVGPSGRVVGREFHVVTMLEAYRRRARREPIVQRDWGAGKRLAFTLRSGDAVDIEDGGGRCFASVMSVSANQIQLIRVEDARPTTEIAKAGKAGGRLALTPKQFSQRNPRKLMIGSLGDISAAND

SEQ ID NO: 6471 - protein, 1082 aa, unidentified
  REGION 1..1082: note = Description of Unknown: Cas Enzyme sequence
VGVAAVEYDDDGWPIRILSAVSHIHDGGMDPDTAKSPQSRLATTGVARRTRRLTRRRRRRLADLDRVLVEVGLPVPEVEVPQTHGAWVARDRLSREYVEDSGERGELLSLALRHLARHRGWRNPWWNYRRLAEAANESPSPVLVEAIDKAQARFGATEVGSPVTVGQLVAAVLPFTGLIRPTQAANATVDGPVVPKVLQVDTLAEARLILATQQVPEASAELICEALMQAAAPSVPRERIGRCALVDGEVRATTSCLEFQEYRVRAAVANLRIDGNRLSDDQYDQVCDFLLSYRDDPAPKWREVAELLGVSARQLKRPTADDTESTSASFAPIDRTSRLIEAAFNKKSQLGAWWRTASGEDRAELVAFLAEGAAADSEPASAAVVEFLASVNDETQERLDKLEFGGGRAAYSREALRRLVARMRQDRCDVHDARVREFHLPADWAPPLPTFDDPIEHPTVARVNTIVRRFLMGVTSRWGVPDAVMVEHARSGFFGPTALAEHLREVRGHTARRDKAKERLASQGIQNPSNTDVRREEQIQRQNSQCLYCGTAIGMASSELDHIVPRAGGGGNRRDNLVAVCKPCNSGKSRIPFAVWASKHPNPGVSVAEAQARVDAWQALPGETRRQRDRLVRDVKHRLTLTADDEEFGDRSLESTAYAAVQMRARIISFLRSHGGTGDDVWAFTGAVTSEARKAGGVDSLLQLRDFTKKTRFDRRHHAVDAVIMTCLHPTIAGTLRKRTDLQAEHRSTGKYPEWRDYQGAQPGDIANFQAWVPRIGALAELLKASIEQDAIPVVRPLRLSPRVGSVHADTIQPLVPASLAGPLTREEILRVTDNRLCLLLLEEAQGDDLPPDPERPARLRHSPEMSLYPSNAPYLALRHGAAQIGSSIAFARIYAWQSRDGFDYGMIRMPVGEFGRIGFNRPGVDIFNEPLPAWSQAMRTANPQLVRRIDTGEAKQIGWLALRDELELDPTELMAGGDKVSEFLRLIPETRWTVKGFFDPGKITISPSYLASEGLTEDMSEAIHIVVGAAQGGVPLAINRILSVPGAAVIRRTALGAPRWRADGLPSSWAPAEAAVATFTR

SEQ ID NO: 6472 - protein, 1134 aa, unidentified
  REGION 1..1134: note = Description of Unknown: Cas Enzyme sequence
MKQILGLDIGVSSVGMAIIAEDQGEFKIKKLAVRAVPEDPNFHGNFYSGNTASKNMERRSKRGARRNNQRFKQRRDRLYQLLESLEMFPTTDLFQLSTLELYALRARAPESKISLKELGRVLIHLNQKRGFKSNRKANTADDSDSQFKQQIQTREEALGNKTIGQQLYEELCQMKVPHEKQLRNRTYLRASYLEEFNRIWACQQSFYPDVLTGSVDGSDIRGTLLRSIRDEIVFYQRPLKSQKGLVGNCRFEKNNRAISTSSPYFEMFRILQQVNDLEWKDAHGQLQKPTPEQKRSLFESLFLAKDVSGTNKMGWGKIKKSLGFTTAAKMYFNVEEFKGNRTVFEIKKALKAVGLEDTERFLAFDHTENDPDHGLYKLWHTIYSIDQDDQVVRTLQKFFRFSEEQASGLARQLHFKPEYGSLSIKAIRKLLPHMLEGKSYFDACEAVGYDHSGYKAIIPLQEKLDPVFPNELRNPVAEQVLNQMVNMVNQAIDQYGRFDEIRVELARDLKNSANARKEIFSKNNKNKRDNEGIRRRLKEEYGMAAVNGRDVQRYKLWESTEHICIYCNKPITQTAFLSGQVDTDHILPKSRSFSNAMDNFVLTHYSCNREKGQQTAFDFMRSKGDAALELYLKSIQELFEKKKISRTKMAYLTSTGDEIPKDFVERMLKDTQYIVTAAVKRLKTICEKTYTTTGQITDLLRREWDLNRVLEELNLPKYKLVGLTEQRIKKGNGDSSSYEAITDWTKRNDHRHHAIDALITALTDPKIVFRLNNLNKLYQMEKGKLSPEDRKALEEAAGGRFDLKEFADQTAVRIPCPVPNLRHLLREELKGLLVSYKKTNSKVLSLNFNKIRLGKGQHLIQPTWVPRGSLHNDTIMGLRKVPVQIPIQQLENLDDILHPDVKAMVMDYTAAFGHNFKKAFAKKNLSQQPLLWKGKPVEKIWVNKIMISKRVKLAALTDNQVKNIADLAVSQKVTDWIEKYGGLEAAKASLQEMPLYLNEAAGIRIERVTVLENKNPAPLRYKRDHFGSAIQEGGIPSDFADLSNNHHALVYQNEQGLVRSRVISFWEAVETGLHNIREKGKPYPVISRHRDGEFGTLKFSMQINDLFTIDLFHAENPVEDNEINFLDPVNRVRI

SEQ ID NO: 6473 - protein, 982 aa, unidentified
  REGION 1..982: note = Description of Unknown: Cas Enzyme sequence
MGKRILGLDIGIASVGWAVIDYDKEDTKNNHIIKSGVRVFAQAENPKDGKSLAEPRRLARGARRTLKRKRQRMKGIKRLFMNVLSLSHKDLFVGEKDETIYSKQGRTDVWQLRDEAVKRALSAEEFARVLTHIAKRRGYKSNRKVNENGDSEGKKVLGAIENNQNLLTKYETIGQAMYVTTKDTGIRRNKKDDYLHSVSREMLLDEVNVIFEKQQSFHNTLATEKLKKEYVDIAFSQRDFASVDSMVGKCTFEKDAPRAAKRTYSAEEFVTLTKLINTKVVLEDGSERGLTKDELEKIILLCRQSEKPSYIKIKETIGLEKKSGFKNIEDYETDKETGEFLKNKTTKFVSAFKGFHELRKVVEKTLSKTHWHNVSKDTKLLDALGIIFSIHKSDEKIKEALNTLEFTLLTEEETDKLKNAFIASISFDQFIYLSLKALEKLLPHMREGKRYDEAVALVGYKKEIGTQQKFLRALNKEEQNQLTNPVVKRAIAQTRKVINALIREYGQFDSVHIELTREIKKSHKDRNEIKKGQEKYQKFKEETVIDFKNLFGREPKGAELLKFRLWKEQGGYCAYSGFMGEKAYIKPEKLIADVKYAEIDHILPYSRSLDDSMNNKVLCLAKENQDKKNMTPFEYFERIGRDWYTYEVFINSMFKNLKKVKRNRLLKKNFDENSANEFKERNIRDTAYMAKYIKNFIEENLELTSSSKKKVISINGTLTNMLRHNWGVGDKSRDTHLHHAVDAILIAFATDSEVQRLSTLSAKTEGFNYTSSEAKSKKFRFIPPMEKFREEVQKSIDEIFVSNAPRRKVTGAAHKETIRSKKLEKVKGSFEVNGGLAENGEVKRVDVFTKDDKYHFVYLYTADFEKDKLPNTTIKNIDIDDAFAFHFSIFKDEFIEIKQKNKDAFRGYFKFSESDGRFNLQFHIDSEYDKKTGRFSTGSLEYIKKYQVDVLGNIQEVKKETRVTTKKILKKNKHNIIKKKSA

SEQ ID NO: 6474 - protein, 1100 aa, unidentified
  REGION 1..1100: note = Description of Unknown: Cas Enzyme sequence
MKKILGLDLGTNSIGWALIEIDHEKGIVKIIGIGSRIIPMNAGEIKDFESKGKIKSTAAQRTEKRGPRRLNERFLLRRDRLHLVLNLLEALPKHYKLEIDFTNSKGEKCGQFKENKEPKLAYLPKRKGEKAEFLFKDSYQEMLNDLGIENEKKKRIPYDWTLYYLRDKALKDEETLKKEKKKPLSLEELAWVLLSYNQKRGYEKIEAIDEYDDLTLKLEEFGLTKSIREVIDTSKMEIDSLAPKVLEVKKMKDKNGVYFEIVLNNGYSYKEYSTKEITKLEKNIDEIKIIERITFLNEEGTENDNDITIYKVEDNFKLKIKSITPKEAKNKFLKEYENGWQIETNLNDFIRFKKSESDIEEDVFVTRLYSEKGDLIKPSKKKEKLNLNLSKDTHTEFKLLDPTKESNWKILKRKTEKEVLKFNSLNGLTDKNGNVRKYISPQVYNILKQDAIMGNRTKIIGGMFQVVDRDFYREELNQIISIQRNFHTSLEDTKVFEQCVQTLYPKNKDHQVTLLNNKDAIQHLLVEDILLYQRPLKSKKSEIANCKYEIRYYRDVLDKKTKKPIEELDEDTGEIKTIQEPVYHKAVSVSHPYFQEFRIWDKLHNLGLIQLEKVDEKTGEFKTNQDVTKEYFKTEADYQNLFEKLNNQKSLNQDQFLKFCKDTFGIPYNKKEKNYVWNFPEDEELKGNETRVSFATRFMRCGFTDYKNFLTQEKEMDLWHYLYSVSYKERTANNNKSITSFFNRFLGGSNATEEIREQIIKDFKNYPKFASRYCAYSEKALRKLLPFMRLGKNRFVGKFDISEYLLELQSIDFDSKRIFRLIEKSNLKGKEAEAYKQTLYDALWRHSVNERIEEILRRFDKVDFTAEKVDYSTVLDNKPNNGKLPFPKGLFNVFRDFKKIDDFTKLDLTKASYLVYGRHSELAQEKHWDSPDQIRNELHQELKQHSLNNPVAEKVILEMMQIVAKIWEFYGTKKEGSEDYEKLFDEIHLEVGRELKKSAKEKEVDSKRQLGNRAQNKRLRQVLEEFLVQNPYNANPRNSDHFERLKIMEEGAEHIKNIDKDFFKDKQYSKKDIEDILKKPNIDKTDFEKYKLWIEQGYRS

SEQ ID NO: 6475 - protein, 948 aa, unidentified
  REGION 1..948: note = Description of Unknown: Cas Enzyme sequence
MTSKPLTIGLDIGIASVGWAVLAPDRIVALGVRAFDKAETAKEGDPLNLARRDARLTRRRLRRRSQRLRKLARLLKREGVIDTAGLFQSQQPFAPSLWKLRVEGLDRLLNPEEWARVIYHICKHRGFHWVSRAEEKQEGEDKKEGGKVKQGLAATKRLMQDKGYNSAAEMVLAEFPGAQRNKRGDYGKALSRVLLAGELALLFERQRELGNPHAGEDLESAILGNGDRKSGLFWEQKPALAGADLLKMLGRCTFEKEGGPDGKGEYRAPKASFTAERHVWLTRLNNLRIVIDGESRPLNEQERRIALPLPYTYKTALTYKRLRDALVKAGLVPESILFTGLAYPSDEQKAGSKTKDPESDVLVKIPAWQTLRSTLKDAGLETEWEGMAGAAIDGRPELLDDIAWVLSVFKEDEEVATELRKLELPNADKMIEALLNIHFDKFHSLSLKALRNIVPHMETGLRYDEACEQAGYHHSQLYKAGEGEKKYLPPLYAGRDKDGRMLLNEDIGDIPRNPVVLRALNQARKVVNALIREYGSPDSVHIEMARDLSRPLDERRKIEKEQDAYRERNDKDKARFEEDFGQPPRGQEFEKFRLYREQNGKCAYSIKPIDIDRILEPGYVEVDHALPYSRSYDNSKNNKVLVLTKENRDKGNQTPYEYLGGAEDNPRWNQFVAYVESNKQYRAAKRNRLLRKNFGSDEATGFRERNLVDTRYICRFFKNYVERHLKLADDSKSKRCVAVNGQLTAFLRARWGLFKERGDNDRHHALDAAVVAACSHGMVKRLSDYSRRKELVQVRKGFVDMATGEVVDPGMLDQLEAHFPVPWPHFRQELLARLNTDDPAQLREEVERLGTYLPEALQALRPLFVSRAPQRRNGGAAHKETIYAQPERLKADGSVTQKVSLASLKIKDLGNLVDPHRNERLYAAIRERLEAHNGKGDKAFTQDNPLYK

SEQ ID NO: 6476 - protein, 1042 aa, unidentified
  REGION 1..1042: note = Description of Unknown: Cas Enzyme sequence
MAASMGERLRAIGARYAVDDSLVFGLDVGIASVGSAVVRHGDSPLVEFVGSRCFEAPEEPKTKVLKNKTRRDKRLLRRVTRRRRRRMAEIRSRFADVGLLGTTDPDTFHHRREAPTPWQARARGLDGKLTDAEFAAALLHIAKHRGFKSNKKSDVGQNAPDDNKKMLTAITANRELSARYRTVGEMVSKDAKFDERKRNKRGEYTHTVARDDLQYEVKQLFKAQRRLGNAKATAKLEEQYFGIAFQQKSLQDSEHMVGMCPFEPEEKRSPRHAPSFEKFRYLAKLNTVKVREADGAPRRLTPEELGKAIADFGIGSKSITWNALARKIGLPKGTFFDGIDEKRAKNDIVARGGCAAGTKTLYDLLGPAGWNTVRDKAALLDAVAAVIAFREDLDSIEKGLEALDELEPLVLSALMDGTRRGDFGAFARAGHISTKAARNILPHLLDGMVYSKACTAAGYDHTQSRKIEIDDIRNPVVKRSLREAAKQVETLIHHFGARPGRIIVELAREVGKSAEERDKITRGIEKRTAEKDRRREELKELLNLKVEPTEEELRRYELWKEQNYRCIYTDRQIDPRDILATSNAVQVDHILPRSRSQDNSYFNQVLCHASANQDKGQRTPWEWIVRDGKNMDEWARFEARVRALAIKGFKKRNLLMRNFDEREQGFVERNLNDTKFAARALLAALREIYADEGEPDPASDGYLGGKRRLFARPGQITAILRRAWGLGGIKDRSDDRHHALDALVCAAAHNEWLLNRLTRQYQRIEAENRGKWVPNVDDPWPGFRDDAIRAFESAFVSRSEKPRGRGQGHKDIIYSVGVDGGRKITYERKAVTDLTKGDLARLKDADGGNRPLAKALADWIEKGKPADEPPRSPKGDPVRKVLLTRRGIDPSGLKLNGGHVDNADMVRVDVFHKDEKFYLVPIYRHQVMNRERWPEPPTKAVEIRKAVSKWGEVDKGYEFRFSLYPDTYVALVTNRGEIAEGYFRSLNINDAGVLVSLHHRRQESRKFGSKTLNSFRKFHIDRLGRKHEIEREARTWHGVVCT

SEQ ID NO: 6477 - protein, 1380 aa, unidentified
  REGION 1..1380: note = Description of Unknown: Cas Enzyme sequence
MKKILGLDLGTASIGWALVNEATDKGEQSEIIKLGVRVNPLSTDEQTDFEKGRPLSVNADRTLKRGARRNLQRFKQRRANLIEILESINFISKETVLTEDGKDSTHETCRLRAKAAVDKIEKSEFARVLLAINKKRGYKSSRKAKNEDEGSLIDGMAIAKELYDNQLTPGQFVCNLLDKGKKYIPDFYRSDLQNEFNAIWNFQKQFYPEILNEDLYKKLQGQGQQSSRKLFLAIHQIYTAENKGKRDEVKKQHYQWRNEALTAQLPIDVIAYILVEINNNLNKSSGYLGAISDRSKELYFNKETVGQNLYCQLQNNFHTSLKNQVFYRQDYLDEFEIIWETQANYYSELKPELKETIRDVVIFYQRKLKSQKHLISNCEFEKHHKAIPKSSPLFQEFKIWQILNNIELQNKVSKEVKVLDEDAKQVLFEELNVRGNHKTDEILKVLGLSKRDWKLNYEDGIEGNRTNQALYNIYQEIAENEGYGFDWAKKSALEIKEELKQVFPRIGIDPTILEFNSDIEGNDFDKQASYQLWHLLYSAEDDDKINEQDKLVYGNSNVSLKKKLNLAYGFKPEYANMLANISLQPDHGSLSARAIKKIISFLKEGHEFSEACKLAKYNHSHSLTKDELVSRTLEDSLALLPKNSLRNPVVEKILNQMVNLVNQVIETYGKPDEVRVELARELKKSAKERATATININAAKTKHEGIRKLLQKDFGLKNPTRNDIIRFKLYEELSETGYKTLFTNQYIQKDKLFSKEIDIEHIIPKAILFDDSFSNKTLAYRNVNLAKADSTAIDFITNTYSDDLQNYKNRVESLFKAGKISKAKYKKLLMPEKDLPDGFIERDLRNSQYIAKKAKQMLFEVIRTVNTTTGSITDKLREDWDLINVMKELNLPKYRALGLTEMQERKEGKQIEQIIDWTKRNDHRHHAMDALTVAFTTYDHVQYLNNLHASRNKESDLYGVRNKITKVYESKNGNSKRKFVAPLPNFRTEAKNHLESVLISIKAKNKVVTKNKNKIKQKGADHFVEKVQLTPRGQLHKETVYGKIQEQVVKEIKVNAKLDIEIINKVTKPKYRAALLKRLAEFGTDSKKAFAGKNTPAKNPVYLDDTKTETVPEQVKIQETQDNFTIRKEIGPDLKIDKVIDAGVKRILQARLAEYNGNAKEAFSNLEKRPIWLNKEKGIAIKRVSISGVSNAEALHDKKDNQGNLMLNEGGKTQPVDYVSTGNNHHVAIYKDEKGKLQEQVVSFYEAVARVNAGLPIVDNQYKEKEGWQFLFSMKQNEYFVFPSKDFDPNEIDLLNPDNAKLISLNLFRVQKIATKDYVFRHHLETTVEINSKLRGTIFKRLSLIGLKGIIKIRINHIGQIVHVGEELSTPKEQLLESVL

SEQ ID NO: 6478 - protein, 1372 aa, unidentified
  REGION 1..1372: note = Description of Unknown: Cas Enzyme sequence
MKSILGLDLGTTSIGWAFVHEAENEAEKSAIIDLGVRVNPLSTDEQTDFEKGRPLSVNADRTLKRGARRNLQRYKQRRENLIILLKKHSLITEATLLAETGNATTFETLMLRAKAAHNKIKKDEFGRVLLAINKKRGYKSSRKTKAEEDGSQIIDGMDMAKYLYENNLTPGQCCLSILQDGKNALPSFYRSDLQNEFDKIWQCQKQFYPQQMPMELYHQLIGKAKKQTWAICQQPFGVVGIKRNGNKKEIRLENYQWRNLALKSKVELEELIVVLQEINGDISGSSGYLGAISDRSKELYFNKQTVGQYLYKQIQGNPHTSLKNQVFYRQDYLDEFEQIWETQKQHHPQLTNELKNEVRDVVIFYQRKLKSQKGLISFCELEKSQKEIMVDGKLTLKTIGSRVCPKSSPLFQEFKIWQNLSHVIIKNKKSKQEFDFGSSEKQLLFSELNIKGTLKKKEVLLLLGLKANEWDLNYTELQGNTTNVALYAAFEKILVHQGYELNQSNKSGKAIVQKVAEIFKHLNINTSMLVFNAELGAKECQKQAHYQLWHLLYSYEDDTSATGTNALCAKLQSLFGICKEHAQYLIHVQFQDDYGQLSTKAIRKILPFLKENDYSTACAQAGYNHSNSLTKQENLKRVLKNKLDLLPKNSLRNPVVEKILNQLVNVINAIISNPKLGKPDEIRIELARELKKNAKERARVTNEINRSKIEYEKYRKILQADFNIKNPSKNDIIRYRLYKELEMNGHKTLYTQQYISPDLLFSKNIDIEHIIPKARLFDDSFSNKTLEFRQVNVDKGEETAHDFMAKKYDKVGLEEYEARIEKYYHDKHITKAKYLKLLKSSSDIGEGFVERDLRETQYIAKKAKDMLLEICYTVLSTTGSITGQLRSDWGLIDTMKELNMPKYKALGMTEVEVRRNSRVEKIVGWTKRNDHRHHAMDALTVAFTKHNHIQYLNNLNARKNIQSSKYGSIKGIEKKEIVKNTNGKAVFKEPIPNFRHVAQKHLKNILVSHKAKNKVVTRNKNKVANSASVQDTLTPRGQLHKETVYGKMQHYASKMVKIGTAMDESTIAMVTKKSYREALLKRLQQNDCNSKMAFGGKNSPTKNPVLTAAGQALPLKVKLSWLQNQYTIRKEVTPDLKIDKVIDKGIQKVLQQRLTDFSGNAKEAFVNLEESPIWLNENKGIAVKRVAISGVSNVEALHTKKDNLGCVIKDDKGNEIPVDFVSTGNNHHVAIYRDQKGMLHQEVVSFYEAVARVNTRQPVVNKEGENNWEFLFTMKQNEMFVFPSDDFDPTEVDLLNPDNRVFISPHLFRVQKISTNNYVFNHHLETMAVNGDTLKNKKLSKIGYYLIQTPDRLKGLIKVRINHLGQIVKVGE

SEQ ID NO: 6479 - protein, 1053 aa, unidentified
  REGION 1..1053: note = Description of Unknown: Cas Enzyme sequence
  MOD_RES 82: note = Any amino acid
  MOD_RES 729: note = Any amino acid
MSDRPTILGLDLGAASIGWALLSARAEGDSWRPDGLVAAGVRIFQAGMEGDMDAGREESRAKGRRDARLARRQTERRARRLXTVFNALRNAGLLPTYPDLDASSSAGRHETILRLDQEIRESGRLDRLAETIGVHGAADKLPYVLRAAALDHPLEPHELGRALYHLAQRRGFKSNRRSPRRDDEEGVVLSGISQLRDDMARTSSRTLGEHLSRIDPHQQRIRARYTARAMLIDEFEAIWASQQRFHPSILTPELKKRIYHRIFHQRPLKSQSDKIGRCELEPKRRRAPWALLAAQRFRMLQSVNNLRVRNEYGVEYELTPEQRQVLIAELDRKKEVTFDRIRRLLKMPDVTFNLERGGEKRLRGNETNAILAKVFGDRWWEFDLDTRNAIVEDLLSIQKAETLERRGREVWGLDAEKAREFANTRLPDGHCRFSRRALAKLLPHLEEGLNIQLAIERAYPGHRLVGRAHELLPPVQQVLPDLSNPAVIRTLTELRKIVNAIIKRYGRPAEIHIELARDLRRSRDERQRLQSENRKQEAIRKAAAEEIRAFLNAEPSARDVERLLLAKECEFTCPYTGRKFSMAALFGPEPQVDVEHIIPFHMSLDNSFANKTLCFADENRHVKRGRTPFEAYGNTPRWNDILERVRNFKSRLAGEKLYRFQLHGEELERWLSDFASRQLNDTRYASRLALRYLSLLYGGTADGVDPEGKRRIIVVTGQTTAHIRNWLQXGSILNDGGEKTRDDHRHHAVDAIAIALTSQRTVQMLSIASRNQLLRKGRLYGDPEPPWPTFLEDVRKTISRVVVSPRVERRVRGALHAETYYSPRTEEGAKSPEGRYVHYTKPLADLSRSEVEKIVDPAVRRLVIEALGGGEPKDVFKDEGRLPRFVRRNGTTVPIRKVRIRAKVSVTPIGEGDRQRFVQTSGNHHLEVFEVTDAKGRTRWEGRVVSMLEAYDRVRKGLPVVNREYVPGSRFLFSLVGNPGGDVIELDEPDGTRGLYLVESIWMADQHARVRIRPINLAVAGKARIEPRINVLERRRCRKVSIDPLGNVTYAND

SEQ ID NO: 6480 - protein, 1078 aa, unidentified
  REGION 1..1078: note = Description of Unknown: Cas Enzyme sequence
ISDRSKGLYFNRQTVGQCLMAQLNENPNISLKNQVFYRQDYLDEFNALWEKQAEYHKVLTDELKQEIRDVVIFYQRRLKSQKGLISFCEFESRQIVVEVEGKRKVKIIGLRVIPRSSPLFQEFRIWQTLNDIKIFGKGQRRKKKKNDSSPDIIQEGERGLYQEEKELLAAELSIKEKLTKTEVLKLLFENHKELDLSHEEIKGNHTQATLFNAYRQVIEQSGHIIEFDKKPAAEILDSVKEIFTGLGINTDILYFDSAKALDEQPMYRLWHLLYSFEGDNSNTGNEKLIAKLIDLYGFEKEYASILAGVTFQNDYGSLSAKAIGKILQHLKEGNTYDVACGYAGYRHSKSSLTKEKLANKPLNDRLDILPKNSLRNPVVEKILNQIVNVINSIIDTYGKPDEIRIELARELKKNAKERENLTKAINRATAEHEEIRKILQRDFGLSNVSRNDIIRYKLYKELEPNGYKTLYSNEYIPREKLFSKEFDIEHIIPQSRLFDDSFSNKTLELRHINIEKGNATAYDFVKTKYGEAGLQEYLNRIDKLFKGDASKKSKLKKLKMQEKDIPDGFIERDIRDTQYIAKKAKEMLEELVRDIVSTTGSVTDYLRQRWQLVDVMKELNWDKYDKLGLTEIVEDKDGRKIRRIKDWTKRNDHRHHAMDALTVAFTKRSFIQYLNTLNAREAGDVQTGSYKNKIKCEPPMPLDEFRAEAKRHLENTLVSIKAKNKVVTANINTSRKKAGLNKKKQLTPRGQLHNETIYGSCKQYVIKEVKVNASFDEAQIMKVSKPVYREALLKRLHDNDNDPKKAFTGKNSLSKTPVYIDELHTIQIPEKVKTVNVETVYTIRKEVSPDLNVEKVVDVRIRQILQKRLQDYNGNAREAFTNLDENPIWLNKEKGISIKRVTISGITNAEPLHTVKDKNGNVRPVDFVNTGNNHHVAIYRDANGNLQEKIVSFYEAVTRVNMNLPVVDKDYKRSEGWQFLFTMKQNEYFVFPNEKTGFNPEETDLSDPDNYHIISPNLYRVQKMTSKDYFFRHHLETKVENNNALKGITWFRCGLGGIDKIVKVRINHIGEIVYVGEY

SEQ ID NO: 6481 - protein, 1101 aa, unidentified
  REGION 1..1101: note = Description of Unknown: Cas Enzyme sequence
MSSKRFPYVLGLDIGMSSVGWCVLGQDHIVDLGVRTFDKAESAKKGESLNLVRREARLRRRQLRRRAWRLTKLARLLKRYRIIDDKHFFHHPHPDLDSPWQLRAAGLDRMLDAKEWASVIYHLCKHRGFHWDNRFDEGQQPGDGGEYGRIGPALRTNQMLISDGKRRYRSAAEMMLQEFPEAQRNKRGDYSRALPRRVLGEEFRMLFRRQRELANPYAGAELEALLIGQEENSSGLFWWQQAPMSGKRLLEMTGKCALEQGEYRAPKACFSAERHVWLTRLNNLRISVNGEVRSLNDVERQTVLPLPYRQAGALTYKQTRRALVRSGLLSQDFIFSGLPCFAGAMAGGKLDPDDAILIEMPAWQALRGAFTRAGQEAAWQALATIALQGDVELFDQIGWILTVFKDKTEAGERLAELPLPAGKEFKEALLSLCFSKFHSLSLKALRKVLPHMEAGWRYDQACEKAGYLSCRRGGDAAKRRYLPPLYSGRDNQGRMLCNEELDVPRHPVVLRALNQARKVVNAIIRTYGSPTEVHIEMARDLSKPFDERRSLVLVQQRHREQKARDRSAFCDYFGREPAAREFEKWRLFHEQQGRCAYSLEPIELERLMEPGYVETDHILPYSRSFDDSRSNRALTLTRENRNKSNRTPYEYLDGAGAGERWQAFVAFINENGRYRAAKRQRLLRRDFSEDEARRFRNRYLNDTRHVCRFFKNYVETYLELAPGSDGSRCVVVNGRLTGFLRARWGLTKAREVNDRHHALDAAVVAACSHSMVKRLADHFRSKELGGNEKAVGGEAAQWCQTGFPEPWPHFREELEARLKIDNFCALNEELERIGSLSTETRRVRPLFVSRAPQRRNGGAAHKETIYAQPPRFKAQGKATRRVPLAELTLKDVDRLVDPERNTKLYGAIRERLEAHGGDGTRAFPPGNELRKPDRDGRPTGPVVRTVKMVVDKISGITVRNGIARNDTMLRVDVFCKGGRFYLVPVYVHHRVSGLPDRAIVSGKDEAEWVKIDDSYRWCFPLYPNDLVRVKLKREIIFGYYAGCDRSTGALSLWAHDRDQGIGKGGLIRGIGVKTAQGLEKFNVDVLGWIYPAIPAARPELG

SEQ ID NO: 6482 - protein, 1471 aa, unidentified
  REGION 1..1471: note = Description of Unknown: Cas Enzyme sequence
MSKILGLDLGSSSIGWALRNEDNSIQTGVITFDSGMVKGAGGYTSPTKERREARSKRRLLQARKYRKWKLLEILIENDYTPLSKSELKAWSSYKKNEQQKFPDNEIFQKWLSCNFSYQGGKIYANPYELRVLALDNKVSKHEFGRALYHLVQRRGYKNIGESDTDELNMDEAKKDMETKKQLERREANGFGKALQQNRTLAEALKKEFLDKGKRARNQYPLRKEYRAELELLCKAQGFEISRNTIGAYQEHFVQQLWKAIIWQRPLRSQKGNIGRCTLEKDRPRCPVSHPLFEIFRVWQFINTIKFKRVEGEMDFIPDEIRAKLYADFFLKKNKNVKFSDIRKFLDKQFKNKLQYNYKDDQSTATMPICKGLIDIFGEPVEKQLTELHNYIIGGAAKDDNKHLKAPKIINENYSVFDLWHALYSFDEPYLKYFAVHKLKITDETTKKGRKYNPFVDLKKSFGSSFSDLSIKAISKIIPFLIEGHLYNEAVLLAKMPEQFGTNWESEKGDIFFCIKEANLEYSWNKTIVTITNSLIDAWKGLENHEKYAYKDASYRLKKDDENDIQNACIKYFGEKTWANKSSDEKSKIHNIIKSQYQLFFEDFTRAYRQPPTLDDLLKSKLTEKKIDIDTSLLYHHSKIENKYNPPVIEKKSGKKILSVPLIDSIKNPMFNKALTVLRKLLNELILKDIIDEETEVVIEVASELNDNNKRIAIEKYQRDRENQRALYRMFLEEFKEKENLQINVDKRIEDFELWNEQIFGTVKIKDEKDGKEKEIPAREYILKQKDAVKRYELWTEQKGMCMYTGKMISIAQLFSNEIDIEHTIPRSLLPDNTMANQTVCYAWYNRDKKKKQFPTQCANYSKDQEGWGTAIEPRLENWINLKEHYENLYEDLKKAKPGEDEESKNKRIQKKHEFKMYFDYWADKIERFTCEEIKESWVRRQLTNTQMISKYAREFLSTYFKTEKNDSSEKKQISNRVKVQKGVVTADFRKIFGFQEEDEIKNRNKHTHHAIDAAVLTLIPTNSSYRERLLKTMYEWQEQKKGQYTTLPFQNFSSQELMRNIETSVLVVNYQKDKILKRTYKTIRNRGRIVYVKNKTGNYVVDENNNKIPKIAKGDSIRTSLYKQTFVAKLRDVERDENLRPLRDKNGKWKFKTGKDEFFFAERVSIEDAKKYSDDIIDPKIKELVKEQKNEPIIKDYRGKIIRHVRIRTSAGKAVKKRNNYSSKNDYKNNYYAASGSLPYAAFLQNSNNGKVERTMIPISSAELGRMYKKNGKFEIAQFISEFYPEYNHFADKRLLKVGQKVFVLNNDEEFESRKNMEFQVKRFYQITKFSEGSIWLKYHLETQDDTAIEDSIKVSKDKVLLEYENELGLADVIEDRSIENVKERKKDFQDRKYKFNSFKTDYRLKRLAEKIGMVEAKKIKARLDKFTAYSSSIKIEGQTPLLKLSQENWKFLLQDEDFEISLSGEINWDF

SEQ ID NO: 6483 - protein, 1522 aa, unidentified
  REGION 1..1522: note = Description of Unknown: Cas Enzyme sequence
MKILGLDLGTNSIGWAVVDTTEKAILDAGVRIFPAGIEPDTIGQGDGEKSRNATRREKRQIRRQYFRKRLRKIKLLELLIEQGMCPLSREELNKWKNWDKNKKNEGRQFPNSSDFTNWIRMNPYYLREKALHEQVSLLELGRIFYHFIHRRGFLSSRKSKEDSTIFTKGKPDENILPINETNEKIKNTTLGAYLNSIAYKEKEPFRVITDESGKELRIRGRYTIREMYIAEFERIWEKQFEFHDLNNRMVQSIKSRSLKGNINNCRNRKKIEYLKSIYGKENIKIFEGESRSQTKIISISNMTLKQKLGGEIKPSINDGGVMVYDHRSKESILFWQRSLRSQKRLIANCRFEDQIPIINNNGEYKIDNVGKIQRRSKKPCPISHPDFELFRSYQFINNIRYGKNQGLTTIQRNKVLDLINKNDSAFEFKKIIQELNLTYEKFNYEDDFKVTGNYTIKKLKGLFPEDVWNVRYDEIWHCFQFFDDDDKLYEKVKRDYGCKCDKEQIKKIKLKDGYSGVSLKAIRNILPFLIKGYQYDRAVILGGVRNAFGKSWEYFKESHEAIENEIVSILKENNKEGEAIEKIKLFLSTPSNDYGFTYHDPRFSQLYHHSQDIEKTENLLKEIPQIENLRNPIVQQALNETRRLVNLLIEKYREKYGQEFHFDRINVEMGRDLRNSKSERQEMSHKIRDNEGKNEEARLRLVEFGLKPSRDNIQKYLIYKEISERVIGPVICPYTGKIININNLLGRENEIQIEHIIPYSISLDDSFGNKTICEAKFNGLKGEKTPYQFWCENPDPVLWGVGKDLNINEGWESISERTFRILPYPKAKRFTSKKPFAREDFIERQLNDTRYIAKKAKELLSSVSNDVRVMPGQLTAELRHLWGLNNVLQPSKTIEVRGIDIKENENLPVYLTVDEYGKTVSVKRKLNPRPETLRNEILMSGQVKAQKFELKKFNLNFDAAELHDGWYWAKIKVTDSLRIMPMYTDKPLVDESHIVFKGYVAKGIFNNDSLGKRKVLLDDGRYWAKVSKTNSKFEEPEKSKEPVTNRNQILLFGSVENGIFSSYIYKCEANLPDGKYWLILNFNGDEIEYTRAEYPKPETLKNEFVLNATIDLQGNLVADVDPWYQKQTDKKPGRYYAILTIDSTPVEYFPVENKPDPIEKGQELVEGSIWVDTHTGEIKFDPKKNRDDHRHHAVDAITIALTEQGYLQNLSTQNANRKNKLRNHPFSTEKFPEPWPGFDMDVRKVVESILVSHKKSNKVLTKNKKGFSVRGQLHKENVFGKRQAPMQQEGFHRRTKITDLKDHKDVAKVADVTIQKIIKEHLAENCNVNVNNPKGFDIPRDAFIKDGNWRLYLPNKNGEPVPIKKIRIKENLGKAVQLKSELNQWVNPRNNHHVLIYKDYDGNMKEEAVTFWEVAERLLKGVDIYKLPADGMEAVAIMEINDLFILGMSNEEFSLNIDNLKELQKKLYRVQKISSGDYSFRHHIASTVINQREEIRITSLKAWVGLNPKKLQINEIGEISWK

SEQ ID NO: 6484 - protein, 1662 aa, unidentified
  REGION 1..1662: note = Description of Unknown: Cas Enzyme sequence
MTKKILGLDLGTNSIGWALVEQDFENKQGKILGMGSRIIPMGQDILGDFDKGNSVSQTAERTRLRSMRRLLERYLLRRERLHRVLNILGFLPEHYSSQIDFEKHLGQFINETEPKLAYKPAWNELKKKNEFEFIFKSAFNEMLDDFRKTQPELLNRKNRKGEDIKVPYDWTIYYLRKKALKDKLTKEELAWVILHFNQKRGYYQLRGEEGETTNSIREYVEVLKIVSIEKGEKDKKNDKKIWYKMTLSNGWTYSAPFVTAPNWLNTEKEWLITEELDEAGNIKITKDKKSDKEGKEKRKITPLPTFEEIDLLKKEDQDKLYGKIKAKTQITIQNTGKTVGEYIYDTILQKPNQKIRGKLVRTIDRSFYKEELTAILQKQIELQPELFTNGLFNGCVRELYRNNEVHQLTLSKRDFVHLFVEDILFYQRPLKSQKSSIANCSLEFRKYKAKDKDGKEIEVKEYLKAIPKSHPLYQEFRVWQWMNNLKIYRKEDDADMTSSFLNEIADWEDLFAFLMSKKEVNHEDILKHILEPKKLKPKELKAEIAKYRWNYVFNTEKDESKKYPCNETGYEIKRRLEKVTGVPGDFLTKEIEQQIWHIIYSVSDPKEFEKALKSFADKHQLNRAPFVENFKKFPPFKSEYGSFSEKAIKKLLPLMRIGKYWKWEIIDTKTQSRIKNLQTAEFDESIKDRVREKVKKGKLDKNEDFQGLPLWLAQYIVYDRHSEAALSGKWNTVSDLEKYLKDFKQHSLRNPIVEQIVTETLRVVKEIWKQYGNGIENYFNEIHIELGREMKNSADDRKAITDQVSNNENTNLRIKALLAEFKNDSSIENVRPYSPSQQEILKIYEEGILSSVKNKEYSESEKQQKEEDEAMLKIGSTAQPSKTELTRYKLWLEQKYCSPYTGNIIPLNKLFTEAYQIEHIIPQSRYFDDSMSNKVICESAVNTLKDNQLGFEFIKNHHGEKVETGFGGTVEILSEERYKKFVEEHYGKNRSKRNKLLLTEIPDKMIDRQMNDTRYISKFISNLLSNIVREDKEDDGVNSKNLIPCNGKITATLRQDWGLDDVWNDLILPRFERMNQLTKTNDFTAWNEKHQKYLPTVPLELSKGFSKKRIDHRHHALDALVIACATREHVQYLNNENAKSQKFHLQRGLAKKLKRMEVVEISKMKKNEAGAWVRGGEKITKEVPKDFLKPWATITQETRDALERIVVSFKQNLRVINKTKFGGLTYKESKQKSKDRNWAIRKPMHKDTVSGKVYLLSEVKEMTLKNALKKVDELKDVQIIVDKQQREAVYKYFSKNKIDIENALKDENLKDLKKVNVFEPQSATRKPLGTSFTKKIIEESITDTGIQKILLNHLYSKGNNPESAFSPEGIEDMNNNINPLNGNKFHQPIFKVRIYETIGNKFSVGQTRNKKSKFVEAAKGTNLFFAIYENEKGVRSFATIPLNEVIERQKQGLSPVPETNEKGEKLLFHLSPNDLVYVPTEEENESINSIDFNNLSKEQLKRMYKFTDGSGSMANFIPANIADVLFNLNKEKQKKNGINYPIQNEIGVGSQGSKNERAFSGEQIKSFCIKLQVDRLGNISPAKKEVISQTNQLDSTVSEPEVAYKKSNLKAFSSFEEADEENARAMAYLSPEEHLKNVTERIQKIYEDELKKPMDKKIKFRK

SEQ ID NO: 6485 - protein, 954 aa, unidentified
  REGION 1..954: note = Description of Unknown: Cas Enzyme sequence
MKILGLDLGTNSIGWAVVEKDFDEFHLIDKGVRIFQEGVKIEKGIEGSKAAERTSFRSARRLKFRRRIRKINTLRVLIKYDYCPGLSNEELDNWRYRKLYPQNPEFRNWWLTDEESNKNPYYFRHLAVNQKLDLTIQSNRHLLGRAFYHMAQRRGFLSNRLEGTKESDGAVKQSIAHISEEKGGKTLGEYFYAKYLKGEKIRDTYTHRVEHYLEEFNAICDFQELTENIRKELNKAIFFQRPLKSQKGLVGKCVFEINKSRCPVSRPEFEEFRMLCFINNIKIKTPDDEKLRPLSFDERNKVFPLFYRKSKDHFDFEDIAKALAPKNQYSYYKSSGKKPTDWLFNYSMKTSVSACPVSARFRILFGNEFYNLLIPYTREKDGKLSSIDMNDVWHVLFSFDSDSKLEEFARNRLAFSDEQVVEFQKINLKKDYAALSLKAINNILPFLRQGLIYSHSVFLANMYKIIPGEIWAQESNRKLIENEVYNIISNQNTEKQIIDIVNGYIQNCRREFSAWSTEAELLFRKELIASIREYFGPRTYDGFPEEKKIEIEEKAFNLFKYQMPKNLGRGEFVKIQTIDERVKDFLKDNFNVGENDLDKMYHPSAIEVYNPPVRGKDGNLYLGSPMVSSIRNPMAMRSLHQLRKVINELIRVGKIDQNTRIHIELARDLMNANERKALQSWQRDRERHRDEYSKKIKNDCGFGEDYVPSQEEILKYQLWEEQNHKCLYTGNEISLCEFLGPNPKYDIEHTIPRSLSFDNSQENKTICDNKFNRSVKRNKIPSELTNHDDILQRIDHWREKYEDLANLIQVATRQARASVDKESKDRAIQKRHKLTFEMNYWRNKYNRFIMKDVPAGFKNSQLVDTGIITKYARLYLNTYFDRVLTVKGSTVADFRTIWGLQDEYEKKERINHIHHCIDAITMACMTKENYELLAKFYHDWEEAEYAGYDKKPKI

SEQ ID NO: 6486 - protein, 1043 aa, unidentified
  REGION 1..1043: note = Description of Unknown: Cas Enzyme sequence
MARIFGFDIGTTSIGFAAINYEPNTQTGSILRMGVRVFPEARDPDGTPLNQTRRQKRMARRQIRRRRARRRMLNEALHEAGLLPRFGTPEWTALMASDPYALRRRALSEPLSAHELGRALYHLAHRRHFKTRDLAETDETAESPDEKEAKTNRETTLQALKQSGATLGAWLDGRGPHDRKRGVHATRAVVAAEFAKIWAAQSPHHQILATDGLKDGITDAIFAQRPVFWRKNTLGSCRFMPGEPLCPRGAWLSQQRRMLEKLNNLAIASGNGRPLEPDERQAILEKLQVQGSMSWAGARAALKPLYKARGEPGAERALKFNLEVGGEPKLPGNPLEAKLADIFGAAWAHHPRKQAIRDAVHDRLWKADYGEIGEQRVVILPEEARKARRADAAQRFVSDFGATVAQADALSEVSLSTGWEPYSIPALRAFLPKLEAGIRFGALVNGPEYEDWRNQTFPDREAPTGEILDRLPSPACKEESQRLAKLRNPTVVRTQNELRKVVNNLIQMFGKPDLIRIELARDIGLSKREREEKKSANRKQERRRKEAIADLRSKNIAEPSRDDIEKWLLWKESQERCPYTGDQIGFDALFRNGEYEVEHIWPRSRSFDNGFRNKALCRKSVNIEKGNRTPWEYLGHDAERWTAIINRLNGMRASKNGPGMSPGKVRRFLAKEMPADFAARQLVDTGYAARLATAQLKRLWPNVGPEAPVTVQPVTGRVTAQLRKLWGLNNILSDDGEKTRADHRHHAVDALAVACTHPGITQILSRYWQDRDVPGGARPQLAPPWPTIRIDADAAVKRIVVSHRVRKKVSGPLHKETVYGDKKRDVTTKSGTYRQFVTRKPVSVLSEGELAAEPDANGEGIADRRVREIVRQWVADHGGDPKKAFPPYPKLTAAGPEIRKVRLLSKQQMSLMAPVATGYADFGNNHHIAIYRTPDGRIESNVVSLFEAARRLARHEPVIRHNRGDGAKFLMSLSPGEVLSLPAGDDLDIWTVTGVWASGRIVLEESIDANHTTTTRPKAASLVAKGCRKISVDPIGRIRPAND

SEQ ID NO: 6487 - protein, 1412 aa, unidentified
  REGION 1..1412: note = Description of Unknown: Cas Enzyme sequence
MKKILGLDLGTTSIGWAVINEAEHVGEKAEIIRTGVRVVPLSTDEQSDFEKGKALSTNSERTRMRGMRRNLDRYQDRRAHLLKLLREHGLLKESSVLAETGKGSTHSLWALRAAAAEKSIELEQFARVLLTINKKRGYKSNRKANDEDEGQAIDGMSVAKELYDNDLTCGQYGIKRLLAGKRHIPDFYRSDLQAELDKIWLKQREYHGELLSFELKDKIAGKNQKTTWAILKEPWGLVGEKRKTKGFEKKVEDYQWRVDALSRKMELEQLAVVLQQVNGSISSSSGLLGAISDRSKQLMIKDQTVGQFLFAQIQRDPHSRVKGQAFYRQDYLDEFERIWEMQKDAHPELTPELKHEVRDTVIFYQRRLKSQKGLLAVCEFEGRKQPVIGEDGKPELTKDGKPKMWMVGPKVCPKASPLFQEFRIWQVLNNIDLIYEGLEGTGDERSENGIVRSGKVWSLGPEYKAQLFAVLNRTKELSAADVLKELKLKPKEWKVKNFKKIEGNRTNHKYMEAFGAMLKVTGHDDIELDKLTAEEQVETLEKILGELGVNTEILHFDASLTGKAFEQQPAYALWHLLYSYEGDDSRTGNEKLITQLREKFGFDRDCAEILCKVSFEDDHGSLSTRAIKKILPFLKDGLQYDEACEQAGYNHSHSVTAEENETRVLMDALEILPRNSLRNPVVEKILNQMVHVVNKVIEVYGRPDEIRVELARELKNSAKEREEMTKGISAATNVHDSIRKEIAKLHPFSTGVRITRNDIIKYKLYQELKENGYKTLYTGTHVPLEELFSKNFDIEHIIPRARLFDDSFSNKTLCVAEVNRAKSNATALDFMEVKYGADSNEVAQYTERVERFFKKVNPAKFKKLMMRESDIPDGFIERDLRNTQYIAKKSMGMLRQVARTVTGTTGKVTDKLRQDWELINVLQELNWPKYLKAGLTYSETNKDGAMIPKIKDWSKRNDHRHHAMDAIAVAFTRPSHIQYLNHLNARRDEEHKKHAVIQAIENKETYIDPKGRRRFKPPMPLDELRKHVKEQLEGTLISFKAKNKVVTRNVNKSKRAKGHFKKVELTPRGQLHKETIYGKKQHYITKLVKVGPGFTEDMIAQVAKASHRQALLLRFHAAGGDPKKAFGGKNALNKNPIWLDEQHTEKVPEKVKLVEMDTQYTIRKNITPDLKLEKVIDGRAKRLLQERLAQYGGDAKKAFTNLEENPIWVNGKNGAQLRTVTITGVSNAQAIHVKRDLQGQVILDADGNEIPTSFVQTGNNHHVAIYRDVDGNLQENVVSFFEAVERRLQGQHIIDREYNHENGWTFLFSMKQNEMFVFPNETSGFDPNSIDLKDPRNAAQIAPNLFRVQKISSKNYVFTHHLETKAVDGELLKTKKELSTVTYRFIQSTPPLEGCVKVRMDHLGQIQHVGEY

SEQ ID NO: 6488 - protein, 1118 aa, unidentified
  REGION 1..1118: note = Description of Unknown: Cas Enzyme sequence
LGTSSIGWGLIDKKKNVILGAGVRIFPEGVENLGQGDKEISRNATRRGARGIRRQYFRRGFRKKLLRDKLTEYNMAPAADEWQEWLKLNPYHLRAEGLKRKLSLHELGRALYHMGQRRGFLSNSRSANLGDKSAIMKSSDGKIGITETRQELAQHQTLGEYLHSILPKDGEKYRADLPRIRNRFTERSMYIDEFNQLWESQVSYGQELTDEMRLALGGVKKKGDDKDGILFYQRPLRSQKRLIGNCTFEPSKPRAPISCLEFEEFRLWQKMNTIQCNNEFLSKEDRQKAYDYAIDKENFTFAHLRKALNKSDNYFKFNYLDDDKFVGSHTHANLAKSSLFGKKWHQFSRQEQENIWHTLFFFDDFKKLNDYARTNWNFNEKQIDALSKFSLKKDYAGLSRKAIRNILPFLRDGYQYDQAVVLGGIKNAYGDMWQQMSDEDRKTVIDTAISIISTQQADERKESLESLLLDAGLPKNRLRKLYHHSQVEEFPSGLDRLPVSPDADRKIQDIRNPVVIAAIFELRKLVNAIIDKFGKPDEIRIELARDMKNNKEKRQQIRREQKQQEDKRGKVVDAMKKLISEGHRIDINNENILKYLLWEECQHKCPYSGREISVADLFSGRVQIEHIFPYSRSLDDSFINKTLCYEDINRDKGNLTPFEYFSRKGGWDQVETRALKIFYKSHEWPRRDKKLSRFLAESMPDGFIARQLNDTRYISKQAAQYLKQICNKVLINKGSTISRLRALWGLNPIIPRIENSNVRTNSQQVLDADKESNKNREDHRHHAIDAIIVAASTQRHLQTMTAFNRHKKDENYNNFPEPWAGFRTEVEDTIANILISFKQRRKVISSRYTYTQKRGKLYRNKSFAARSALHKETVYGKRQAPLETSAGYHVRKPIDALSSDTHIKKIVDPVIRSAAMARLEELGVDTSKKFKIPPGAFVSKSEEGDLLYHLKIKNRKGEDVPVRKVRVREELGNAIQVRHFNGFADPQNNHHVIIYEDTDGNWKEQIVKFMEVSERKRLGQPIIQLPSDGKRIIYKFQENDMFLIGYPGEHSEAQSMTELSPYLYRVQKLSSMYYVFRHHLASTIQHDEQMFSIRSMKALQEQNPESVVVNIVGEISYS

SEQ ID NO: 6489 - protein, 1412 aa, unidentified
  REGION 1..1412: note = Description of Unknown: Cas Enzyme sequence
MKKILGLDLGTTSIGWAVVNEAESDSERSSIVKTGVRVVPLTTDEQAAFEKGQSITTTADRTLKRGMRRNLDRYQMRRDHLIALLRKNGIIDDNTPLAEDGKGTTHETWRLRAKAVTDPIALHEFARVLMAINKKRGYKSNRKAKDEDEGQALDGMTVARELYDNDLTPGQYGLRRLQEGKRYIPDFYHSDLQAELDQIWRKQQEYHGVDLLNGALLEKIAGKAQKATWAILKEPWGLVGEKRNTNGAEKRLEDYQWRVDALTKKLSLEQLAVVIQQINGAMSSSSGLLGAISDRSKQLMIQDLTVGQYLYAQIKKAPHTSLKNQTFYRLDYLDEFERLWITQSKAHPERLTDQLKAEIRDTVIFYQRRLKSQKGLLSVCEFEGRKEQKLDENGQPVLTKDGKPKMHMVGPRVCPKSSPLFQEFRIWQVLNNLVLTYQGKDDGEGHLGNGIDRQGKEWTLGPEYKARLFEELNWRKELSAHQALKLIGLKPKEWKLNHDKLEGNRTHVKYLEAFDQMLAVTGHEQPDFDKMEVADQLDLVQSVLGNLGVNLSFLEFDASLGGKAFEQQPAYALWHLLYSYEGDGSRSGTEKLARKLQKKFDFDAECAKIMAKVGFEDAHGNLSARAIKKILPHLKEGVTYDEACLAAGYNHSHSITAEENENRELLEKLSVLPKNSLRNPVVEKVLNQMIHVVNGVIDAYGRPDEIRIEMAREMKMGAKERAEMTTNIDKATREHDKIRQEIAKLHPFNTGVRITRNDIIKYKLWQELEQNGHKTLYTGTYIPLEELFGNKFDIEHIIPQARLFDDSFSNKTLALKTVNVQKGNATAMDFMEAQYGAESTEVAQYKERVEKFFKEGSKAKYKKLLMKEADIPDGFIERDLRNTQYITRTAVAMLKQVARTVTPTTGKVTDELRRDWGLMNVLQELNRPKYEKAGLVHQETTKDGKQLTLITDWTKRNDHRHHAMDAITIAFTRPSHIQYLNYLNARKDEGHKKHRNILAIENKETKLDEQGRRYFIPPIPSKDFRDEAKQQLESILVSFKTKNKVTTRNVNKSKKAKGYHRKTELTPRGQLHKETVYGKRKQYTTKVVKVGPGFGPEIIATVADKAYREALQLRLQEAGGDPKKAFGGKNALNKRPIWLDEHQKDQVPEKVAVVEWTDIFTIRKPIAPDLNVEKVIDGRVKRLLQERLDRFGGEPKKAFVNLDEDPIWVDRPGGAKLKRVTITGVSNAIPLHIQRDHHGKPILDDEGQEIPADYVQTGNNHHVAIYRDEKGDLQEQVVSFHEAVARRLNKLPIVDRNFNSDKGWQFLFTMKQNEMFVFPDQETGFDPAVIDLKDPANASLIAPHLFRVQKISSKYYVFNHHYETQAVTGETLKHLKALVGKTHSLIQTPSYLNGATKVRLSHLGQVVQIGEY

SEQ ID NO: 6490 - protein, 1365 aa, unidentified
  REGION 1..1365: note = Description of Unknown: Cas Enzyme sequence
MQKENELVVGLDVGSNSVGWAVVEMDGEKLERIHGIGSRIIPMGDEKKEFEQGAKITKNAVRRQKRSMRRNHQRYKLRRSNLIQVLKLIGAWPEGLGERIGPDAPVQTSLQLYGLRALAVEDPVSLTELGRILYHMNQRRGYKDIGDLMDEQDGAAPTGESKDDGKSIEMVFIENVELEDEKGKKPKYLVTLADGRVGTSTIARIMEMKGSEQELEITTKETKKGTTHEFRLALKTDWRKGMESINQAIDESRLTPGQFFHQQLKADPLYRIRERIVLRDTFKAEFDAIWKRQLGEHAELGSDTLRDTVVRNLIPNNKAEQAKWLGKDLGSFIRDYVIYYQRPLKSQASSKGQCRFEPRKPVMPVSSPIYQLFRIWQQVNNIRLIDRYGEESELTAAERNAVVQHLLESKELKTDKLLDAIGRKKEDLGNNLRANLPGHQTLEPLRARLKKSALWTKLLQEAATQKELDKSTLFHIWHILYSVPMEEHRRKALQTIPGMPEEEVDALAKVRYDRKTGAVSARAASRLTPLMACGEAWAWERISPRDQRRIEEVITKVANGEEIERLPNEVYARLTAYTDTNHFQGLPYWLAATVLYGDHRAAAAKPFDKPEEIKTLSRGFLRNPVVEQVVNETLMIMRDIWATYGRPTSVRVELARELRQNQKERVRTFENNKKRDKERKGVVEMLTTEFHRPKPSRKDIERYELWVQQEHRCLYCGETIQNTQLFDTRDADVDHIIPRARFYDDSIQNRVIACRPCNAAKDKQLAAEYMKRKGPGEWETYVDRVNRLRAGWTKKKYLLAEEVPENFINRQLQETRYIGTKLTELLQPICKVNSTLGIVTDALKNEWGLNTVYKEVLLPRFERLEKIVGRPLIEEVSRTNGTAHRDWKIEGYDKRIDHRHHALDALTVALTRQGYIQRLSNVNQLDITKEEKEAMKRPTWYPLPHPDLRRMVKDQLEQAIPSIKNRQRLLTKASNRTAYLDPATGVVRKGDKGRKQTKGNLRAVRGPLHNEQPLGEVREQRKWLLKDVLKRLAEVMDKEGALHVLRPMDKSDPDYRIRFLAHEHERKLLHDHLAKYDGHIEKMKKALKKDPLVNAKNEHVEELTMLVPKYSTIVALASIASGQDMTKEKVLKRIEKIIDVKIKERVRKHFEAYASNPKTAFTDEALHAFNKGQSVPIHNVRCWKGKGGKDLLVGNAKGRTPMRRPHDPNRKLHVEKGENYALAVFVNEQTSERKFEVIPFFDAVERKLNGLDLVEARLGFQHFLLRKGDVVYVPRPDEDVRSINWTSTKVVGDRIMQMTKMTQRGENSGQFYFLPCPLSSPVTFDKKAQEFPTEFEDRDNPRTKISSVCIPVRVDRLGKVTPLFP

SEQ ID NO: 6491 - protein, 1038 aa, unidentified
  REGION 1..1038: note = Description of Unknown: Cas Enzyme sequence
MGTMRYRLALDLGSTSLGWAMLRLNGDTPVAVIKAGVRIFSDGRNPKDGSSLAVTRRMARAMRRRRDRLLKRKARMMALLVQHGFFPADADARKALETLNPYELRAKGLDAALSPPEFARALFHINQRRGFKSNRKTDKKDNDSGALKTAISALRQQLDPSAAEGKARTVGELLWRRMQAGGGVRARYRERRIEKEDGKTRIDKSYDLYVDRAMIEAEFDALWASQTRFNPDQFNETTRAALKDCLLHQRPLKPVKPGRCTLLPDQERAPLALPSQQRFRIYQEVNHLRILGANLQDAPLTLAQRDAVVEALESNSKRSFTQIKKLLKLPGTTQFNLEDAKREELKGNATSALLGKKDFFGTAWFGFSDTQQDTIVMRLLMEESEATLIAWLQAEFGVDEARAETIANASLPEGYGSLSAQALARILPALKTEVTTYDKAVQAAGFEHHSHISHAATTGEILPELPYYGEYLPRHVGFGTGDPGHSPEKRYGRIANPTVHIGLNQVRTVVNALIKRYGHPNEVIVEVARDLKQNREQRKEEQERQARNQQRNERLRKDAAKILKIAPERVRHADIQKMILWEELSRDIADRRCPYSGAQISATMLLSDEVEIEHILPFSITLDDSLNNKTVALRRANRIKGNRTPFDARSDFAREGWPYDAILQRAELMPRNKRYRFGEDGHQKWLREDKDFLARALNDTRHLSRVAREYLSLICPQATRVIPGQMTAMLRAKFGLNDVLGLNGEKNRNDHRHHAVDACVIAVTDQGMLQRFAKASASAREQQLDRLVADMPLPWDSYREHVARAIDNIWVSHKPDHDYQDEMFDQTIYNANGYSRSAAKIRTVIPFQARAGSPAIRRHIDRYGHSKPYKGLLSNSNYGIEIVRTDSGWEGEVIPTYKAYEFVRNYRKLNPRTTDVDAIEHLRSPRNGLSDRPLVMRLSINDTMRAEIDGRMETLQVLKINSSGSITFIRINETNIPARYAAKLAAQKLSAEGKECEEAVLNDNFFQKAISAGSLRAMKARRVTISPIGELRDPGFRE

SEQ ID NO: 6492 - protein, 1352 aa, unidentified
  REGION 1..1352: note = Description of Unknown: Cas Enzyme sequence
MKNILGLDLGTNSIGWSIRELNSTNNQIIYNGVLTFEKGVGEDQGKEVPLVQKRTESRSKRRNYQAKKYRKWELLETLILNNPKLCPLTLEELDRWRKYEKGTDRIYPKREFFINWLRLDFNNDGKPEYKNPYELRKLVSEKKVDDFYSLGRAFYHMIQRRGFRGRDEEESKTILDGSKEKETIGASEIKKIMLEEKATLGGALHHVQQKYNKRIRNRYNLRTDVEAELKTVCKVQGIDENNDLFHKLYKSIIWQRPLRTQKGNIGRCTLEPTKPRCPLSHPQYEEYRMWSFINNIRVSDYKDPESEETQLNDEQKAIILEKVFFGKKKNKDDFEFIEIMKTLDKKGDALKFNYKAYTTVSGCPVTFSLKEIFDCELSEIKIAHKPNERSKSKKDYYDSNDLWHTLYTFDSKEKLESFAKEKLGLSDEKAKAFSKIKMPKGYASLSLNAINKILPFLHEGFIYTEAVYFANLPKVFNRKLTESDINKIVEGIRLQMKLHKRVKEELSIVNSLIGDYLNKQPGEQTGRYPNYILLEKDKELVDQKIIERLGNKRWEEFDVEKKSGLKQFVEQKYLEFLQTPMSTDIKLLYHRLPRLDDLIKEYLRNEWRIEESKLKYLYHPSETEMYPPAKETNGKKYLGDPVPISRGFKNPMALKTLHHLKHLINYLIEQGKIDEETRVVVEIARELNDANKRKAIERWQRDREKQNQEFTKAINEFAERENVAIETTDEIIDKYRLWMEQERLCIYTGKVISLSELFDGTKFDFEHTIPAAISYDNELKNLTVSDSVYNRQFKQKRIPAELPNYNNDIEIDGILYSAIKPRINFMSENVEHFKKQVEFWKKESKKASTKDRKDYSIQQKHYNQFELDYWFKKLDTFTMKEYKPQWRNSQLRDTQIITKYALHYMKTVFDKVEVQKGNIVAEFRKIFNVGFEKKRSKHTHHAIDAAVLTLIPPPTIRNMLLKEHFAAMENNIHFHSKPNQWNNFNPSSILDIENHTLVNYIAQDRTLIPSKKNVRKRGRIQYVKEKIENGKWQYKLDGNGKRIPLRSKGDSIRGKLHKETFYGAIKENSNEDLLYVVRKQIKDFKSEKEFEDIVDPVVKNVISDTVAERIKIGKSFKEAIAEPIWMFDKDKNFKKSDKNGNPLLPIRHIRCKARAGRGYFKKALQLKEHIFKSGHEYKQWYYVQNEINYLFLLYENQINEKISRSYRILNLLDIVNLKIKGPNELFRIPSFQLIEKGQGKKKNLYHLKHILKVGQRVLLWNENPDELRDLEKNEILKRLYKIYKFNEIIAPTTYIYLKHHNEARQENELDEEKKLVIEKYQPLIALKPNDFNCLIEGIDFDITLDGEIIMKQ

SEQ ID NO: 6493 - protein, 1116 aa, unidentified
  REGION 1..1116: note = Description of Unknown: Cas Enzyme sequence
MTQRVFGLDIGIASVGWSVLDEHRIIDLGVRCFDKAETAQKGDPLNLARRQARLLRRRLYRRAWRLTQLARLFKREGLINDAKLFARSPAFSEPDPTDPTGKRQRLTGTWELRCKGLDHLLTPVEWTRVIYHLCKHRGFHWVSKAEEAQADSDAEGGRVKKGLKHTATLMKDKGYRSAAEMVLAEFPDAQRNKRGEYDKALARVLLGEELALLFAAQRRLGNPHASERFEKLILGEGDRKSGLFWQQKPALAGVDLLKMLGKCTFEAGEYRAPKASFSAERHVWLTRLNNLRIVVDGRSRPLSDAERTAAMTLPYQTENFKYKSLKSALVRLGLWTEDVRFGGLAYPSRAQAEAEKAKDPEDQVLAKLPAWHELRLAFKRAGQEALWQRIGTPALEGHPELLDQIAWVLSVYKDGAEITQQLRLLPLPEPDACMVVLEKISFDKFSSLSLKALRRIVPLMEQGLRYDEAVARIPEYGHHSQRVGPDAPKRLYLPPFYESQREYRGKNDRVGSMKLRNDANIPRNPVVLRALNQARKVVNALIREYGSPTAVHIEMARDLSRPLEERRDVQKAQEEFRNRNDKARADFEKEFGYRPKGVVFEKWMLYREQLGQCAYSQQALDIGRVLGDANYAQVDHTLPYSRSYDDSKNNKVLVLTRENQNKGNRTPYEYLTALDGGQEGERWRAFAAWVQGNKAYRAAKRNRLLRKNYGAEESRGFIDRNLNDTRYICKFFKNYVEEHLQLAERPDGDHYRRCVVVSGQLTSFLRARWGLVKVRSASDRHHALDAAVVAACTHGMVKALADYSRRKELEFLHDGFPDPETGEILNPAAFARVKQHFPEPWPHFRHELQARLFTDDLPALQEDMRRLGTYTEEDLTRLRTLFVSRAVQRRGIPALHEATMRSPKYLASNQSSVRVPLTKLTLSKLEKIIEADRRNRPLVEALRKRLEQHSDNAVKAFATPFYKPSAPGKIAPLVTGVTILETQNTGIRLPHGVAELGEMTGVNIYRVAQGFFLEPLYRVANEARINVKPVPKSAEFIYSLTKNELVQIEIGNENFFGYFVMFESDGRVTLRAHDQPQPDKKYFRKSISTAKNIRKFHVDVLGHIYPAPPEVRRGLA

SEQ ID NO: 6494 - protein, 1146 aa, unidentified
  REGION 1..1146: note = Description of Unknown: Cas Enzyme sequence
KNKKYSDWPRGLHKKEKFKGNETLKTIKTLLGEPLFEKAFGKGAEFIHFKNEKYIEFYSTLFKSAGTNELDIDDDRVQKIRLFLSQHMDIIDLTEGIESNAYLDKRALEIAKFKFPRKYTSLSEKAITNLLPLIQINNNDTLPSEHKRKINLLKSIYSSFKHRLKDYTPEQEKKGEHEKISKAMLSDFCREYDMLEEPLDNGGWPYWATAGLMYGRHTAQQLQKINDYHQIQPLSKEETLRNPVVEQMVNETLQTIKSLLKEYKLKPSDLEIRVELARELKNNAKERESMHASMIRNAKGNKFATYEIMQIEYEDGQKKIKPENECKVNGCTQNCYKSASLRQPTANQILKYKLWKEQGMMSPYTGQPIPLCKLFDGSQYNKEHVIPKQRFFDNSQSNLVMAETSVNKVKDNLTSLEFIRQYGGKQVAGFSIKPLSNFENDIMNHSRLSNRKKKMLLMKEIPDDFVERQKKETQYIARKVKEKLGSIVGLENVTTTTGGITDHLRDIWGLNETFKEMNKERFGKMAIMAGEEKEKWCHYKETESRNGDKKKVLVLNQWSKRLDHRHHAIDALIVACTTQTQIKQLNTLNQIVQEKLKEQYDDLRHLDIVNEEEISKRMAEMTKEEKRKFQEHLGSLRQFEYPWDHNQFMTDVKEKIERMIVSFKSKKRLLIQNKEDKNGKRTNELMLKVRGALHQETVYGKYVDEETKKVSIKTAFELAEFILEPEIMTKVLQRIEEFNGDIDEAIEALNTKEGKLKDDNNNVIKSATLHFKEKDIYRVPLSKFAEKKNAEGIIDRVIDKSGQVKNDLYDHLYRFNIDRKLEQLKDNNETIDPALNEKMQILLNNNISRETFENFIEELDGNSRKRVKSWINGKAAFSEDGIEDFNSKRLKKNPNLKPVYNLKVLYAKNAGESSLKPIKRKHREDGKGDNDYVKPGDNYCYVVLRKNNVRDFMPISFFDATQWVTDKFRHDIKTGYQFPKRFDERLNYIENIIKEKISELKPSYEILDFLQQDDLVYLPFDKDDATLASSNPNHDFWFDKEKKRWKRIYRVVKFSGTRCYFIPYNYASPINYKPILDEAEKKQREREDNEVPKEGLFEFPDKNCSQFELTEEYIVEALKKKNRKFKANKIQDSCIRVEVDRLGNLR

SEQ ID NO: 6495 - protein, 1034 aa, unidentified
  REGION 1..1034: note = Description of Unknown: Cas Enzyme sequence
MKKILGLDLGSTSIGWALVNEAESDNEKSTIIKTGARVIPLTTDEQGNFEKGKAITTNQDRTSKRSARRNLQRYKQRRQKLLEILTEKGFISPTSVLSEDGKETTYQTLELRAKSATNRIEKHELARVFLAINKKRGYKSSRKAKNEDEGQLIDGMGVALELNKRKITPGQFALEVLKNGKKFLPDFYRSDLQAEFDTIWNKQKQFYPEIFTDTFYDELKGKGQRATSAIFWKKYNFNTAENKGNRDEKKLQAYQWRTDALNKQLEKEEVAYVITEINNDLNKSSGYLGAISDRSKELYFNKQTVGQYLHEQIKENPHTRLKGQVFYRKDYEDEFDAIWNEQTKHHKELNDELKQTIRNIIIFYQRKLKSQKGLISICELEGKEKEIIVDEKKKTKLIGPRVCPKSSPLFQEFRIWQRLNDLEVSNKKEKSKWKLDDESKQLLFKELSIKESLLKAQILKLLYKNYKDLDLNFKDIVGNRTNASLYKAYQTIVEISGHEEFDFTSLPVHETTEIINGVFETIGINKDILIYNSELEGKDFEQQPYYQLWHLLYSYEDDNSTTGVDSLLKKLKEKFGFDEEYAKILANVTFEDDYGSLSSKAISKILPHLKDGLQYDEAAALAGYNHSNSLNKEERANKPLKDKLELLANNSLRNPVVEKIINQTINVVNAIIEEYGKPDEIRLELARELKKSAKEREDATKNMSASQTEHEKARKILQTEFGLPYVSRNDIIRYKLYKELEPRGFKTLYTNTYILPEKIFSKEFDIEHIIPQSRLFDDSFSNKTLELRSANIEKGDKTAYDYILEKYGESGVLEYEKRVDDLFKGVVGKKGKHKKLLMTGKDIPDGFIDRDLRNSQYIAKKTKELLEDVCRTVNTTTGSVTDRLREDWQLIHVMQELNWDKYDKQGLTYYETNKEGKSLPRIKDWTKRNDHRHHAMDALTVAFTKYSHVQYLNNLNARSDKASSIYGIEQKELYRDEKGKLKFKPPLPLDEYRAEAKKHLENTLISFKSKNKVVTPNKNKIAGKNKPQNTLTPR

SEQ ID NO: 6496 - protein, 1086 aa, unidentified
  REGION 1..1086: note = Description of Unknown: Cas Enzyme sequence
VRIFPEGVENLGQGDKEISRNATRRGARGIRRQYFRRGFRKKLLRDKLTEYNMAPAADEWQEWLKLNPYHLRAEGLKRKLSLHELGRALYHMGQRRGFLSNSRSAMLSEESAIMKSSDGKIGITETREELAQHQTLGEYLHSILPKDGEKYRADLPRIRNRFTERSMYIDEFNQLWESQLSFGQQLTDEMRLSLGGVKKKGDDKDGILFFQRPLRSQKRLIGNCTFEPSKPRAPISCLEFEEFRLWQKINTIQCNNEFLSKEDRQKAYDYAIDKEKPSFSNLRKALNKSDNYYKFNYLDEDKFVGSHTHANLAKSSLFGKKWHQFSRQEQENIWHTLFFFDDFKKLNDYARTNWNFNEKQIDALSKFSLKKDYAGLSRKAIRNILPFLRDGYQYDQAVVLGGIKNAYGDMWQQMSDDDRKTVIDTAISIISTQQADERKQSLESMLLDAGLPKNRLRKLYHHSQVEEFPSGLDRLPVSPDADRKIQDIRNPVVIAAIFELRKLVNAIIDKFGKPDEIRIELARDMKNNKEKRQQIRREQKQQEEKRDKVVDALKKLISEGHRIDINNENILKYLLWEECQHKCPYSGREISVADLFSGRVQIEHIFPYSRSLDDSFINKTLCYEDINRDKGDLTPFEYFSRKGGWDQVETRALQIFHTSKEWPKRYHKFKRFVSESMPDDFIARQLNDTRYISKQAAQYLKQVCPRVMINKGSTVSRLRKLWGINSIIAREYAETDDMPNYEKNREDHRHHAIDALVVAATTQGHLEKMTRFDRYNKEANDRSFPEPWAGFRTEVEDAIANILISFKQRRKVISSRYTYAQKRGRLYRNKSFAARSALHKETVYGKRQAPLETSAGYHLRKPIDALSSDTHIKKIVDPVIRSAAMSRLEEMGVDTSKKFKIPPGTFVSKSEEGELLYHLKIKNRRGEDVPVRKVRVREELGNAVQVAEFGAYVNPRNNHHVIIYETHDGEWKESIVPFWDVVERQRNGEPIIQLPSDGKRIVYKFQENDMFLIGYPGELSEAQSLAELSPYLYRVQKISSGDWNFRHHHASTLQHNEQLIRIRSVKGLQDSHLLPVNLTELGFILQ

SEQ ID NO: 6497 - protein, 1061 aa, unidentified
  REGION 1..1061: note = Description of Unknown: Cas Enzyme sequence
MKKNILGLDLGTNSIGWAHVTEGETADQSTIEQIGVRVNPLTIDEQTNFEKGKPITTNADRTLKRGARRNLNRYKLRRSNLLEILLNSNIINANSTLTEDGPDTTHATWKLRALAATEKIELDEFARVLFAINKKRGYKSSRKAKNEDEGQAIDGMAIARKLYEENLTPGQLTFRLLQKGSKSVPEFYRSDLQAELDAIWNYQKMYHPEILTDSFYLEIKGKGQKATSSLFWINYKFNPAEIKDLDDSLKNEMTINFNNREIKRFQAYKWRCDSLSTPLEKEQLAYVITEINSNLNNSSGYLGAISDRSKELYFNEETVGQYLYRQLKKNPHTSLKNQVFYRQDYLDEFEKIWETQAGFYTQLTHALKEEIRDVIIFYQRRLKSQKGLISFCEFESREILIDIDGKKVRKQIGLKVAPKSSPLFQEFKIWQNLNNVEFRRKGIRRKKTIRTNKTDETRDCDSEFVLDLDAKQLLFDELNIKGNLNSKTIIELLGHSAQEWEMNYTQLEGNRTQQALYEAYFKIIENAGYDLRDYLKVKSNKDEIELQDINIPAAEIKKAVSEIFTSMGIDVSILDFDAELTGQDFEKQTSYRLWHLLYSYEGDNSNSGNEKLYELLEKKFGFAVEHAKVLSNINFQGDYGNLSSKAMRKIFPFIKESKFNEACELAKYRHSKHSLTKEELDNRVLKDMLELLPKNSLRNPVVEKILNQMINVVNTLILKNSEKDAKGNVVKYFHFDEIRIELARELKKNAKERAEMTNNINAAKIEYEKIEKLLQKEFGVLNPTRNDIIRYRLYEELKINGYKDLYTNTYIPKELLFSKQIDIEHIIPQSRLFDDSFSNKTIVFRKDNIKKGNMTAFDYIESGFDVEELNDYKTRVENLFNSKIISKAKYKKLLLRESEIGDGFIERDLRDTQYIAKKAKEILFTVTKSVVSTTGAVTDRLREDWGLINVMKEMNLPKYRALGLTELEERKYGQKVEVIKDWTKRNDHRHHAMDALTVAFTKHSYIQYLNYLNARKDERHKMHWNIISIENKETEMKIDEAGEKKRVFKEPIPNFRQLAKE

SEQ ID NO: 6498 - protein, 971 aa, unidentified
  REGION 1..971: note = Description of Unknown: Cas Enzyme sequence
MKRILGLDLGTNSIGWALVESDFEEKKGKIIGLGSRIIPMPQDVLGKFDAGQSISQTAERTNFRATRRLYQRDNLRRERLHRVLNILGFLPKHYAEAIDFEKKLGQFREGKEVKLNYFKDSNNKFEFLFKESFLEMVEEFRKSTPELFIKNKNGLETKIPYDWTIYYLRKKALTEKITKEELAWLLLNFNQKRGYYQLRGDDETDKDKEKEFCILRVKEIKDSGEKVKGNILFDVFFDNGWKYDKQITKPENWVDKTKEFIITTTKRKDGEIKRTFKAVDSETDWIAIKKKTEKDIEFSGKTVGSYIFEKILQNPKQKIRGKLVKTIERKFYKDELKSIIKEQIKHHRELQNRELYTKCINELYPRNEAHQNNIKEKDFEYLFIEDIIFYQRPLKSKKSTIANCKFETRNYEKDGLKIKKPLKAIPKSHPLYQEFRLLQLLKNLRILQKEKNVDGKLKLDYDVTNELLKTENQWVELYEYLNTKKEIEQKQLIQYLIDKNIIQKEDKDNYRWNYVEDKKYPCDDTRISFITRLKKIKSIDANNFLTPEIEYNLWHIIYSVRDKIEYRKALGTFAEKYGIDKAEFLSNFEKFPLFNNEYGAYSEKALKKLLPLMRFGKYWTMANIHSSTIKRIEKIITGEFDEKIKVRTREKAIELKKIEDFQNLPIWLAEYIVYDRHSETGSNIKWNNPQNIDDFLNEFKQHSLRNPIVEQVVTETLRVVRDIWDQYGDGQEDFFDEIHIELGREMKNPAEKRKTISQRQQENENTNQRIKELLKEMTEIGARENSPSHQEILKIYEEGVFQNPDAKFTSVSEDDILKIRRNTSPTSTEIQKYKLWLDQGYRSPYTGEVISMSELFSTKYQIEHIIPQSRYFDNSLSNKVICESDINPYPYKDNQTGYEFIKNQGGSIVPELSKGKKKVKIFTLEEYENHCKRYFSKNKAKQKKLLSDEIPESFIERQLNDSRYISKFIKG

SEQ ID NO: 6499 - protein, 952 aa, unidentified
  REGION 1..952: note = Description of Unknown: Cas Enzyme sequence
MTQYVFGLDIGIASVGWAVLGERRIIDLGVRCFDKAETAKEGDPLNLTRRQARLLRRRLYRRAWRLTQLARLLKREGLIDDAKLFSRQPSFSTPDPNRPGRKQVVSAWELRRDGLDQLLSPVEWARVIYHLCKHRGFHWISKADEAKADSDKEGGRVKRGLKHTAALLAEKNYRSAAEMVLAEFPDAQRNKRGQYDKALSRVLLGEELALLFQRQRDLGNPHASLRLEALILGSGDRCSGLFWQQKPALAGADLLKMLGKCTFEKEEYRAPKASFSAERHVWLTRLNNLRVIIDGCSRPLNEAERAVALLLPYQSETFKYKTLKNALVKAGIWIDSVRFGGLAYPSKAQSEGDKAKDPEDQTLVKMPGWHELRKAFKASGHEPLWEHIRTPALEGDPTLLDQIATVLSVYKDGDEIARELRRLALPEPDTCIPVLERVSFDKFSSLSLKALRRIVPLMETGLRYDEAVAQIPEYGHHSQLVKPDADKRLYLPPFYESEREYRSRHDRVGSLKFQQDADIPRNPVVLRALNQARKVVNALIREYGSPMAVHIEMARDLSRPLDERREVQRLQDEFRERNDRARTQFAEQFGYQPTGRVFEKWMLYREQLGQCAYSQHALDIQRVLDDPNYAQVDHALPYSRSYDDSKNNKVLVLTKENQEKGNRAPYEYLIALDGGQEGERWRAFAVWVQGNKNYRAAKRNRLLRKNFGADEQRGFIDRNLNDTRYICRFFKNYIEEHLQLAPRPDGNLNRRCVVVSGQLTGFLRARWGLSKVRSDSDRHHALDAAVVAACTHSMVKALADHARRKEIEFLKEGFPDPETGEILDNTAFDRGKHYFPEPWPHFRHELQARLFTDDLAALRTDMERLGSYSEEDLARLRTLFVSRAPQRRNGGAAHKDTIYAQPARLKSQGGIIEKVQLQDLKLADLDNLVDPHRNQRLYTAIRERLQAHGGKA

SEQ ID NO: 6500 - protein, 1058 aa, unidentified
  REGION 1..1058: note = Description of Unknown: Cas Enzyme sequence
MARKRYRLSLDLGTNSLGWCVYLLDDADEPTGVLRMGARIFSDGRSPKNLASLAQDRRAARQARRRRDRVLKRRNRILGGLTRFGLMPANIDERRKLTEMDPYELRARALDEKLAPHEIGRALYHLARKRGFKSSRKDRGDAEKEKEAGQVKQAIKALREKVTSAGCRTVGEYLAREHRERNPVRARRRSDGQYVLYLQRDMVREEFEAIWAAQAVHRPEVLTREAHDYLLDALLFQRPLKPVQPGRCLFEEDEFRARLSSPLQQRFRILQELNNLRLVSPADERPLTLAERDLLAKELQRNADLTFAKMRALLGIGRSSLTRFNLESEKRKKLKGDIVGAQFSEPEALGEAWFSWNADDQEALADLVAVAEDDERLVATLTGAPWDLPEAVARRLARCRLPDDFGSLSLKALRKIVPELERDVVPYSTAVERAGYDSHSDFYTGEFFMQLPYYGELLRGYTSPAERAKDREEARHGKIPNPTVHIGLNQVRQLVNALIKRYGHPTQIVVEMAREFGLSGERRREIEREQEENQGRNERFDEELRRLGQRTTRVNRLKLALWEELGRDATSGEAEALERRCIYTGRQLSKALLFSDEIEIDHILPFSKSLHDGTGNKVLCVRQANRDKGNRTPFEAFGHSPGSYNWDDIMQRAARLPGRKPRLFQPEGLEQFLDGRDFLDRQLTDTGYLARAAKLYLSAICVPNQIWVSSGRLTGMLRSKWNLGALLWEDSRKNRNDHRHHALDAAVIGLCSRSLIQRVATAAARAEQRGENRLLEGLDAPWLGFREELQRCLQSVVVSHKPDHGPEGQLHNDTNYAWRGAPDAKGTPLVGRHVPVESLTSLGSLEGIASEAIRTRLAEIITPLSGTKAIREALQKFSAETGIRRVMKEERLSVIPINDRRSGTPYRYVKGDGNFCYDIFQREDGRWKGEIVSTYRANRPGTERAPAKDGAHRRLVMRLHGGDMVSMIVDGHRKIMRVARLSEGMIALAEHFEANVDARNRDKHDSFKYVYKAPGALQTAQAQLVGVSILGHVNGRATGAPDGRPDRRDSDRGPAPVD

SEQ ID NO: 6501 - protein, 1299 aa, unidentified
  REGION 1..1299: note = Description of Unknown: Cas Enzyme sequence
MKSRNYLLKLQKETPRDELVASWQQHQFYQTSLVLGIDIGLEGIGVYLRQGEQELFARTLDLSGVLPEKSDALANRRQMKHARRCRHNRKIRLRRLDELLEKHGLPLQWRDAPEAFRKSDPFKLRHRAIKPDGTGLESKFALANAIRHCVQHRGYDYGRFREEGNYPWGDTAKLGKAITWLKTATLDERTAEDLREMARNRELEVKDKEADAKWGEFTALIDERAAYAREHDIGRVLAEHAKGDKHDNLRKRARGIAFPRGQVWAHLEFIVRRHAHLIEDAEGFLAALGCNPDDRDEFPDIAASTAAKERTIFWYNRKTRHEMERHWAKKSKDCPYAERLGFGDDKKTSARGELSLRLWSMLEFGITRRVEITFQDVERIQAMKERGEKVPSEKTAKELIHSLSPDAVRKLIGMVKAQHGADGTLLPLSNERRTEIKKEARALIEQDIIDNSGVAAALGPKPAALKDGKDEKWNASFFDQLNDLVAPAPSTLKGTGGLYHETAKRLYEVATVNEQDFTREGFNKRLVDLGFYDWRRESVLDWGVFPQVEFLLGRRVKHGKRRGEVSESCQGFLRKLLRDLVKDGKLPEGTLAPDFCVVEVIGNAPRTQEQKGDILKEQKANRSTRDEQFVKAGRDDSGVASRRRRISLHAQQKGRSPYTGRTLPDDPLSSELEIEHLFPAAMGGLSVDDNLVLTYKTENAAKGDRTPLQWLGAQRLEQMIAANKDMKWGGLKREVFAWGTRREDDPSGKWPSHYDESGKLLIPDFGNTTRVAQLARQLRAAVAHWLGIEKDAEAMAQRIGTPSGWLASQAMRSWLPDYRKDRDDITHHLIDAAVLAHIPPREGMNSIHCGGIFYTERVWVPDEKKPGEQTSRLVTRALAELSPAARLTKWLPGERKEYTECPVLKHRPSKNKQSIGDATFWRQAEAAKPELAQRPQKPFNAEDYKGDADKLLAELRMMKINERKHRQWCARNKRKGLPPPEFKDVLPTYKDVESYLERATAALQSERGQEVEPLRLRDGGNGSKGTPITKVWKWSKKRNLDSPLGLSGKQRTESDGKVVFEGLRFLKESNDRMELWLGYDWKAAQKARKAKAADWEAKGWRYYRRFVPHSVALRHLKRLGFAFDRNKRSKAPAYMQAKPDKPETHVSLRELLLGAELPPFARKVGQFRKGDVLLLGLNQEGGIAGPGEGIVWSAHYTVTAIGTQIEMKPLLFKDKAATPMREIKRKNLDQQPANAAVLATLLSLPSASEHAAELMKKNSKVRIPPEPETKGNLKLNDPPSDTPRGRGRRADPAGEADLL

SEQ ID NO: 6502 - protein, 1878 aa, unidentified
  REGION 1..1878: note = Description of Unknown: Cas Enzyme sequence
MSKKILGLDLGTNSIGWALIEIDHEKRTVRIIGLGSRILPMRNYVNSQTGLESKDPYGDFVKGVGISPVKPRTDKRGQRRLNERYLLRRDRLHLVLDLLNALPKHYKLEIDFTNEKGEKCGHFKKNKEPKLAYLPKQTGEKAHFLFKESYQQMLDELGIENKKKNRIPYDWTIYFLRQKALSEKISLEELAWVLLSYNQKRGYEKTEVEYKSIKECEIVEELDLRVKEVIPKVDKEGKQFYEVHLDGNDNFIYNEYSDVQMTFKDDLKEIIKSSKVDEQGNIDNKNTEFKVVDIYPLEIKDVNYEKTEGKHKYTLTYQNGWQEVKQPNNFTFRYKNALHKSYDYIVETVYDNQGKIKAQQGKERKLREPDLSDNSSDWTLLKKKTEKEALAFNYDNEYLNTETNEPKKYISTKIYNVLKNDAQTGNRTKIIGGMFQVVDRDFYREELKQIIATQKQFYSSLNDKEVFDKCIKILYPQNKNHQEALLKNKDAIQHLLVEDILMYQRPLKSKKSEIANCKYEIRYWKNVEDKNGNPIEKVDIETGEVKTIKEPVYIKVVSASHPYFQEFRIWDKLHNLRLIQLEKEVDGKKITNQDITKEFFKSEKEYQELFEELNNRNSLNQEQFLAYCKEKFKIDYKSKDSNFAWNFPEDEEIKRNETRVSFATRFKRCGFAEYADFLTQQKELELWHYLYSVNYKERTENNNKSITTFFNNYFAGFDINEEVKEKIIIDFKTYPKFASKYCAYSEKALKKLLPFIRLGKQENKDAWENEEWYQKWQKTNEKRKEEILKRKAKIDFTQDVIDWDKFTDNDAEIPFPKGLFNTFKNFEDLDDFKNLNLTQASYLIYGRHSELAFAKQWKSPKQIRDELHQELKQHSLNNPVAEKVLLEMAQVVADIWEYWGVRKRDREYEKGDGYEPLFDKIHLEVGRELKKSAKEKEAEAKRMSGNKAQNKRIRQILEEFLSQSDYNASPRNQDHLERLRIVEEGAEHTKNNDKKFFDDKSYTKKDIEEILKKQKISQTDFEKYKLWIEQGYRSPYSGLMIKLTELFDGNKYNIDHIFPQASITNNSLSNKVVVEVDLNKLKSDRTAREFIQVQKGQSYLGIPVCTEEEYLSIVKTQFSGTKKLILLSKEIPKGFTSSQLNNSRHIARKAMELLSHIVREPGEVEFRSKNVLPVTGMVTTELKRAWKLDQVWTELVAPRFIRMNELTQSNLFGNWQIAKNGKEYFDCNLDDTIREKDESYDIKRIDHRHHALDALIVALCTEEHVNYINNINADAKSDNYGKQKQIEKYRQTLKRKIKFTKKDDEQDENNWYYMLPGEIRKAGTENSRRDSVLEMVYHYKGFDSFGQDYKKMVLNALQNTIVTFKQNLRVINKTVNRYNNTPNKNRFAIQNTDNGQKQNWSIRRSLGKETFYGKQIINGEERIIGREKLDITFDSKRISKISDSLGHTKTILLNQLKQFDTVELPFEEAIKYFDALLEKQEFEAIVNDSENEFRSVDDLLEHLKANGAKYKKIDYSKLNVFIDKISERDFRNEFTDDIKEHPEIAFTPEAIEEMNKPENIQKLNDGKNHKPIKKVTTYTGFGKQRALNEEDKESVKSKQFVVNDAGSNLYLGFYEGFVKDKNGNEIRDEQGRKIKERKFQDIGLIDLIESLKQDKENRINPLSDKVYDDKGNNYNWIFTLSPLDLVYVPTEEEIESPSQVDFNNLTKEQVDRIYKFVDGATGYANFIPFSFSKTIKFENLKSNETTYNGEITLITKKDKQQRVLQKFHSSISDDVMIKDVCWKLKVDRLGNISKAGNYLPNKNHSTIISEPEVTYQKKNWTIKNFDSFEAMELDQLAYYAAMSPIERFRALKELTLKAFGFRQESDMNVIERKIKFES

SEQ ID NO: 6503 - protein, 1035 aa, unidentified
  REGION 1..1035: note = Description of Unknown: Cas Enzyme sequence
MKNMQKYRLGLDLGANSLGWCLVALDDDDRPYRFLRMGVRLFSDGRNPKDGTSLAAARRLARSMRRRRDRFLKRRERLMRLMIAHGFMPGDRAARRALRSLDPYDLRRRGLDEELTPFEFGRALFHLNQRRGFLSNRVIDKSKDDDKGKINTAIGKVRERMQDENARTIGEWLARRHVLRQAVRARLHGQGARSSYDLYVHRSMIAEEFDRLWEKQATLKPAIFTEAARAVLRDALMFQRRLRPVVPGRCTFEVAEPRAALALPSVQRFRVLQEINHLRIREVGKPDVALTLQQRDLVLYELLRKRDRTFAQLRSLLGLSEDATFNLESPERTRLKGDATGTAMAAKGMLGKRWHELPVERQDEIVGVLLEAEEDDSVAAYLRRELGIADEVARTIAAVPLIDGYGSVSLKAIRKMLPHLERDVVTYDQAAIAAGYDHSLRYDGGDLPKLPYYAELLAQHVGTGTGVPTDPPEKRFGRVSNPTVHVGLNQLRVTVNAIIEKYGRPSQIVIELARELKLNRERKRELEREQRGRSLENARFREDLEQAGLPPKPGNLLKVRLWHELGPPTDRRCPYSGEMISFTRLMSDEVEIEHILPFAKTLDDSPANKTVALRRANRDKGNRTPFEAFGHSPSGYDWEAILNRAAQMLPNKRRKFGPDALDRYQEGGDFLARHLNDTAYLARVAREYLTAVCPSNRVWSIPGRLTALLRSRWGLNTLLSDSDRKNRTDQRHHTVDAAVVAVTDRSLLQRMSTISAHTREDGFQRFLDGLAEPWPGYRQGLVFGLAKIIPSYKPDHGTGGRLHNDTAYGFVNPAADPGKPVEVVHRVPLASFKTADDIDDIRDPVLRERLKSSVSGRSGRDLAGALEQFSAATGIRRVRVIETLSVISVRREDGTAYKAYKGDSNYAFEIVAGDGGRWFDRVISTFSAAGRQVAAPSTGTVVMRLCKDDCVSIEVDGRRAIYRLAQMSPGKAILAPVNEGGDLRERDRDASDPFKYLIRSASSLQRLKARQVVVDPLGQVWERRWPNEGQIRRNC

SEQ ID NO: 6504 - protein, 1008 aa, unidentified
  REGION 1..1008: note = Description of Unknown: Cas Enzyme sequence
MPSDEDARKALVRANEDGDNGDLSSSIYALRARALDAALAPYEIGRAIFHLNQRRGFKSNRKADSNDPEQGMIATAISALQEKMLEDEARTIGEWLYMRRQKGLSVRARMTADGEGYAFYPARAELEREYDAIMRSQRRFHPEVLNDTVIGEIRDVVFYQRPLRPVPAGRCSYNIAESRLPRAHPLFQKFRLLKEVNELEIVGEDQKKVKLTPDQRNHLVLQLRTELTKQGKVPFSKLKKTLKLGREFHFNKESDNRGDLEGDVIYFRMSRPECFGARWAALTVDRQAAVTEKLRTEPDYKLLVTWLQEEAGLDEAHAKAVADMPVPDGFGRLGSSALTALVDAMENEVDNGFVITEAEAARRVYGRTNSEADPDRKGVDELPPYQEVLSRHIPPGTGNPSDPYDDYMGRITNPTVHIALNQLRRVVNVLIKKHGKPDRIAIEVGRELKMNDRERDEVNRKIGKNTKAAIERGLKLVETYKQPDTGYNRLRLELWEDLNQKPENRVCVYCGKPIAGHMLFNGEADVDHILPYSKTLDDSKANRILCCTACNREKKNRPPAEVPQWHARYDEILARVVTLPKSKQWRFAQDAMTRFGEEEGFLARQLTDMQYISRLALTYLAHLYDYEEVDLDGVYKRHARVRALPGRMTEMLRRQWSLNELLHSHNLVSGMAKPKNRLDHRHHAIDAIVIACTSRSLIQRLATASAQAEERGAERVVERIDMPWPTFREDVRTAVNAIVVSHKPDHGTVSREGYAKGRGQTAGKLHNDTAYGPTGEKDAAGNDLVVRRIAISSIKTPADIMKIRTNEHGHSELRDRLYEATRGREGKAFEQAVVEFVKTDAKFKGIRHVRIVEPLKTIPIRDKDGRVYKGYKGDSNYAFDVWALKGGNWVTEVVSTFDAHRPGWQSAIRAENPTAKKILSLKQGDIVAIERDEGRRIMRVVKFKEGQVCLADHNEAGSLKARDANKDDGFKYVYLSASSLRKSKARQVRIDEIGQVSDPGPWWERRGG

SEQ ID NO: 6505 - protein, 1077 aa, unidentified
  REGION 1..1077: note = Description of Unknown: Cas Enzyme sequence
MNKITLGLDLGTNSIGWALIESDEYGTPFSIIDMGARIIPLSSDEKDQFAKGQTIAKNKDRTLKRTQRKGYDRRGLRKKYLKELLENLNISPDKELMKLPTLDLWQLRNDAVNPEKNITAKELARVFYLLNQKRGYKSARSDANADAKDTKYVEEVKSRHAYLRDTNQTIGQYLYKELKSATDNNSYFRKKEKIYPREAYLEEFDKIIDVQKQKQSFLTDTVIHQLRNEIIFYQRKLKSQKGLVSICEFEGKELIYTDKITKTEKKTTIGPKVAPRSSPLFQLCKIWETVNNITIKVKNPPESKYKWSDRILTLEEKERIAAYLYKNEKLTYENFVKILGYDTTQIYANAQIKKGLQGNLTYTVLYKILKDEKLLQFDFHYNNTNKTSQIIDTETGEVFEKDILEIDKNIEFQPLYQLWHTIYSIKDVQECINALIHKFDLPEVMAAQLAAIDFNKQAYGNKSHKAIRKILPLLMQGHGYDKACEFVGYNHSNSLTKEQQQDRATDDILELLKKNSLRQPVVEKILNQMVNVVNAIIKEYGKPDEIRVELARELKQSREERYDADKSINDNKRINEEIVKRLKEAGIPETKKFIQKYKYIYQIRPTLNEKGKPNSYSLKDAKVKNQCIYCGKSFNLTEAMIGSAYDVDHIVPKDLLFDDSQTNKVLVHRSCNSQKLNKTAYDYMASKGKEALDDYLIRVDAWYKEGILTYNKMQRLKVSYEEYLERKKTNKTTEADKKLWESFIDRQLRQTQYIARKSKDILSKICNKITTTEGTVTATLRHLWGWDDVLMNLQLPKYKELNKTELVTWTSNHGNHTHSKEQIVDWTKRDDHRHHAIDALVIACTKQGFIQRINTLNSSETKNEMELAIIEARKKEIRSDEKLSNSENEQTKIYKEKLSKLEQYLVEQRPPEFTTKYVQNHADKILISYKSGKRAATKGKRKISIDNKKVVIQDNVIVPRGELHEQSIYGIINIIDKNKPIKHLFAYPQSIINNDIRQLVQVRLEEHDNDQKKAILSLKKLPIYLDKDNKKVLEFTDCHKQVSVLKYKIETLTPNDIPDIVDKGIAKIIDKKLKEHN

SEQ ID NO: 6506 - protein, 1111 aa, unidentified
  REGION 1..1111: note = Description of Unknown: Cas Enzyme sequence
MMKKLLFSFDIGHASIGWAVLDTTANQPPALRGCGSVLFPTDDCLASTRRQLRRQRRHIRSTRMRIARMKRLLAHLGVLSPAQLDEPGGPWPWKLAARVHAGGPLLSWRELWDVLRWYAHNRGYDGNRKWSRDEEEDTDDTEKVKNARSLLDKFGKATMCETICAKLKIDPLSDDKKTSPIAYKTSNAAFPRDVVRDEVIALLKKHAGTLPKLDAAFITALCAEDNTPKDGKSVRDVLKDLGFEAHLPGRFVGGLLFGQAVPRFDNRIIGECPVSGEKRPLKDCREYLEFRWAEILANLTVRHTKDGDKVPLTAEQRKALTDIARKEGGFTAAEFKKAVLEVSKAEASNVELMMTHPDAADALVLDPALRFTKTNGMMKAVWDDLPVILQKRVLGRWNKRRRVSWAWLLQQPEAPKDLEAKLQAAWKEGKRKPRKGEEEAKWEDRVKQSLSPVFPSGRAPYGREVMKRVVEQVMEARMHPRENGGVLDAEVIKKHDLAKEIDDLTNNHLVRHRLKILLRLVDDMVKTYAEGDPKQVDKCVIEVARDLMEFSGKTNKEVAAELGIKLKNFKDVSKKLTDDLEGTSIPINAGLIRKARIADDLAWTCPYTGKEYDAATLARGKVDKDHIIPRSLRPSDSLDSLVVTFDAVNKWKANRTAWKFVEEEQGKSVPGRPDLTIVTLRQYEAFVNKLAGEKKPNRFSKGQGSLDDKLRQWSRKQKMLLKDYEEKEFTPRDLTVTSHLVRLSARQLEKRLAHLQNTDRIVSLPGSVTGAVRKSWDCLGCLAPACPEVMQMRPTIGPDRQLVLDADGKPSLSLQVRPKGEIRDITHLHHALDACVIAFAAHFLPKDGKLWEQIVTKKVLKHDEAAFRERYQWHGLLKLAEPKDERDQARARKLEVLDLPDTFKKQIVEALKERRVVQHVPADMSGARLEMNTWRVLKTEGDQVMLRQRTFGPKDIDPETGARKRTTKDAKERASKLVGLKPGKLADLKGALVIGENYGVALQPEPTMIAFHQVKKQLEELRAKNGGRPVQVLRNGMLIRVPEGNYQGVWRVRSCKDKSRDGLVLALTHADRCRSDVSGVDWCKDTVALKTLLKANMIIIESEYCGVASQV

SEQ ID NO: 6507 - protein, 1434 aa, unidentified
  REGION 1..1434: note = Description of Unknown: Cas Enzyme sequence
MDKFFGLDLGTNSIGWALRNVNQTNNQIEKFGVLTFNKGVGLGKTGEYSYAAERTKKRSTRRLYQARKYRLWATLENLINEGYCPLSIDDLNKWRHYNKEEARRNNNAGRTYPVWNTVFDAWIKLDFNSDGKPDYTSPYQLRKELADTKLDFTQGVNRFKLGRALYHIAQRRGFKSSRKGADDVKEKETNDNEVMDLQYSEKKKNKIIVELFEKYKDAKTIGWLFALLENDKIRVREAIAQYAIRENYKDEIKYIFQFQGLNFEDALYIKLVETGKNKNDGSIFYKRPLRSQKGLIGKCTLEPNKYRAPISHPSFETFRAWSFLNNIKYKENNEGKQLPLELKQEIYSELFFRKSKGYFPFSEIVTFLKKKGKNWELNYKPKTTVTACPVSARLKDIFGDDYLNVKIEKAKAPKSNKAFYDIEDIWHVLFSYEDQEYVAEFAENKLKLGAEKTKQFVIAWNACPVGYGMLSLNAINKINMFLEKGLIYTEAVLLANIPEIIGKELWQQNEQLLLDSIGGVITENRNQKTILNIVNSLISKHKNIEVSERQGYKNKDYKLDESDFQDIQAAIEEQFGSNKWNGFTDEEKQRIQNTVKDCYQAYFSKQGIVRDIGSEERLVAVQSNRKNYYKTDTGYYRLPKLIDTLKEFLQDNFEHLDEKKLSKIYHPSEINIYPPAKEDKDGVLKLGSPKTGSFKNPMAMRTLHELRELMNYMIETKQINNETRIIVEVARELNDANKRWAIEAWQRQREAENQEFAEAIKLLLNDDKTIKANATNNEDIDKMRLFYEQNTEQTLPEVVVMEEDESGKKKKKKSTEKDEAVRWSGHGKKLIDKYRLWKEQGYQCLYTGKFIKLTDLFNENVIDFEHTLPRSKSFDNSLANLTVCFADYNRTIKKNQIPSQLPNYSEDSGGYTAILPRLDAWKDKVERIKQQIDFWKTKSKKAADKSWKDDAIRQRHLWQMELDYWQNKLDRFTITEITSGFKNSQKVDTQLISKYAFHYLKTYFDKVDVQKGSITAEFRKIYQLQVPDEKKDRSKHSHHAKDAAVLTLIPVAAKRDEILEKYYEAKEKNPKATFTEEPYKGFKREFVFGIDDSVLINNITNNQELTPSKRKVRKRGKEVIINGKNRWATGDTIRGQLHQETFYGAIKPAKKEGNGSLQKDENGKFIQEEAIRFVLRVPFNADFTSIDKIVDEGLKRQIQEHIKRVGNFKKAFEEGIYLLDKNGKPHGNKVRHIRVWASVSEPLKIKKQTNLSDKEYKQHYWASNGENFAYGLYQNEQKQRGFKLVSLFNVTKLKRTSNVLAEMFEQEIETQKPKAKVQLKYVLTSGLKVLFYKENLDELQDLANDVKQISNRLYVIDGFEKDGRIRFSHNLDSRSANDLKELEDVYGKAYWQGFSQVNFNNPVPKLKLSKDSLNFAFEGYDFKIEMDGTIKWLK

SEQ ID NO: 6508 - protein, 907 aa, unidentified
  REGION 1..907: note = Description of Unknown: Cas Enzyme sequence
MKSKQKKLPAVAGEKLQLAFDVGHSSIGWAVLHPTSQESTRELSISILGCGAVTYRADDCLASARRAYRRQRRHIRSTRQRIARLRVLLAELGVLTEVQLNKPGCAWPWLLSARVLAGGKLLTWPELWDVLRWYAHNRGYDGNRRWSAVEAEAQAEDSEKEANARTLMEKHNAQSMAETFCKELGLDPKGKAKASMKRFKGLNAAFPREVVEAEVRQVLKSHFGKLPKVDANFERALLGKDNNDKLAWQAIPCPGLKLPKRYQGGLLFGQLVPRFDNRIISTCPISGQKVPSRNCPEFLHFRWAMQLANVQVARFGEQKLSPLKAAERVELDKRMRAVGGMTVREFTEAVRSTTGAIRDNLDTMLMHPDAKEALLLDPVQKLIGSDDLAPFWELLPERLQKRLRGKWRHGKVFTLAQIRSQLEPLGDVSAFDVELQNQLDMRNTKAKKKDKKVTREELLQRHFPPKPIKLDGRAAFARHLLQQAYAEVLAGKHPKEEGNSLFLSEEIRKRQQEREIAEQTNNHLVRHRLLILERLVNDIIKEYASGDKELIGKATIEVNRDLREMSGKTAKEKAQELGLRIANHHAVSEKLEKAFAEEGKRTAITAGLIRKARVADDLGWKCPYTGQGYEPKHLVSRYVDKDHIVPRSQRPSDSLDSLVITFGAINKWKGNRTAWEFVEQEQGKSVPDLPNLSIMSLTRYRQFIEGLESYKGHDDDKKRKKRRKELMLLPKYVEKEFVPRDLTQTSQLVRLGAQVLRKVLPHLNQNDVVSLPGSVTGTVRKAWKVLGCLSLANPQVLDEEGNVKTKTEIRDITHLHHALDACVLGLASHFIPNNGQVWQLILKRNLNDAEKKQLTALGVFGFNKDNRFEMRDLDDRLKEQLRQRLAEKRVVQHVPARMDGLRVEQNT

SEQ ID NO: 6509 - protein, 1528 aa, unidentified
  REGION 1..1528: note = Description of Unknown: Cas Enzyme sequence
MQKKILGLDLGTNSIGWALIEQDFENKDGKILGMGSRIIPMGTDKQDYEKGIGVTRNAERRAKRTSRKMSKRYKLRRNKLLYVLHELGMLPTQFQFMNGIPEANKIQELELLPITKGSLQLTSIEHYQIKAKALDNIISLENLGKILYHFNQLRGYAGGGNDDEKGKGKKEENEDGEEPDVKTYEVITRKVEIKEVKKSDSTFKVRGGVGKGKELNKFKLIVLLDEVETEGETELQNLEGKIGQEEELEIRIRRNKKTKQITSVFFTLPAKSNWRKQMEATEKILNEYNLFVSQLFLHDLEKNKWAKIRNRVILRHRYQQEFDKIWETQSAKYEFLNNCPKEKIEKIANYIFPGKSESQEKLRKEAINGGLKYIIRDQIIYYQRPLKPQTELISKCQFETNEQVIANTHPLFQEFRCWDQINRMYITSKEEVWNEKKKKNVYQYTDRFLTNKQKQELYNRLQTQKSIGFSEVAKLVKLKSDKTEYLNGLNVKAKLKGCDTVLTLKNLLGVHYDTLYNQDNNILVNLWRVIFDNANNGSEYDPKSIKVSSIIEVLKPINNKELEAELALKFAQNVRFPRKYSSLSEKAIKNFLPLMQLDPKKLPDKVVENFKKIQQLIETGEILDANLLEDYIISFVQHNPEVLMEGGLMYAFASSLVYGRHTAEKIKPQIKNYHDIKYVERNLRNPVVSQLVNETMQVIKALWKEYKFNPAELEIRIELARDLKNSAAEREKIYKGQIRGENNNKAAKERLKEEGVTITERNVLKYRLYEQQKFMSPYTQHKIIPFTALFDDRLYDIDHIIPKSRYFDNSMSNLVVCETNINEEKSNRTAWEYISQQSSKFGTLSIENYIQHINENFFGKKKKNLLLEKIPTDFVERQKKDTQYISIAVKTELAKVVGSDNIKTSTGEVTGFLRSRWGLRDLFMKLTQDRFKRMELWDINPETGKPNSEWVWKEFDEKKNKNVLRIKNWSKRYDHRHHAIDALVVALTQQVYIQRLNNLNKYLQDELIKRKEEFKLEIKEGETVLEAYFNLGEERRNEIQEKIESSRYFEQPFKGLIEQAATQLETMTISIKPKDKLGVQQDLTDKNTPNKELKKQLKIRAALHKETNYGKTKDPKTGLIKDTKTVEISSLKSKDIALIIDEVLGEEIKNHKEKLYKDKTMKEAFTGEGLIAFNENRFQKKHPDKLKPPVFKLKLWYSSKETEESTLQRLYDDNDKLSVVTGDNYLFIVMEKEGKKGKERIFDIASLYDSVGIAAEELKNQNENFKQIICEGYRVSYGERNRIKGKVQDNPDRVLFSLQQGDIVYLPENEDDLIINFSNEQLKEWLSKPENKIPFNKRLYKVVKFDKSMAVHFIPVNYSNPISIPKDLTKEDLIELKNKYGDKKIPKSELNYVEFGSYRDCSPYPVGESFIKNLTTKIKKDKQDLKKIQDTCIKLQVDWLGNISKAGNSKVISTNSANTVSEPEASYQKKSWTVKNFNSFEAMELDRLAYFAALSPIERLRALTELTLKAFGFGHESDMNTLERKIKF

SEQ ID NO: 6510 - protein, 1621 aa, unidentified
  REGION 1..1621: note = Description of Unknown: Cas Enzyme sequence
RNNPYCELLSIVKLGIFFILAEKEYKNQNMGSKTILGLDLGTNSIGWALVKQNFEDKTGEIVGMGSRIIPMSQDIKDEFGKGNSISQTAERTRFRGIRRIRERQLLRRERLHRVLNILGFLPNHYQSNIDFKANFGKFLPGKEPKLAYNGKTFIFKSSFEEMLQDFKVNQPALIDKGKLVPQDWTIYYLRKKALTEKIEKEELAWILLNFNQKRGYYQLRGEEEDESPSKLIEFHSLKIVDVQADEPLKGKSEIWYSLILENGWVYRRSSKLPLFDWKDKVRDFIVTTDLNEDGSIKTDKEGVEKRSFRAPSENDWTLQKKKTEQDISASHKTVGAYVYDTLLQQPNQKIKGKLVRTIERKFYKSELREILKSQIRFHPELQDSDLYMDCIKDLYRNNEAQQISLSEKGIGHLLIDDIIFYQRPLRSQKSSISNCPLEFRKYYEDNVEKTAFIKVIPKSHPLYQEFRLWQWIYNLQIYQTEVAEVNVTSEFINSVGAYEDLFAFLNDRKEIEQKPLIKYFLEKRGLKGKALNEEAEKYRWNFVQDKKYPCNETAAQIFNRLNIIEGFDMNKFPAKQLESLWHIIYSVTDKIEYEKALHTFARNHGMDEEAFVENFKRFPPFKSEYGSVSEKAIKRLLPLLRIGKYWSWDAIDLNTRVRIANIINGEFDAAIKDRVREKAIHLTEESHFQGLQLWLASYVVYGRHSEVATTEKWNSAADLRVFLKEFKQHSLRNPIVEQIVTETLRVVNDIWENYGKGNQNFFDEIHVELGREMKNTADERKKITQQVSANESTNLRIKALLAELLDDGNVENVRPYSPIQQEALKIYEDGVLNSSIEIPEDILKISKTAQPSGTELRRYKLWLEQRYCSPYTGQIIPLNRLFTTDYEIEHIIPQSRYFDDSFNNKVICETAINKLKDKQLSFEFIKNHGGSIVETGFGKSVKVLGEDAYKEFVKVHYSKNNSKRNKLLLEEIPDKMIERQLNDTRYISKYISRILSNIVRAETNDDGVNSKNVLPGNGTITSILKQDWGLNDVWNELILPRFERMNQLTESTAFTSWNENHQKYLPTVPIEFSKGFQKKRIDHRHHAMDALVIACATRDHINLLNNQYAKSKVRYDLNRKLRNYKKVEYNDSISGERVTKEIASDFIKPWKTFTEDVMNRLSSTIVSFKKNVRVINKTSNLYEKWVDVDGKKVKQKVRQTVGDNWAIRKPLHKDTVYGRVRLQCIKNVAFNNALDNISEIVNKDLRKYLLSLVEKGYDKKKISKHFKETNNEWNGESITRVDIFYWDDENVASRVSLDTSFNEKKIASITDTGIQKILLAHLENYRGIIDEKGKEIAPELAAFTPEGIDEMNKNIIALNGGRNHQPIRKVRTYEPKGNKFNVGYTGNKQDKYVEAAKGTNLFFAVYATTEGKRNYATIPLNEVIERKKQGLSPVPYENADGDTLLFHLSPNDLVYIPTDEELAHGTVFDLTQPDDLQVKRIYKMVSCTGNECLFVKHDVASAIVNKVEFSTLNKMGRDLEGNMIKDRCVKILVDKLGKITWNSLGYEADKHDYTSTIAEPETQYNLGAMQTYDSHAASNEADAQEMAQLSENQHLENTNELMRTIYKDEIEKPMDKNLNFD

SEQ ID NO: 6511 - protein, 1034 aa, unidentified
  REGION 1..1034: note = Description of Unknown: Cas Enzyme sequence
MKKLSFSFDIGHASIGWAVLDISQDQTPAIKGCGSVLFPTDDCLASTRRQLRRQRRHIRSTRMRIARMKRLLAQLGVLTPAQLDEPGGPWPWKLASRVHAGGPLLSWRELWDVLRWYAHNRGYDGNRKWSRDEEENTDDTEKVKNARFLLDKFGKATMCETICAKLKIDPRSDDRQTSPIAYKTSNAAFPRDVVRDEVMALLEKHAGKLPKLDAALITALCAEDNTPKDGKTVRDVLKALGFDAHLPGRFVGGLLFGQAVPRFDNRIIGECPVSGEKRPLKDCREYLEYRWAEILANLTVRRSKEGDKVPLTAEERKALTDIARREGGFTAGEFKKAVLEVSEAEASNVELMMTHPDAADALVLDPALRFTKTNGMMKAVWDDLPVILQKRVLGRWNKRRRVSWAWLLQQPEAPKNLEAKLQAAWKETKRKPRKGEEEAKWEDRVKQSISPTYPSGRAPYGREVMKRVVEQVMEARLHPRENGGVLDAELIKKHDLGKEIDELTNNHLVRHRLKILLRLVDDMVKTYAEGDATQVDKCVIEVARDLVEFSGKTNKEVAAELGIKLKNFKDVSKKLVERLEGTSIPINAGLIRKARIADDLDWKCPYTGHEFDPFTLARGKVDKDHIIPRSIRPSDSLDSLVVTFAEVNKWKANRTARQFIEEEQGKPVPGKPELTIFTVKQYEAFVNKLAGEKKPSRFTPGQGSLDDKLRQWSRKQKMLLKDYEEKEFTPRDLTVTSHLVRLSARQIEKRFEHLRETGRVVSLPGSVTGVVRKAWDCLGCLAPACPEVIQMRPTIGPDRQLVLDADGKPSLSLQVRPKGEIRDITHLHHALDACVIAFAAHFLPKDGKLWEQIVTRKVLKHDEAAFRERYQWHGLLKLTEPKDERDKARARKLEVLDLPDIFKKQIVDALKERRVVQHVPADMSGARLEMNTWRVMRTEGDQVMLRQRTFGPKDIDPETGARKRTTKDAKERASKLVGLKEGKLSALKGALVIGENYGVALEPELTVIAFHQVKKQLEELRQKNGGKPITLLRK

SEQ ID NO: 6512 - protein, 1282 aa, unidentified
  REGION 1..1282: note = Description of Unknown: Cas Enzyme sequence
MEKTILGLDLGTNSIGWALVKINSEGNPLQILGMGSRIIPLSADDRDEFLKGNSISKNQNRTLARTQRKGYDRRQLRKKQLNQLLNKFGIEPSDDLLHLPPTELWQLRSDASSDNKNISAKQLGRILIHINQKRGYKSARSDANMDKKDTDYVAEVKSRHVQLKEQGKTIGNYIANELNHAQNHNLYFRKKDKVFPREAYLEEFEKIMNVQKTRHAFLTDEVIDQLKREIIFYQRPLKSQKGLVSICEFEGIEKEIIKNDKSKTLQVGPKVAPRSSPLSQLCKIWESTNNIVLKIKNPEGSKYKWSDFEPTLEQKEQIAAYLFNHESISFVELLKILDLKKEDVYVNKQILRGIQGNTTKAELQKFLDDTDPLLTFDVQMVPYAKQAYLFDQKTGEILEEQDAYIIDSNIEMQPLYKLWHTIYSIKDSEECKNALMKNFHLNEEIAGNLSKIDFNKQGYSNKSHKAMRKILPYLMQGYNYADASSLGGYNHSNSLTQYQNEQRQLKDKLALIPKNGLRQPVVEKILNQMIHVVNSIIDTYGKPSEIRVELARELKQSKDERNDADKQNSVNKKLHDEIAKRLTELGLPATKKYIQKYKYIFPVREKKYSEAQVNTQCIYCGERFNLAEALGGDNFDIDHIVPKALLFDDSQLNKVLVHRHCNKNKTNTTAYDYIASKGDAELDKYLQRVDEWYSKNILSYGKMLRLKVSHKEYIERKKQKKETESDKRLWENFIDRNLRETAYISRKARSLLQEICKDVHSTEGGVTAKLRDLWGWDDVLMNLQLPKYRELGQTEWKEWTSDHGKNTHKKEIVKNWDKRDDHRHHAIDALVVACTKQGFIQRINTLNADDTKDEMRKAVELAKNEMGDAFDENILNEKSTIVKGRKDRLSELDKYLISQRPAKFTTNYVMQEADKILVSFKAGKKAATISKFKAKGKNKEQGVITPRGALHEQFVYGKIKRIEKNKPIKFIFENSDQIVDSRIRELVKLRLGTFENDSKKAIASLKKDPIYLDEAKTKPLEKAHCFKDEFVIKYKIQDLKEKDIPFIIDPAIKEKIQKRLKECNGNVKEAFKTAVWHNEEKQIPIRTVRCFTGLSSVEPVNKDEHGKDIGFVKPGSNHHVAIYRDADGNLVQHTCTFWHAVERKKYGIPYIIQDTKQLWEEILTKDFPQAFLSKLPADNLTLVHSMQQNEMFVLGMNQEDFEKALDEKNYGLVSRHLYLVWSIADGDYWFRHHLETKNSELKKIEGAKESRRFQRLSSKGFLEMFPIKVKVNHLGGFCETRK

SEQ ID NO: 6513 - protein, 1733 aa, unidentified
  REGION 1..1733: note = Description of Unknown: Cas Enzyme sequence
MANRKILGLDIGTTSIGWAIVEATGTKVANEKTGVTAVSDINNERIGIHKNAIGVRIIPQNSDNETSFNAGKKLNTGKTSTPSAERRKARGSRRMKSRYKLRRGKLCAILKMLNLLPDGSYKQILNKNGKLIWKPIDNENTKWFTKIREFEKDRNSKKRRKKRESDIGESLYKLRNDAIDNPIDLQKWGRILLHLNQWRGYSSDRFKASEKEETQAGITASVNKIENGEEYILVQNQRNKTKEVAYNTFIIHFDNGDNAIEIRSKENTESDYKIDELYTYTFKNEDEINGYKQINKKKIDINSWAYRKKELNTDLKTWCQSGGTVGSYFFTKYYVDHTIDRIRNNVVDRDWYEDEFDKIWDFQFENHKSHFEDLNIEDVVKAAFKDFKPILNDVQKRNGIKEQLRYLIKEKIIYFQRPWQQAKNKGECPFEFVPDVKKEKDGSFTPNTKGKKVIDKTGKEIFVKGRTVIPRSHPLFQEYKIWQQINNVRLFFNTVDERIDLFSNEETFKQYTGKTIEEVKQLLFEVLQKSKTLSWRVFVKDVLGIKMLFDELENKQGKRIKKGIDTETGEVAITYFSVNFRKKKKDGTYDDIKLKGNTTKATLQNILSNKSESWFHQTHSDKQAISNLQLLWEIIYDITNSKTEDVARIIKKHFSDFDETVCNQLAVIKFDDTGMGNLSAKAIRQLLPLMSNGNNLTEKTKRKIQSLLELNNSEKAKDDDDKLESIKSFVSDKNSRLRLSKFSNTKDFKYLNYWEAAAVVYGSHSSKKTIAQPEIQKVKQHSMNNPVVEKIVNETISIINEIQKTYGFDEVRIELSRELQANMDERQQIWEATQAGYEKNEWAKKMLREIKAALKASNRSTDNIDDENSTKSNLDKMRILEDVVKYQQREEYKKKEKEYKLDEPSKAEITKYLLWLEQNFKCPYTDQPIPLTDIFARGKVVEIEHILPKERYYSNAYSNKVITWREVNQTKANNGNRTAYEFIVSKRVEDSVKIGNKDYPLVAAEQWQTHIEQMFPKGAKRNNLLRKEIPEDPIERTLKETQYINKKLKEKLAELVGESKVWVTSGAVTDILREKWHLNDVMKELLRERFEKFNVGESKERLNLVHWTKEYNNKTGQYEDVEKFTGYSKRVDHRHHALDALVIACTKQNHIQYINNLNKINTADQEDEDAKKEKYKALKDEICIGNSSTKFKTPWNKNAFVADVKNALNEIIVSHKNTRLLISPSKHRVNKEINSGKVASIRGELHKETNYAKRNYFEGGRMDISKLIPLLFKKKQKNQYQTMTHFKTFEEIIRETVLKEKYQNVLIPLFLQYNDNKLNDNLINEYSKTVLKKIDDENLLIDTKTQKPLQWLSTYIYNTKKYLEVNASARPKGLSMDLNSVDEIKKIADPRIKRLAEYRLNYVSREISAIDKKDLDKKEKDKLKAEVKSLKLYSNAIYEIRLKRNDYEERIKNNLYPFEWKEIKDITFADVEKISYPKSEITSFVKQKLANLDELKKTYFEKPVFLSEKPIEIKKVRQKSYFKNLYEITTKRYVQIEETFMTYFFQEQNSKKRKPAFLKFVDAVAIVNNEKPLSIDYKMLIENEKTNEEEQSNVKYDLIFTLAGNDLVYLPDEELSEERIKEIDWADFKAIQPYLYIVKDMNPSQDKVFFQQFYKADSINISSDDAKSLFDMESKNGLSEKIKYGTVDMLQRCIKVFTDKLGKKIVPYWEFPNGCWNVEKAKELGLVQKRDYK

SEQ ID NO: 6514 - protein, 1114 aa, unidentified
  REGION 1..1114: note = Description of Unknown: Cas Enzyme sequence
MKSSASSAKPDLELAFDVGHSSIGWAVLNNNGPNLLGCGAVIFPADDCLASQRRTFRRQRRHIRATRLRIARIKRLLAHLGVLTDKQFDTVVSSSPWLLAARVLRGGQKLTWAELWDVLRWYAHNRGYDGNKSWSRTGQTLDQLDEAELEKLSNDAALSEDEKKDAKYLKEAKSLMGKHGTQSMCETWCSVCKLDPLGKVKSCNLPGDERPRGLKAAFPRRVVEREVERILRAQGVEEKVIVAIMRDHTAVAGPDYRLPARYGQRVNGARTPGGLLFGQLVPRFENRIIATCPVQFQREYERVFATTGDAKKATHEAEKLAKVPGIGCVEFHRFRWAMQLANVTIATGDTRKTRRLSKEERLAVNAEMERLGALTPKQFSDLVRAQTKTDKDNLDRLLALPDADKSLVLDPARKLAMSGVLGVLWPHLGESLQRHTLTNLRRGKSVTARTLLDKCPAAQAAFDHWWDGEAMKTPRPTKKNPTPKARTRDQVLNEPHSLGSMNGRAAHSREVMNDVWKFVLSSDGHPMDPGAPLFRSEAIRRAQLKRAIDEQTNNHLVRHRLRILVGETDEEAARHPNQPRLNGLFRDLITEYAGGDKTRVDRITIEVNRNLKELSGKSVQEQAKTQGQMLANFKSVEKKLKEQLGSRFPKSGAGSLLRKARVLDDLKMECPYTGHIFEFKHLLEPGRVSLDHVVPFTERNTNAMDALVATFTSVNEMKDKRTALQFIEEFGGQPVNAMPGVMIRSKAAYLAFVNALPPKYDPRKSSYYKEMRIPIGDDLRKWRRKEKLLLRDYVEKEFTPGDLTKTSQLVRLGAEALQRAYLNEKTKPTIISLPGSVTGAVRKSWNLAGCLEAANKNVMNAEDLDDNGKPRVHRKTELRGITHLHHALDACTLAFTSHLLPCDGGVWKREVVELLSKRRCNPGEQSLLRQLLRWNVSFTKEGQPVLGEITNELREQLRARLAERRVVQHLPASMSDMMSDQTVWRLFDPTDMHPNAKRLARWLAEAKVEVPAPEAKTALIITRKSKSAPKAGEEAKAKKGKFHEGKTWEWYYAEAAKDALLGFAPTGDPMKAKLKPFKAVKVLGDNFGIAIDPQSKLTPIRPLHVWRQLTELKA

SEQ ID NO: 6515 - protein, 1099 aa, unidentified
  REGION 1..1099: note = Description of Unknown: Cas Enzyme sequence
MNSSASSAKRDLELAFDVGHSSIGWAVLHSVGQASVRAETPRVNLLGCGVVTFGADDCLASKRRDYRRQRRHARSTRQRIAQMEKLLANLKVLSAEQLKQKHQQAGGCSVPWLLAARVLTSDGDAEHLLGWPELWDVLRWYAHNRGYDGNRRWSAQEAEAQADDTEKEKNANALMAQHGTHTMAETFCKVLGLDPLGDKQSSAANFKRLNAAFPRPIVEKEVRRLLELHQKKLPAITDEFLKSLFEDWRAAGVPDLKLPARYQGGLLFGQLVPRFDNRIISTCPITGEKVPSKNCPEFLKFRWAMTLANIRVAAVKEKELRTLTADERKRINTAMAEAGALTPTELKKVVRETTSCARDNLDTMLMHPDAKDALLLDPIQKLVKGDKLKTLWPAFSPRVQKRVRDLWQRGKLVTLERISDIARKLGEPLTDFEAALNKLADAANTKRPKKAGSFNREDLLKEPLAIKKLDGRAAYARPLLARAYAEVMAGKHPKEEGGCLFITEEMRQAQLRRQIDQQTNNHLVRHRLLILERLLKDLITDPAFGNGDKSRIAKATIEVNRDLREMSGKSAKEIQQDLGRRLANHHGVAAKLEKELDGKTYNGQPIQITAGLIRKARIAEDLGWACPYTGKGFDALDLVSRQVDKDHIIPRSLRPSDSLDSLVVTFSEVNRMKGQRTALQFVNDEQGKVVEGSPQLSIVSHARFKQWVESLEAYKGHDDDKRRKKKRKELLLLPSYEEKGFTPRDLTVTSQLVRLGAQIIKKTFSGVEKQPVVVSLPGAVTGTVRKGWNLLGCLALATPQVKEADGSIKNKTGIRNLTHLHHALDACVLGLASHYLPNNGGLWEVMIKRNPNDAEKALLRATGFFDFDKQGRFGLTELPDTLKEQIRQRLAEKRVVQHIPADMSGMRVEENTRGITAIKDGRIFLRQQSRDAKTGKLSVKETEENTAKVVGLKPGKLTPQKGVRVITDNFGVAILDHAAEGQETFVIIPWHKVWPRLQELKARNSGKLPRLLRIGTLIRVPKKAGRSDYRGLWMVRGVQLNQKAGFLVDLSSPDVIQYRVSGRDDCAQNIRLQSLYEGGLEILKTPLTGVISPRSKPAE

SEQ ID NO: 6516 - protein, 1137 aa, unidentified
  REGION 1..1137: note = Description of Unknown: Cas Enzyme sequence
MKTILGLDLGTNSIGWALINEAENSTEKSSIIKLGVRVNPLTIDEIKNFEKGKSITTNADRTLKRSMRRSLQRYKLRRQNLMDLLIEKGIIFENSCLTENINKTTFETYRLRAKAVNEKISLEEFGRVLLMLNKKRGYKSSRKVKLNEEGQIIDGMQIAKKLYEEDLTPGQYIFGLIKSGVKKIPDFYRSDLEMEFEKIWNYQKAFYIDFLTDEIKQEIKGKSRKIVSAILWNRFKVSTVEIKGDRNQKKYLTFQLRNDAIKQKITLEECALVLAEVNNDINNYSGYLGAISDRSKELYFMNLTIGQYLLNKLNQSPNFSLKNIIFYRQDYLDEFERIWTKQSEFFPQLNLELKKEIRDIIIFYQRRLKSQKGLVNYCEFENQTIVKLIDGKPKTIRIGAKVSPKSSPIFQEFKIWQVLNNIEVKNKKTHSVRLLEINEKNRIFNQLKLNEKLSKEQVLRMLFDSPQEFDLNFNFIDGNKTFVEIFKSFEKIVETSGHGEYDFSVMDFEDVLNLLNSVFYTLNIDCEILDFSADVENPEKQKFYKLWHLLYSYEGDNSISGNDKLEIKLKELYGIEKEFATYISNVTFKDDYSNLSSKAMKKIIPFLKSGNRYDTACIYAGYNHSKKSLTKQEIECKVLKNKLSILPKNSLRNPVVEKILNQMVNLINSIIDEYGKPHEIRIELARELKKNAKEREELTKNIGKLTDMNETIRKKLQNEFGLRYVSKNDIIRYKLYEELSFNGYHTLYSNTYVPQEKLFSKEFDIEHIIPQSRLFDDSFSNKTLELRSINIEKGNETAFDYIDKKYGEEGVEKYNKIIFDLLKNERISKSKYYKLKMKGESIPDDFIERDIKDTQYIAKVAKNLLEDLVKEVVSTSGGVTDRLRQDWGLIDIMKELNWDKFNKLGLTEIIENKEGVRIYRIKDWTKRNDHRHHAMDALTVAFTKRSHIQYLNNLNAKSDKSSSIYGIESKELERDEKGKMKFKPPIPINEFRADAKHHLENILVSIKAKNKVVTKNTNTTKRLNGTNKKIQLTPRGQLHNETIYGSRLEYVTKFETINGSFDEAKLCKVATKKYREALIQRLNEFKGDPKLAFTGQNSISKNPVFIDYSKQVKVPDKVKIVELENTYTIKKEVNKDL

SEQ ID NO: 6517 - protein, 1021 aa, unidentified
  REGION 1..1021: note = Description of Unknown: Cas Enzyme sequence
MPQKMRYRLALDLGSTSLGWAMLRLGPDNTPVAVIKAGVRIFSDGRNPKDGSSLAVTRRAARAMRRRRDRLLKRKARMMRTLVEHGFFPPDEKARKALELLNPYALRAKGLDEALKPEEFARALFHINQRRGFKSNRKTDKKDNDSGALKSAIKRLHAALDPSGAEGKPRTVGEYLYRRDHAGQTVRARFRQQRIEKEDGKTRIDKSYDLYIDRAMIEAEFDALWSKQTALNPQQYNEKARADLKDCLLHQRPLKPVKPGRCTLLPEEERAPLALPSQQRFRIFQEVNNLRVLREGLKEEALSMEQRDRLVDALERNGKRSFTQIKALLGLGGVVQFNFEDPKRQELKGNTTSAILSKNDNFGPSWFAFPEARQDAIVTQLVTEENETALIHWLQEHTGVDEAHAEAIANATLPEGYGSLSAKALARILPELRRDVVTYDKAVQAAGFDHHSNISHAATGEILPTLPYYGEYLQRHVGFGTGNTDDSPEKRYGKIANPTVHIGLNQVRVVVNALLKRYGHPSEVIIEVARDLKQSPDQRKEDQERQAKNQKRNERLRADAARILGVAPERVRHADIQKMILWEELSFDPADRRCPYSGVQIGAELVLSDQVEIEHILPFSQTLDDSLNNKTVAMRQANRIKGNRTPWEARADFAAQGWAYEGLLNRAEQMPRNKRYRFSEDGYQRWLKEDKDFLARALNDTRHLSRVAREYLSLICPQATRVIPGQMTAMLRAKFGLNDILGLDGEKNRNDHRHHAVDACVIAVTDQGMLQRFAQASASARERQLNRLVDDMPLPWPSYREHVARAVNHIWVSHKPDHGHEGAMHNDTAYALLGNGMVSVRKVTEGIRQREISSLKVIELGDGKAIERHGMLPDGSPRPYKGYKGDSNYCIEIVRSEKGKWEGEIVSTFDAYQIVRKYGPNRLSHPTLGVRGKPLVMRLIIGDYLRAFFRGEPRLLTIKKIKSNGGIFVAEHRESNVRSREDAKDETLVYGSFTPGSLCKASGRKVTVSPIGELADPGFKD

SEQ ID NO: 6518 - protein, 1311 aa, unidentified
  REGION 1..1311: note = Description of Unknown: Cas Enzyme sequence
FVFQNLFMGKKVIPDFYRSDLQNEFDTVWKYQQQFYPEILTSDFYSDLQGKGQKATSAMFWTKYQFNTADIKEIEDNLKNVHTIKFSKNDQKKLQAYKWRNDAVTRQLEKEQVAHVLTEINNNLYNSSGYLGAISDRSKELYFKQETVGQNQYNQLLKNIHTPLKNQVFYRQDYLDEFEKIWTTQAKYHPQLTEKLKEEIRDIVIFYQRKLKSQKGLISFCEFESREVEVLTDSTIKKKTIGMRVAPKSSPLFQEFKIWQNLHNVLIKKAGSKKHSVKKDNQATLFDEEKEIFELNLSAKVQIFDELNIKGNLRANQIIEILGYKPKDWEMNYTQLEGNRTNQALYNAYLRILEIEGYNEDLLKLSGKDEININELKTPASEIKDMVKAIFEVLEINTAILDFDAELDGKDFEKQASYQLWHLLYSAEDDNKKYSEEDILLYGNDSIGLKKQLCSKFGFKPEHAKILANVTFQDDYGSLSTKAMRMIYPFIKENKYSEACDLAGYRHSKHSLTKEEIESRELKPKLELLQKNSLRNPVVEKILNQMVNVVNTLIDKENDKLEAEGNARNFHFDEIRIELARELKKNAKEREEMTSNINKTKIEHEKIVKLLQSEFGLPNPTRNDIIRYKLYEELKSNAYKDIYTNTYIPRGILFSKDIDVEHIIPQSRLFDDSFSNKTVVYRKDNLEKGNQTAIEYIESKYGESGLTAYQQRIESLHRLWNKNNPENGISKAKYQKLQKRSSEIGEGFIERDLRDSQYIAKKAKEMLFGITRAVVSTSGQITDRLREDWDLVNIMKELNLPKYRALGLTEMEERKYGQQVEVIKDWTKRNDHRHHAMDALTIAFTKRSYIQYLNNLNARRNEKSDDSISNARGRTAMETSNLKLSTRDVLGIEEKETNIKIDDNGDKKRVFKEPILNFRQVARKHLESIIVSHKAKNKVVTKNKNNISGKATPQTVLTPRGQLHKETVYGRYQYYQQKEEKVSAKFDTSTIAKVSNPHFKKLLLLRLEENGNDPKKAFAGKNTLDKNPIYLNDEKTKTLPEKVKLVWLKEDFSIRKDVAPDNFKDEKSIEKILDIGIKRKILLRLKDFGGDAKKAFADLDKNPIWFNKEKGIAIKRVTISGVKNAEALHHKKDHFGNVVLDGNGNTIPVDYVSTGNNHHVAVYRDEKGNLQENVVSFYEAVARVNMGLPIIDKTYKESEGWQFLFTMKQNELFVFPNEKTGFNPAGIDLLDPKNKKLISPNLFRVQTISVVKYGNNIVRDFKFRHHIETTVNDEKILQGIAYQQIKSLDPLKNIIKVRTNHIGDVIGVGEY

SEQ ID NO: 6519 - protein, 1270 aa, unidentified
  REGION 1..1270: note = Description of Unknown: Cas Enzyme sequence
MFLKNVYMGKHILGLDLGTSSIGWAYVKEDETKENSSIQQIGVRVNPLTVDEQTNFEKGKSITTNADRTLKRGARRNLDRYQLRRANLKEILLNHQLISENTSLNEDGKNTTFSTWETRAKAASEKISLEEFARVLFAINKKRGYKSSRKAKNEDEGQAIDGMAIAKQLYEEGNTPGQLVFKRLYDGKKNIPDFYRSDLQAEFDKVWNFQKQFHPEILTDEFYKDLQGKGQRATSALFWTKHQFNTADIKEMEDKLKTEKTIKLNARDQKKLQAYKWRSDAISMALEKEQMAYVLTEINNQLNNSSGYLGAISDRSKELYFHKETVGQNQYKQLLKNRHQSLRNQVFYRQDYLDEFEQIWETQAKFHPQLTPELKEEIRDVVIFYQRKLKSQKGLISFCELESKEVFIDGKKKTIGSRVAPKSSPLFQEFKIWQNLHNVLIKKKGSKKRTVKKSNQAELFETEQEIFELNQDAKQALFTELNLKGNLTAPKAIEVLGYKSKDWEMNYTQLEGNRTNQALYNAFLKILDLEGYDVKELLKVKSDKDEVELNDLNVDASAIKDMVKSIFEVLEINTQILDFDAELDGKGFENQAAYQLWHLLYSAEDDSKNSSDEEKFIYGNDNIGLKTQLCKKFGFKPEHAKILVNVVFQDDYGSLSTKAMRKIYPFIKENKYSEACELAGFRHSKHSLTKEELDNRVLKERLDILAKNSLRNPVVEKILNQMVNVVNTLIDKENDRLEKDGKPRDFHFDEIRIELARELKKTAGEREEMTKNINAAKIKHEKIYKILQTEFWLANPTRNDIIRYKLYEELKNNGFKDLYTDTYIPREILFSKQIDIEHIIPQSRLFDDSFSNKTVVYRKDNLEKGNMTAADYIRSIKGDDAFVAFEKRVEILFEAGKKNSEEGISKAKYKKLLMSESEIGEGFIERDLRDSQYIAKKAKEMLFAITKSVVSTSGQITDRLREDWDLVNIMKELNLPKYRALGLTEMEERKFGQKVEVIKDWTKRNDHRHHAMDALTIAFTKRSFIQYLNNLNARRKDQYSDSISNTAENIAIDTSSLKLSTRDVMGIEVNETEIRIDDNGNKKRVFKLPIPNFRQAAKEHLESVIVSHKAKNKVVTKNKNKIRGASKSQIVLTPRGQLHKETVYGKYHFYENKLEKIGSKFTPEFTQQVSNPLYKKLLLERLAEHDNDPKKAFGGKNILSKNPIYLNAEKTEVLPETIKTSWLTPDFSIRKDINPDNFKDEKSIDKVLDEGIKRILKSRLKEYGDAKKFR

SEQ ID NO: 6520 - protein, 912 aa, unidentified
  REGION 1..912: note = Description of Unknown: Cas Enzyme sequence
EAGANAADETSKMKKAMEATREGLARYHSFGDMIANDPKFTDRKRNRDKDYSHTAKRSDLEDEVRAIARAQARFGTKVADTEFFKLFAETAFSQRPLQDSEDKVGECPFEVGHKRAARRAPSFELFRFLQRLAHLRISIGRIERPLTSEEIALAAQGFGESAKTISFASLRKTLDLDPNARFAGVPKEKEGKLDVASRTGGAAYGTKTLRDVLGEAPWQSLIRTPDKLDQIAAVLSFREDIKSIERGLSEIGLDAQIVECLRDAAEQGAFKDFTKAAHISALACRNIIPGLREGLVYSEACARVGYDHSARPSTSLEQIGSPVTRKAFSEAIKQVRAVEREYGPIDFVHIELARSVGKSAEQRAELTKGLEERTAEKERRRKEAADLLGRAVTDDELLRYELAHEQGFKCIYSGDAIDPAGISANDTRYQVDHILPWSRFGDDSFLNKTLCTTKANQDKRGRTPFEWFSADKVEADWLEYTSRVEGLSSVKGRKKRNYSIKDAGTIEDKFKARNLTDTQWATRLLADELKRIFPSRAGEHIVVAGALGGDELKEERRVFARPGAITSKLRRAWGLEGRKKEDGKRIEDDRHHAVDALVLAATTESLLNRLTKEVQKREREGRQDDIFHCAQPWAGFRVDVDRTVYGLEEKPGIFVSRAERRRARGKAHDATIKQIREIDGERVVFERKAVEKLTDNDLEKIPVPEPYGKVTDPGKLRNELVESLRAWIAAGKPKDNPPRSPKGDVIRKVRIQTKDKVAVEVNGGTVDRGDMARVDVFRKKNKKGAWEFYVVPIYPHQIATMESPPYLAVKGGGGAEQDWYSLGQDAEFLWSLHAMNLVELVKSDGEIIEGYFRSLDRNTGAVTVSPQVTSAVIRKGIGVKTLSGFRKFTIDRLGRKFEVSREVRTWRGEACT

SEQ ID NO: 6521 - protein, 958 aa, unidentified
  REGION 1..958: note = Description of Unknown: Cas Enzyme sequence
AGMTCIRPEAPTPERASITKRLSWHMNQRRGFRSNRKTDRKDNEKGKIAEGSKRLQALLEETHARTLGEFLWSKHRGTPRTRQATRIRVEGEGAKALYAFYPTREMVRAEFEELWTKQANFAPDRYTDALHDQLSAIIFRQRDLKPPKIGVCTFETDEKRLPKALPSVEARSIYERLAHLRLSTGPVNERPLTKPERDAIASALMSGKNLTFKAIRKALKVPSHVRINYEEAGEVGIDGAATAKFLSKSDHYGPGWLALPFGQRDQFVAKLLDEADEDRLVERLAAEDGLTDNAARRCATIPLADGYGRLGATANREVLEALIRECDDDGRVVTYAEAVRRAGERIGRPWHHSDERDGEIMDRLPYYGRILQRHILPGSGEPDEKDEAARYGRIMNPSVHIGLNQLRKVVNGLVAEFGHPDQIAVELARELKLNREQKERIDRENRTNRGLNEKRILELAKLGERDTPENRVRLRLFEEQARANDGVAQCPYTGRTIGITELFTADVEIDHILPVSLTLDDSMANRILCRREANRLKRRQTPFQAFGSSSEWPDILARVSRYAPNRRWRFKPDALERHGNQQDFLARQLNETKHLSRLAKIYLGKICNPDRIWVTPGTLTGLLRGKWGLHSILSDDNFKNRADHRHHAIDAVVIGALTLGVVQRIAHEAGRAEERDLERVFAEIPTPFDEFRDHVRDRVHAVTVSYKPEHGREGALHEDTSYGLVPEDDPDRTLGNVVFRKPLKGLTLNEVERIRDRDIRDRLTALAAPFRDASGKIGDPKGFAHMLATFALESGIRRVRILKPEANIEVISDRKTGRPYRAVTPGENHHVDIVQMRDGSWRGFAATVFEVNRPDWRPQWERQRLGGKLVMRLHKGDLVEVLDADGERRIKVVHRIEISANRIRLAAHNEGGKLQERHADADDRFRWDLATIPLLKERDCRAMRVGPTGTIRPKASNV

SEQ ID NO: 6522 - protein, 1235 aa, unidentified
  REGION 1..1235: note = Description of Unknown: Cas Enzyme sequence
LRNNPYCDLLQYKIKKLYLIFFIIHQKIIFMKNVLGLDIGTNSIGWSLVQLDPEDNKGKIWGMGSRIIPMDSDLLNNMEQGNSISKTASRRKFRGSRRLRNRYKIRRNRLIQCLKILHWLPENFKPGDRLPYLEKSLSELRSYLDSNDITEDWTVYYLRKKALYERIELEELARILLHMNQRRGFKSNRKTDAGKPELESTENVSHTKWIEIAKVDTVIETGEKFKNKNQYEIQLCDGRKGFIYRDTHPDWKDKEMEFEFRLRLSKKGETLTLSIPNKTDWVQLKEALSKDIDEKNLHVGEYYLEEIRKDRNYRIRERIVERTRLIKELECIWNHQAQYYPELNSSQFLPIISKSLYLHNEQKQKEIEGNSLLHVLMRNIIFYQRPLKSQKNSIGECACEKRSYFNSLTNKIEFTGIKVCPISKPLFQEFRIWKTINNLKIIRHELNGEIINDRDETSIFFPEKLDIIFELFDNKEKITGKEILKELGLTPKTHHLNFPDETDFVGNVTKNAIRKVLKKHNYESSNLLDNAQALEHIWHCIYSIEDDRAIYKFLKSKLKLPDEICSALSKLPPFENRYSAYSSKAIVKMLPFMRSGKYWSKDQIDAATQTKISKLIDAEFDQTISEKAREQLSHLKEITQFSGLTEYLAKFIVYGMQNVSNDSEQVDNPDQIANHIKPNSLNNPIVEQVIHETLQLVKDIWKQYDRPDEIRIELARDYKKTAPERKKIHKQNLKNKEDNERISAILRELGIGNPNSLGDIEKLKIAEENAKFNGFDHQQQAFFSKHSNPTKSEIERYRLWMDQNCISPYTGQMVQLSKLFTSEYEIEHIIPKSKYFDDSLANKVIVEAWANKEKDNRTALQYINIGTQLNGKQLLSPEQFIHHVNKTFSGKKRKHLLEESIPEGFIERQLNDTRYISKKVKEVLHQICPNVYSTIGSVTHELKNKWGLSSLLKKTNVERFKRLEQLTQEQLVFYSIGENGERYLQLKGFEKRIDHRHHALDAFVIACTRQSHIQYLNTLESDSGNKTNHFQFQKILKSSKIRDFKEPWVGFHEDVENAMDTMIISYKKRARVINKPKNKYLKYILNEEGKWVKSMMTQTESSTDNPWISIRQALHKETISGTVKLREYKNIPLKQALDQIDFICDKTIKKKLRQIAKEFDGNSKEILKYISKNPLQDSSGNLSDKVTIWYMKTYSKNRVSLDKTFDKNKIDKIAEYPTTKSGKGLKNILIEHLAQ

SEQ ID NO: 6523 - protein, 999 aa, unidentified
  REGION 1..999: note = Description of Unknown: Cas Enzyme sequence
LGSAHALAFCIRSCVSHRGYSYGGTEEGRFPWGEGTTFGRANAWLANAYVTNDMAVELEGYADGLTAKKEIEKSRERYRALIQERLAWSEEHYLMRVLREHHKGDKHDNLRVAARGYAFPQKIIWQHLLDIIERHRSLITDPDGFIEALSIDPKQCPDKASAERARQRAIFWYQRKTPFEMAEHWESKVSLCPYTHENKLNLTPAEQRCDYRREIPIRQWSMLEFASSRRVEVDAPEELPEGAPKKRSKTRLGRRLLHPLSAHAIEALTRLAVEHQQQFTAGAGKEIAASVKERAKAIVTEDIQHVYGTDARPAPGTKGKTVLWNGTFFDQLNDLAAPSPANLSSRASLCSASALRLYDIATSDGTHFDPEAIRSRLNTAGYFDWKREPKVDANPFPQVEFLLGRRIKRGKRQGEVASTVQGFLRRLFARLKAEGRIQQDAPDYCIVEVIGDAPRNLDQKAEILEAQKKRRDDRLKRFEDHDLKNDGIASKRRRITLFAQQGGKCPYTGESLGEDPLSEALEIEHIFPDSMGGLSVDDNLVLTKRTTNAAKNNRTPLDWKGAEGLRAAVAHTQSMRWGALKREVFTWGTRTSPSPDGRWPAHFNADGSLRVPDFGNTTRVSQLARQLRVEVMRWMGVFGDFNEAARRIGTPSGWLAAQARKSWLPATEYTKDRSNQTHHLIDAAVLAHIPPGVGQNHARCGGIFYNESVLVGKTLRLMTFALRELSPAARLARWLPANGEYAECPVSRVKSRSKTKPLGDSTFWKQVEKGKPTLAQRTALDPQKFKGDAHDLHAVLRRMKIPERQIPSISVIGDWLDKATAATAKEAVSTEPLRLIDGTPVRSIWKFDGKGKLDSPLGWSGYQNCHGTLTELRSLDEKNDRLELWIGWNPKAKRWEYQKRVIPAPTSLRHFQQMGYQWKAKQAGLKGKSWRQEIVGTLYPFSTRVGIFRKEDVFKLAFNADKKLTLRTDEPCWTCWYRVGAVKGDVRLELVSQVFKKDG

SEQ ID NO: 6524 - protein, 1275 aa, unidentified
  REGION 1..1275: note = Description of Unknown: Cas Enzyme sequence
LDKWSKYDKEKGLKRQYPIDAEKFEQWVRLDFNGDGTADYSSPFQLRAELMNQQFDFSNQTDRYKLGRALYHIAQRRGFKSSKGETLKEQEKNEIDYNSEIDISKELQKSEAKKSGKLKEYMGKYNLPTVGCAFAHLENNGIRVRNSDYQAVRSQYKDEIKQIFEFQNGLDTNSDFYKHLVSEKKGEGTIFYKRPLRSQKGLVGFCTMEPDKSRCPISNPEFEKFRAFCLINNIRFGEELKESLSLEQKQQLYREKFLLTRTSFKFSEIKEWIQKKIGRKLEYTKTTKTINYKDNTSVSGCPISGRLKNLLGENWETWKYESTEEKANKKTGEIRHITYTTNDLWHVCFSFDEPEYIEEFAKNKLHFDDDQTKQLVRIYGSIQQGYGMLSLKAIRNINRFLEKGLMYTDAVLLAKLPDIFKEKWNDAEANIISSIDKIISENRKQKQLYFIVNSLIANYKSLDVTDQFAYKNYYYKLVASDIKDIKTTTINVIGAKTWEKKTINEQNELLNNVADLYQKFFSSEERDYYKLPKVSDALAEFIGKEYPFISASDLKKIYHPSMIEFYAPAKLEKIEDDRYIKLLGSPVIGALKNPMALRVLHILRKQINDMLKASMIDEYTRIVIETAREFNDANMRWAIDAYQREREKENKEYEKIIKEYYNNRDINDKDIDTARLVCEQHYDSNIKVKNEKKKESDYIYKKDITKYRLWLEQGGICIYTGKIINITNLFDDNAFDIEHTIPRSISFDDSLANLTICDAHFNRTVKKNQMPTQLANYEEIKRNIQPWFEKVEKLKENVEYWKSQSKRAQTKDRKDHCIQQRHLWQMELDYWQNKVDRFTMTEVTSGFRNNQLNDTRIITKYAYHYLKTVFNKVEVQKGSATSNFRKMLGIQSLDEKKSRDKHSHHAIDATVLTLIPTAAQREKMLELFFKIQERKHLNENTETLERELETEKRRCGLSGNISKIVPFIEENILVNHVNKDQKLSPAHRRKRIRGKIVPVKDSEGNVIYETNEDGTIKKDKHGHPIPQAKEWITGDCIRGQLHGETFYGAITQGLKDENGKLLRNDDGSIKTSEEILYVVRRELKYKANDNDSGFKNWEELEKAIVDKDLFKIIKNQFKENTSLKEACASGIYMYKKNKNGEIDFSEECKVNKIRHIRCLTSIKKPLEIKEQTYMSTKPYKRKYYAEMGDLYVMCKYESNDKKEKEYHIFSLFDVSVNRKTGIEDIPTCIESKKRTKLILTQQLKRGDMLLIYKNTIEELKESGNTDMSQHLYVIR

SEQ ID NO: 6525 - protein, 921 aa, unidentified
  REGION 1..921: note = Description of Unknown: Cas Enzyme sequence
MKKILGLDLGTNSIGWAVVNVDENGMPISIERMGSRIVPLTSDDTNEFTKGNAITKNQSRTDNRTARKGYDRYQLRREKLTAELRRLKMLPDEKLIKLPVLELWELRAKAATKENQLTLPEIGRVLYHINQKRGYKHAKSDESADTKQKAYVAEVNARYAMIKERNQTIGQYFAEKLKESEIESPKGKYYTYRIKEQVFPRRAYEAEFDQIMECQKAFYPDVLTDKEIDKLRNEIIFYQRMLKSCKHLVSICDFEKREYENKEGKIVFGGPRVAPKSSPLFQICKIWEEVNNITLKNRRNDELYITLEQRKAMVDFLDAHEKLTLSDMYSILGISKQDGWWGGKAIGRGLQGNTTKIALKKALGDFENAERLLQFNLENTNSKLLDEVTGEIIQIIDSKLEKEPLYDLWHTVYSISDKEELANALKKKYNINDEDIINRLYAIDFVKPGFGNKSTRVMRRILPYLQQGLKYSDACEYAGIRHSESLTKAENQARQLLDKLPLIQKNELRQPIVEKILNQMINVVNALMSEYGQFESIRIELARELKQSKDDRNTTFLQNEALQRLNESIAKRLSSEGIKPTKRILEKYKFIFPTKGCVDKRTGKFVTKSFDNLSTVNQCIYCGKPFSLSAALNGDECEIEHVIPRDLICDNSQSNKVLSCRNCNKAKNNRTAFDYMRTQSKEAFEAYLDRVEKWFKDGIITSAKRERLLLSHEDYLERKKLGKTTDEDKKYWEEFVSRQVGETQYISRESIRILRQCCRNVYATSGSVTAILRHLWGYDEILHQLNFERYKHAGLTEFVTWESNHGKNKHSKEQIVDWSKRLDHRHHSIDALVVACTQQGFIQRINTLNAYDTKDFMRKQIESENVRFEEKKDLLDKYLISLAPFSTKTVADEVDKILVSFKAGKKSASTGKRIKYVKGKK

SEQ ID NO: 6526 - protein, 1048 aa, unidentified
  REGION 1..1048: note = Description of Unknown: Cas Enzyme sequence
IASIGWALVALDENGFPFKIIDLGSRIFDKAENPKDGSSLASLRREFRSQRRLIRRRRYRLDRAIRLFCRIGLCTEEKIKILFNTPSNKDVYQLRYEALERKLFDEEWIRVLYSLLKRRGFKSNRKNQKTEDGKLLAAIKTNSELMQTKNYKTVGEMLYKDPVFAEAKRNKGEEYKNSVSRLSIENEIKILFDMQKQFGNEFAYDDFKNDYLKIFLSQRNFDEGPGEPSPYGGNQIEKMIGFCSLEKNLHRAPKANLSFSLFSFWCKINNIRYFNATTGEEFSLSSEQSEILLLKALNKSDFSYADIRKTINLSNDCYFKEISYTQNKSKKQEKAKKEPIERNNSSSIVLNTTQNENCADNLFEIEKKYKIKFFTPYIQMKKAAKGLLDNLNPLDPEDRKTFNKIAYAFTISKNDEGIAKILQDFQISPNITDILLENMDSFSKFGHISECACEKLLPFLEKGEDYVSACKSANYMNDEQESKDLLPARSPELDDILNPVVRRSVSQLIKVINAIIRKYGKPQYINIEFARDLPKSFSDRIKIKKLQEDRHESNNKIKKEIENIYKINPKPRDILIYKLWLEQNSQSMYSGEAIEASRLFESGYVEIDHILPFSRSFDDSFNNKVLVLKKENQNKKNQTPLEYLTTLHNDQTIQNYKARIFSFYKHYPIKMRNLLTEHYTNTRDEWNSANLNDTRYISKFIHSYIKENLFPQRKGPKKVRAVNGMITSLLRGFWGIKKVREDGDLHHAVDAVIISVVTDKNINKLSEAYKRHELSGKKIHIEEPWHSFVDELIARLSDNPAEKIKELDLNSYNENELSSISKPFVSRMPRHKVSGSAHDATIRSTVLFKHGIKDSVVSKISVDKIKLENLPNNENSKSKSIELYKPETDIRLYSSLEQYLKNNSDSKEEIHKIKKDGTPGPVVKRIKVINKSSLGVLLNDGKAFANNGKMIRVDVFRITEGNDKGYYFVPIYVADTVKNMLPNKACIPNKNYESWKEMNENDFVFSLYSNDLIYVRSNTKKKLSFKKNDSSNQNVERDQVFLYFTSAD

SEQ ID NO: 6527 - protein, 926 aa, unidentified
  REGION 1..926: note = Description of Unknown: Cas Enzyme sequence
MEKSVGVDLGTNSIGLSLRNEDYSKDIIEQIEYINSIIFQSGVGKEKSGEFSFAAKRTEKRSARRLYQSRKYRIWATLKLLIENDYCPLSLVDLDKWSKYDKEKGLKRQYPIDAEKFEQWVRLDFNGDGTADYSSPFQLRAELMNQQFDFSNQTDRYKLGRALYHIAQRRGFKSSKGETLKEQEKNEMDYNSEIDISKELQKSETKISNKLEEYMKKYNLPTVGCAFAHLEKNGIRVRNSDYQAVRSQYKDEIKQIFEFQNGLDTNSDFYKCLVSEKKGVGTIFYKRPLRSQKGLVGYCTMEPDKTRCPISNPEFEKFRAFCLINNIRFGEELKESLTLEQKHQLYKEKFLLTRTSFKFSEIKEWIQKKIGRKLEYTKTTKTINYKDNTNVSGCPISGRLKNLLGENWETWKYESTEEKANKKTGEIRHITYTTNDLWHVCFSFDEPEYIEEFAKNKLHFDDDQTKQLVRIYGSIQQGYGMLSLKAIRNINRFLEKGLMYTDAVLLAKLPDIFKEKWNDVEANIISSIDNIISENRKQKQLYFIVNSIIANYKSLDVTDQFAYKNYYYKLVASDIKDIKTTTINVIGSKTWEKKDINEQNELLNNVADLYQKFFSSEERDYYKLPKVSDALAEFIGKEYPFISASDLKKIYHSSMIEFYAPAKLEKIEDDRYIKLLGSPVIGALKNPMALRVLHILRKQINDMLKASMIDEYTRIVIETAREFNDANMRWAIDAYQREREKENKEYEKIIKEYYNNRDINDKDIDTARLVCEQHYDSNIKVKNEKKKESDYIYKKDITKYRLWLEQGGICIYTGKIINITNLFDDNAFDIEHTIPRSISFDDSLANLTICDAHFNRTVKKNQMPTQLANYEEIKRNIQPWFEKVEKLKENVEYWKSQSKRAQTKDRKDHCIQQRHLWQMELDYWQN

SEQ ID NO: 6528 - protein, 1039 aa, unidentified
  REGION 1..1039: note = Description of Unknown: Cas Enzyme sequence
KNGKDLEYLKKLLSYNEEISNKVFKNGKEKCLYSKYIHNKISYEEFSKELIKYLNIIIDYADESLKKQYKIETLPRIENNEFLPRLTETNNGIFPYQLNEQELIKIIENQGKYYPFLLNKIDNEYKLVKLLKFRIPYYVGPLNKNSKFAWIKKYNEFEKTSITPYNFDKIVDKEKSAYEFINRMLGNCTYLFQEKAMANNSIICSEFKVLNELKQIKVNNIKLTQDFIKRTINELFLKETNPITDKIFKKYLYRTGEYNMYKGDIEVKGYSADKKFANDMKSYIDFYGPNGFFKNTNYTKKQAEEIIRYITIFEDKEILKKKILSDYPDLSNRVDEIIKKNYKGWSNISEKLITEKYYLDKKTGIKKSILDLMYETDENFMQILNNNAYNFESMINEINSKTLNINNNKLNYNVVKELYTSPATRKGIWQSLLVVDEIVRYIGYSPSKITIEMSRGDEKKQRTLDRKKYLTNLYEKCKDSINEYNRLRHELDGLEKIDSERLYLYFIQLGRCLYTNTRLEIEKINSSDYEVDHIIPQCLIKDDSIENKALVLRDANQDKAANFVLPEKFRKNINNWEILKKMNLISSKKFYNLKRPEYSDKDIEGFINRQLVETRQITKHVANIFKNYYPESKVIYLPARLSHNYREKYELYKYRDLNDYHHAHDAYLAAILGDYKDKFKFNIDYDKLKEINKKLYDEHRYNEVKYGYVINSIDNEFVKYNDETGEIRFDADEFNKIVSNTLHQNDILISKKTEVKTGTFYKETIYSKNSINAKYNIKENLPVNIYGGYNSVNTSYMKLIKYYKKNKETVSLIGIPINLIYKNDNQLIDDYIKKSFCISNYEVLLEKIPYNIEIKYNNQLRIITGCGISSAELVNAIQFRLTKEEQIKYKYLLNFIFNDKYPYFNDKYRKKFITRDDFKEYFNNIFNEQINQLYDLYIVKLNKYYPSFQNIAIKLEQVKIDFYNLKLVKNDNKDNLSKIEVIKELFKITKFSSINADLSKFKSSVKFSDRIGRSSGNNIKSGTIINKSVTGIWEKHYEF

SEQ ID NO: 6529 - protein, 1353 aa, unidentified
  REGION 1..1353: note = Description of Unknown: Cas Enzyme sequence
MKKILGLDLGTNSIGWAVVNEAENAEEKSSIVKLGVRVNPLTVDELTNFEKGKSITTNADRTLKRSMRRNLQRYKLRRDNLIEILKENKFINDDTILSENGNRTTFETYRLRAKAATEEISLQEFARVLLMINKKRGYKSSRKAKSTEEGQLIDGMEIAIRLYEGNLTPGQLSLDLLKSGIKFLPEFYRSDLQTEFDRIWEIQKKVYPNILTDTLKEDLQGKNKTQTWAICAKVFNLVGIKRTTKGLEQKIENYQWRVNALSNQLESESLAIVFQEINSQINNASGYLGNISDRSKELYFNKQTIGQYQMAQLDMDPNYSLKNQVFYRQDYLNEFETIWETQEKFHKEQLTPELKKEIRDVIIFYQRPLKSQKGLISFCEFESKQIEVEIDGKKKTKTTGSKVCPKSSPLYQEFKIWQKLNDVEISGLINDEQKEDKGTTSKFKRNKRRLLQEEKELLFNELNYKEKLTKQDILKLLFKNTKELDLNFKELDGNHTQNTLIKAYLTIIERSGHNLGDISKKSAKEITKAITEIFNTLGINTEILKFDSSLPDPKFDQQPMYKLWHLLYSFEGDNSNLGNEKLIEKLQNTYGFNSEYATILANVKFETDYGSLSSKAIRKILPHLKDGNDYSVACEYAGYRHSKQSLTKEEIQNRVLKDKLELLPRNSLRNPVVEKILNQMINVVNTISETYGKPDEIRIELARELKKSAKERGELTKSINETTKLHEEYVKKLQSEFGLSHVSRNDIIRYKLYKELESNGYKTLYTSTYIPHEKLFSKEFDIEHIIPQAKLFDDSFSNKTLEARQANLDKSNMTAYDFVSQKYGEEYANGDYTSRIEKLYKDGKISKTKRDKLMMKETDIPSGFINRDLRDSQYIAKKAREILEGIVRYVVPTTGSITDRLREDWQLVDVMQELNWNKYNELGLTEIIKGRDGQLIRRIKDWTKRNDHRHHAMDALTIAFTKRSFIQYLNNLNARISKGVDEWIDLDMVEFSDLSKEDKTKAVYFIEKKELSRDNHGKLRFNPPMPLNEFRAESKRHLENVLVSIKAKNKVVTLNINTTQKATGKNKKAQLTPRGQLHLETVYGSCKQYVTKEEKINASFDIKKIQSVAKQTYREALLSRLKEFDNDAKKAFTGKNSLEKNPIWLNTQHTDKVPEKVKMVCFENIYTIRKPIDKDLNVEKVVDVHVRQILQDRLKEFGDDAKKAFSNLDEKPIWLNKEKGIAIKRVTITGVSNIEALHDKRDKEGNLILNKEGKTQPVDFVSTGKNHHVAIYRKPKLDKNGQPMFNENGDLQYELDEKIVSFFEATSRAIQHLPIIDKTYKQDEGWQFLFTMKQNEYFVFPRYDEDGNILFNP

SEQ ID NO: 6530 - protein, 1126 aa, unidentified
  REGION 1..1126: note = Description of Unknown: Cas Enzyme sequence
MGYVLGFDVGVASVGAGVIDSETGEILEGISYLFPEADATKNQNRRDIRDSRRVKRRQRTRINDFKKLWNKCGFIDCKNVDYNLALDMVGLRVNALTQSVSMEQLYLILQYHLKHRGISYLEDSIDESTGNLSSYAKGIDNNRRQLQSKYPCEIQKERMDKYGKYRGETKITKILDGEKEDIILSNVFTVSSYEKEIKHTFATQQKYHSEISDEFVEKYLSIFKRKRKYYEGPGNELSRTDYGKYTTRIDEDGNYITEENIFEKLIGKCSVYEDEFRAAGASYTAQEFNVLNDLNNLVVNGEKLSEDNKRKIIDIIKQSNTVNMKNIIKKVIGESIETMTGARVDKDEKEIFHKFEIYNKMRKVLEEIDVDITTFSRELLDEIGHVLTLNTEKEGILDAIERYKNIPVIDDVTKARVELANMDSKVLEVLINLRKKNSKLFSKWQSFSLKIMKELIPEMYSTSKEQMTLLQEMGKFKSKVDIFATCDKIPVDILTNELYNPVVTKSIRVTLRVFNAMLEKYKHFEQVVIEMPRERNSDEKKKYIGKMQKLNEKESEYIEGELRKRGIEVTSADYSEDKKLALKLKLWNEQNGKCLYSGRTIDPQDIINSPEMFEIDHIIPISISFDDSRTNKVLVYRTQNQLKGNKTPYMYLTSSDCHDVWSWEQYSAYIIQLSNKKKENYPISKKKLKNLLYKEDITKQDVLKGFINRNINDTAYASRVVLNTLQDFFKAKEEVTKVKVIKGSFTNQMRKNLHLKKDRDESNAHHAIDALLIAYSVLGYNAYRKIQSEVIDFETGEILDESLWNDVMSEDKYEEVFYNEKWIKIRGKLNSYERKVKFWYMVDHKCNRQLTDQTIYGTRQIDGKTYQVGKLDIRDKKGYETFKKILKKDKNRFLIARNDPKTFENLLQIMNDYSDKDNPFVAYEEETGDYIRKYAKKHNGARLGKLRYLNGELGSCVDVSHKYGFEKGSKRVILGSLKPYRADVYFNKDTNKYRIIGIKYSDIVCKNGDYYINTDAYNRILIKDGLISEGQTYEDLKQLGFEFKLSFYKNDIIKYTLDDKTYIERFLSKNDTSKNYVETKPVDKNKFEKQHIFGLTKATKIEKLNTDIMGDYHLCTKGKFTFKCKV

SEQ ID NO: 6531 - protein, 1017 aa, unidentified
  REGION 1..1017: note = Description of Unknown: Cas Enzyme sequence
MPFFKTVLGLDLGVTSIGWALLRFETDESGKVLHDTDGQLTSASIVDCGVRIFPATTEDKTNEPKNRGRRTKRGQRRLVMRKAKRRNELREILTANGLLPSFEPSASEQTFDRLGDPYELRVRALNERLEPFEVGRAIYHLSKRRGFLSNRKTGTSGEDGKVLGGIKEVREALERNGHRTLAEYLVTLPKKRKHFTHRTMSDAEFDLIWDSQRSYHDGSMNEDLKAKIKNIIFYQRPLKSQRGLIGRCTFEAGKRRCDLARQEAQRIRYWQDINNLQLQDPTTLNWRPLVEEEKRMLADKLEATEVLKYEALRKLLNIGDDVRINLEANDKKIKGNTTAYYFRNALKKTAKKWDDFNEEEQNRLIEELFRIENETALERRLKEFWGFDDEAVGKLRGVWHKLEDGYSRLSLKAIRKVLPLMMQGKRYDEAVTEVYGDHRPSLGSDEFQKLAMPPKDLRNPVVYKALCEVRKVINAILREHAGLFEESGGRPNEIRVEMARDLKLTKKQKEAVMKQQNLNKKANEMAEAFYREHFNLENISGTDKLKYRLWREAGERCPFTGRPIPATSLLDDGAVDIEHIIPYSRCFDDSYMNKTICDARFNRDVKKNQAPGEIYDRESAEFMQMIERVNDLPGGKRRRFEMSRDEIEHPERFGKNAKDWIGRMLSDTRYICREVRGYLRQIYPYSADEGKYVQVVAGGATANLRHVWHVNAILSDGDIEEKNRWDHRHHAIDAIVVALCERGLYQFISKLAGRNRELMKNKLSGFSYPWQGFLDAVNEAIGKIVVSHAPTRRIRGQLLKDTAYGATQTPGIYVTKKPVEALTPSMVKSIVDPVVKELVELRISQFNGDTKKAFAEPLFHKDGKTPVRNVRVFVTKSPETLVGIKDACGKVYKYYPVADNHHVDIYQNSDGGRRAELVPLFYAAQRDWKPKELGPEWRKLFSLCANDIVEFRGDSGELRILRIQKMSIGPKIIARPLDDARKDYISGITQNIEGRGIAGIVRKLQVDPLGRLTQASD

SEQ ID NO: 6532 - protein, 982 aa, unidentified
  REGION 1..982: note = Description of Unknown: Cas Enzyme sequence
MAETQMILGLDLGVTSVGGALLRKAAENEIQREIINAGVRIFPATIEDKTAAPKNLKRRTARGTRRLLKRKQQRRRQIKSFLTAGGLLPEMNGDSEAAFHDIGEPYHLRSRGATERLKRHEIGRALFHLIKRRGFKSNRKSGKSKDDGVVYEGIAAIREEMLNSEYVTLGALLHSKEKKRKHYTHRDMVEDEFEQIWSTQAEHYPEILNEYLHADLTRAAFYQRPISSQRGLIGKCTFEPGKKRCDMARQEAQRMRYWQDINNIRLQDVRTLDSRFLTPEQKALLADNFEKARKLEFAEADIRKIVKVGDDVRVNLEKKIKGNTTAYKFTKAIGSKWDEMSPDKQDSFITDFIRIEDERSLANRLRNFWKFTDGEIEKLLNIELEPGYSRCSLKAIRKILPKMMEGLRYDEAATAVYGDHRGKARSGDHELLPPPPNLRNPIVRKALGEMRKVVNAVIQEYGKPDQIRLEMARDLKLSKKQKERAEKQRKTNEAANREAVEFYVNLHNIDPDRISGTDKIKYRLAKESGWISPYSGKPIPPEDLLSDQWAIDHIIPYSRCFDDSYMNKTICEAKLNDEKSNRSPYEWFGADESKWYEFGVRIDAFPIAKKRRLEQKEIDEEKVVNRMLSDTRYICREARAYLRQLYPPHADENKYVQVTAGGATAKLRHHWGLNAILADGDIDVKNRWDHRHHAIDAIVIALTDRGLFQRLSRLAARNEEFHRKELKGIEMPWEGFLDDVKSQMDNLVVSHAATRRIRGQLLEETAYGATSVPGIYVVRKPIASLTKAAIETIVDPFVREMVKQRVAAFEGDLKKALAEPLFHKDGKTRINNVRLHVTMSPETLVGIKNRSGKEYKYYPLAGNHHVDIYENNDGERKAVLVPRFYAAQRNWKPADQGPGWRKLFSLHANDYIEFRGDNGELRVLRIQKMSGGGKVVIIARPPTDARTEYVVGAAVPLQGARLKKITRKLEVDPLGHLSTASS

SEQ ID NO: 6533 - protein, 1171 aa, unidentified
  REGION 1..1171: note = Description of Unknown: Cas Enzyme sequence
SSNGVNAAAIGQVAALTGVAPIQPDWKIHPLLAGGAAPVHAVVGKNATGGDIFGAYILFHTDVSLQNEAPGILTQHGATVRDVLETVNGMVIELPAANVAALAAADEVLWIEPALPRMSENNAENRAMVQANEAQAAPYNLDGTGVTVLVYDGGTARAAHQDFGGRVFVRDTSGQANHATHVSGTVGGSGAASGGTNRGMAPAVIIQSYGLDTDGTGIFLYSNPGDIEDDYGQAIMSFGADVANNSIGTNTETNGFPCAIQGDYGVTDSVIDGVVRGSVSGGVPFRIVWANGNERQGSSCDIEGFGDYYSTAPPATAKNHITVGALNANDDSMTSFSSWGPTDDGRMKPDISAPGCQVGGDGGVTSCSSASSNVGYAVLCGTSMASPTVTGCCALLLEDFRAQFPGEPDPRNSTLKILLAQTAVDRGNAGPDYQFGYGSIRIKDAIDLMRTGNFTENEVSQGGVVDYTINVGPGTPVLKAMLAWDDAPAVPLAAVALVNDLDLVAIDPNNNTRLPWTLNPANPSAFAVQTAANHRDNIEQVLVNNPTPGTWTIRVTGFNVPQGPQPFSICLVGEPDLRINLPNGAPSTLAPGVPTDFSVQIMATGQTLAKAGLNDEWEKLSGEALCGQPEIFDKIAWVLSVFKDDDEVRAELAKLSLPNRETLTDALLNIRFDKFHALSLKALRAIVPHMEKGLRYDEACVQAGYHHSQLHKVGKGDHKYLPPLYSGRDKDGRMVFAEDADIPRNPVVLRSLNQARKVVNAIIRRYGSPSAVHIEMARDLSRPFDERYKIKKEQDEYQARNQRDREQFIELFGHPPKGLEFEKWRLYREQNGQCAYSQKPLAPSGNVAEIFLDGSTEIDHALPYSRSFDDSKNNKVLVLTRENRDKGNRTPYEYLAGAENSERWQRFVSFVESNKAYRLAKRTRLLRKDFGAKESEEFRERNLNDTRYICRFFKNYVEQHLKLAEGSDTKRCVVISGQLTNFLRARWGLLKVRSDSDRHHALDAAVVAACSHSMVQRLSNYSRTRELEQVRDGFVDIETGEIVNPAMHQQLREHFPDPWPYFRHELEARLKIDSPELLREEMARLGSYSDEELNTLKPLFVSRAPQRRNGGAAHKDTIYGQPEKLKKNGSVTQKVALASLTLKDLESLADPHRNGKLYGAIRERLEAHGGK

SEQ ID NO: 6534 - protein, 1064 aa, unidentified
  REGION 1..1064: note = Description of Unknown: Cas Enzyme sequence
VAHIFPSSAGSVERRTFRSVRKGHRRRHHRLAQLSHALREILGRQDLSAEGCADLAFDKKNTTARVHLRAMGLENELSSNDLFKAILHIAQNRGQRLTRGVKDDNKNEAKERTKTAVHADSTRGQLNALGRRLCLTEAATPGQLLYDRLQGGRSTKLRKDVPDTPVFTRGQLENELSRLLNRQSAFHTALDDETTRQRIFDLVFCEEEQRQPAIGKCIYGIRDSNGKVEDRLRAASELFQRKRIYEEVNNLRLRDRLTAKSAPLTLDMRNAVVTLLTSGQDVTATKLRKILQLGKGALSPLTSLEEQKSTKGGKADDKLAAHPLAYAMRKIGMADKWRLLDASARDVLFEQLAAEDDSERLSAWLEKVHGISGENANALCKIRLPSHRTSAGPTATGKLVVELEKDVIPLSEAEVRAGLTRRGVETGGRLDRLPYYGELFPDACIGGSQHPKDTPEVRYGKLPNPVVHTALNRLRKLANEFADRYGPPRWINLELARDLNKSAEERDEIEQTKRANQKKNDTWASTILAQGARVNRRNLMKMRLYEWQGGACLYTGTPIAMHQLFTEMIEIDHILPRGSTMDDGAGNLALVLTTANQIKRKRTPYDAFKGGYNGRDYATILQGVEKTRKQSLWRFAPDALERYRNSGAMRSRFLGDNRYIAKLASAYLAYLVDDRTQITSVTGGMTAQLRHLWGLDDLIPELMVEAGVLHRRYLMSSVSATDEERTQRAQFRRKLRFDHRHHLLDAIVVGCCTKSDVQRLETLAARVEGYEDLRNYLKLLKDEGTAVFREGGLPWSDGFRGTVKEFLTASQDPASARKATRVTHKPDHNPLGEMHAKTFYGVICRIPGTDGQYLCGIHQKLADLKTKKQIEEIGIGDHAFEALQRAIDRGEQIGWGQPEPISALCNLKKAQKGLRESLLAEFGNAPGGDMKDEQERVSWAVQRVAEKTGQRRYRQIQTKTLRIIKGAVSGGKQPLAAVATSNNDRLIHWLDNEGIGHWDVIPSIDAARPGFKEPWVGGNGRLIFRLRKNDTVEMAVDPKDAGAGRALYRLASLSPGDLEFVPVA

SEQ ID NO: 6535 - protein, 1348 aa, unidentified
  REGION 1..1348: note = Description of Unknown: Cas Enzyme sequence
LGQSSIGWLIRDTDQEGIEQFDKFGVLTFNKGVGEEKNNEYSLAAERTKKRSARRLYQSRKYKLWETLKKLKAKDYCPIDEKALQEWTTFNKELGLKRTYPVWDIGFEAWIKLDFNGDNRPDFDSPYQLRKYLAENKLDFDSPTNRYMLGRALYHIAQHRAFKSSKKVKLEEDAKETTDVGAEKKKNENLKNEFEKTGIPFDESKTIGQLLAEAEIFFKERGYGRIRNELHPYVTRKMLQQEVEKIFKFQFGESWIDKFKEIFGTEKISKSSIFWQRPLRSQKAAVGKCTLEKNKYRCPVSHPQFEIFRAWSFINNIRYKFDDSDEYKDLSLEIKNKLYREVFIKVNDFNFSVVRKWLTQEFGKKIQLNYRDDTNISGSPSIYYLSKILGENWETNQIQHKPIQRLKKVNGTYEGYNSKKDYYTYEDIWHVAFQLDDEEEIEKIAKNKFGFNDEQTENYLKMFKNMPVDYARLSLKAIRNINYFLKKGLIYTDAVLLAKIPDILGKDVYSEENEKLIIDSLNQIINENRKKKNIINITNALISEYKLNHWHERDYDYQLKEDDLQNIKEASENYFGKSKWNAFPEEERNEYLEKIKNEFQAFFQDRKREYKKLPKLIDDLKTFLKNNFPTLDEKKLNKLYHPSAIDIYPKLTDKDKANDGKLYLQSPKTGSWKNPMALKVLQELRQLINYLIKTDQIDQETKIVVEIPRELNDANKRKAYEIWQKRKEEENKEFALAIGQLLNEFNHLKANPQNDSDIDKFRIWYEQCFDEVSQEFTDKGPNELKTQKKKKKNKKGEETEEELQTWTENNYSKINTSLWFKILKAKDNTIEKYRLWKEQKATCIYTGKIISLSDLFNEDTIDVEHTIPYSRSLDNSLANKTVCLKEYNRKTKANRLPSECPNYNEILNRIKPWQEKIEAIKKHLEFWKNESKKASTKDRKDQCIIEKHLWTWELEYWENKVERFLMKEVTSKFVNAQLVETQLISKYAFHYLKTLFENVQVQKGSVTADFAKVLGIRDKYKSKNRDKHTHHVVDAFVLSLIPDSARLKSILEKYGEIQELKKINEDAATDVREINQRRIEELKKSLIESRIPLSTLHKIIQKIETETINFTPHKHKIFATAKKKIKKGKLKGKYASGDTVRGQLHKESFYGKIKLVERDENGKPKRDENGNWIWAKGKDGNEEYAFVKRVPVDDNLKIENIVDPVIKKIFEDAVKSKSLKEMQKEGGLIFTFKFKDRKNKKETEKTIRIRHVRCFQKPTELLQIKQQSHKSKYDYKNYYYADNAENIYYALYEDEKGNRTFEMLNLFNAIKIKKYKEISKLEDFFELTKKVGRGKNISDTKLKAVLYP

SEQ ID NO: 6536 - protein, 1051 aa, unidentified
  REGION 1..1051: note = Description of Unknown: Cas Enzyme sequence
LKEYILGLDIGITSVGYGLIDYETREVITAGVRLFKEADVENNEGRRTKRGSRRLQRRRRHRIHRIQQLMVNHDLLDMDHIPTDTNPYAIRVKGLSHELTKDELVIALLHLAKRRGIHNVEAAIENDDEGNELSTKEQLMQNQKELEDKYVCEVQLERYENGKVRGERNRFKTSDFVKEARQLLKIQQPFHRLDDSFVEEYIKLIEKRREYFEGPGKGSPYGWEGDLKKWYELLMGRCTYFPEELRSVKYSQTATLFNVLNDLNNLNINRDENIKLTHQEKLNIINNVFRVKKTPTLKQIAKELDIAETEISGYRITKAGKPEFTTLKLFHDLNGIVKDSALLSNVDLMDKIAEILTMYQTSGDIKKQLLELHIPLSEDEAEQISLLSGYTGTHSLSKKCMKLVLDELWHTSDNQMAIFTRLNIKPTKFKLSNQNKIPVDFVEDFILSPVVKRSFIQSINVVNAVIKKYGLPKDIIIELARESNSADARKAITNRQKNFEATNKRINEVIGKYRLQNAKYLVEKIKLHDMQEGKCLYSLEDIPLEDLLRNPLHYEVDHIIPRSVAFDNSFNNKVLVKQTENSKKGNRTPYQYLNSADAKITYPQFKHHVLNLSKSKDRMTKKKREYLLEERDINKFSVQKEFINRNLVDTRYATRELMTLLKAYFEANHLDVKVKSINGGFTSFLRTRWKFDKERNKGYKHHAEDALIIANVDFIFKSHKKLKNQMKVMEKPSVDEPEVEVKVAGEEEYEEMFIIPHQIQGIKDFKDFKYSHRVDKKPNRQLINDTIYSTREVDEELYTVQTIKNIYAKDNDTIKKIMDKSPEKLLMFKNDPRTFEKLQLIMKQYSNEKNPLFKHLEETGEMLTKYSKKGNGPTVKSLKYIGKKVGTHLDITNDYKDARNKVIKLSQKPYRFDVFKDDEGYKFVTVKYIDVIKKESYFIIDNKKYKKSMMKRSIKDGSKFIGSFYNNDLIKIDNEIFKVIGVNSERLNRIEVDLIDIRYPDFCKINNIATPRLYKTITNKTKSLSKVSSDLLGNTYNAFSSEKPQMIIKKG

SEQ ID NO: 6537 - protein, 959 aa, unidentified
  REGION 1..959: note = Description of Unknown: Cas Enzyme sequence
IDSLKAAIEEAGKRTLGEYFYSLIEKNSGGTNPLAPLTRIRDRYTSREMYENEAALLWQKQAEFYPELYTEEFRKEVLEETIFYQRPLKSQKHRILRCRFETKKPVMPLSSPMYQQFRLLQKVHDLRVTLPAEDRHDSPLTREEKIKLFQALNSPKALNKEGALTKTKIVSLLFKGKHPEFSEPKGFKIYGNVTKKRFSDALGFKFWEGLTEKEQFTIWHTAQFAQDDDWLLNYATTKLDLSEEQAEAYLDVELEDKYGGISHKALKKILPYMHPEGEELDYTNACIAAGYSHSAKLERFQFEEFDGTKEQLEARLGLLKLENNELNNPLVQRSLTETFKVVKAVYKEYGERYGLPQEICIEGTRMLKANKEGRKKIFEANNQKNKRRRQIAEFLRESEHYKGKKLSTDAILKFELWLELELYKGEIEKYKFEPKMLEKFSNFQKEVKGDWAEKYKLWKEAKRTCPYTGKPISLSSLFNPELFEIEHIVPYSRSFDNSFRNKTISDVGFNREKGNKTPLEHFATKSGSELFSFKQRIAHFPKGKRKQFLKTEVGNEPSSAQLNSTAYVATEAVKRLQLICNNVRTMEGQLTSILRGKWQLNKFLYEDTKDLQAKVDNALEGKDKNHRVKNRNDHRHHAIDALVIACTTQALVGKINKASAKLEESPNKLNVLGQLVIPTPYDWGVEKLGKDLEFHLDRMVISYRNEKRLIFTRKSKIKTKGKPIKVKTRGVRGALHDETNYGQIELPRAVGKLSAEEKAYVYRRPLTAITDKQVGLIIDPVVRQKVQDYVNKYGNGKVAAAFKNLEEIPLWMNEEKGIPIKTVRVLNPASDLICLKPKENEKLFVASGSNFRMAIYEDPLTRERDYEIVTFFEAVQRKLKGQPLLPLAKGSKTQLVEFTHGDYFVRYENSPEEIDWDNMEDIAKNRLYRVGKFRRDSGRLFIAKQHLAQVKLDKDPEPL

SEQ ID NO: 6538 - protein, 1079 aa, unidentified
  REGION 1..1079: note = Description of Unknown: Cas Enzyme sequence
MQTETHPYTLGLDIGMASVGAALLLSDQERILALHVRTFDKAETAKEGESLNKIRRDARLIRRRIRRRAHRLVRLARLMKRYGLIKAATPESFALPDVSPWDLRAEGLDRLLDPKEWASVLYHLVKHRGFQSNRKSEAKADEKAGQMLSGVSRNQTLLKETGYRTMGELAARHEAFKEAKRNKDGAYTHTFARADLEAEMNVLFEQQRAFGSRIANADFQAAVHDLLMARKPTLSGANLLKMIGKCTFEKSEFRAPKASYRAERFVWLGKLNNLKIVGGGDARSLTDAERRIIIDLPFTQAKLTFKQVRKTLDLEAHQRFNLLSYRFDPKGKDKDPEESTLFEAKHFHTLRKAYEAAGLKAEWQRDAINSDRLDALAYAITCYKDDTEARNWMAAQGIESQIIEAVLGDSFDQFIQLSQKALKAILPHMEAGQRYDEAVKSAGYNHSQPDEATEKRKTLPAPDKDIIRNPVVYRALNQARKLVNAIIAEYGPPAAVHIELARDLSKPWDERKKIEREQKEFQVEKEKAFADFEDRFNFRPKGPDLQKWRLFREQLDQCPYCQKALEVDRLFEPGYAQVDHALPYSRSFDDSMNNKVAVHTKCNQDKGNRTPYEAFDGASDSDHWQRFVAWVQSNKAIRQAKRNRLLRVNFGAEEAEEFRDRNLNDTRYICKEFKRMVETHLAWHPDSTADNRCVVLSGQLTSLLRARWGLIKVRSEGDLHHALDAAVIAATSRSLIKRMSDYSRREELEQVRNRYIDPATGEVLDLSALRQIEADFPKPWPHFREELLAKLSANPSQQLECIASYDEAMRNSIQPVRVSRAPTRRGLGAAHQETIRSMGKAGKLLAGQQSAIKTPLTSLTLKDLDNIAEQRDTALIEAIRERLTAFGGDGKKAFAPNQPPLRKPSAAGKAAPIIRSVKLLATQKSGIHIRGGIANNGAMLRADIFTKAGKFHAVPVYVADAVKAELPNRAVVAFKPEEEWTVMDETYQFLFSLHPNDWVTIRYKNAPERSGYYAGLDRSGGTIDLWLHDRNQSLAEKGLLRGNGIKTALAVEKYHVDLLGSLHRVHHEERQPIHRKRGR

SEQ ID NO: 6539 - protein, 1046 aa, unidentified
  REGION 1..1046: note = Description of Unknown: Cas Enzyme sequence
  MOD_RES 103: note = Any amino acid
MIHAMSYRLGLDLGASSLGWAVVRLDQPNGDPQEILAAGVRIFEAGVEGDIEQGKDSSKAVKRRQARQPRRQQWRRQFRKRKLFTLLQQFGLLPPSSGNTSAXPSADRKAALDALDDLLKEKHVSPEDHDAHQKLPYLLRAKAAEEILPPHELGRALYHLAQRRGYLSNRKGQRDDDDTGLVEGSIDSLRGQMGDATLGQFFARQARPAEKRIRRRYTGRTMYREEFDRIRAVQGSSQGLGDKDWEKLRQAIFYQRPLKSQKHLIGRCELEPHGKRWKYRRCDLCLPIAQEFRILQKVNDLRVTTAGRRDDPLTPKEREKLIAALWTQAEMTWGKVKSLLKLPKTARFSHEEGGEKLIGHRTNAKMIAAFGNRWLDLSEAEQTDIAREVLHFRKPEALKKRAMHAWNLTEEQAEKLSRTKLEEGYASHSRQALRKLIDGTDSVPGLRQGAPYATVRKALYPESFTAGKAFDTLPPVNNWKNDIRNPAVIRAMTELRKVVNEIIRKFGKPDSIHIELSRDLRNSRQKRKDIWKQNEENRKRREKAAQAILNECRIGNPNRRQIEKWLLAEECNKACPYCGKSINFHSLMGDDAEFNIEHIYPRRYLDNSYMNKTIACRSCNDQKGDRTPAQAFTGARFDEILQRVERFQGAARDAKLHRFKTEIPDADFVSRQMNDTRYNSRLAAQYLGLLYGGRADQEHKQRVFTPTGQLTGSVRNSWQLNDLLGEPDDEKERGDHRHHAIDAVIIALLDQRLIHQISSSAEEAEKLRDRHFFKPLPWPWNGFKNDVAFAIEAINVSHRPTRTIAGPLHAESIYSKNHGTEKQPDFRIRKELAKLTAKEISGDQIVDPSVRAAVQKKYEELGGGLPSKLWGDRDDLDKFPRLPSRNGSGPGTIIRKVRLRTDAKPKSIGRDARQRNIASGKNSNFASMVYAILDAAGNEIRWEHEIITRLEAHERLSANHGQPREKVLIPQETETRKFKFALRKNDMIEADGPDDQRVLYRIQKLSQNQIQLCDHTQSTVTNDQRTSWNCISGVENLRKRHARIIR

SEQ ID NO: 6540 - protein, 1276 aa, unidentified
  REGION 1..1276: note = Description of Unknown: Cas Enzyme sequence
MGKILGLDLGTNSIGWSIRDTQLPGNQTEKVGVITFNKGVGNSKTGEYSYAAERTKKRSTRRLYQSRKYRLWATLEVLIAEGYCPLSLEGLNKWRHYNKEEARENKNGGRVYPKEEVLFEQWIKMDFNEDGLPDYKSPYQLRRALTEKEFDFNKEAERYKLGRALYHIAQRRGFKSSRKGSDDIKESVDGADIDLQYSEKKKNKEIIARFEKYPQAKTIGALFAYLEDDGIRIRENMAQYAIRENYKEEINQIFKIQNLSFASLLYKGLVETGKNKNDGAIFYKRPLRSQKGLIGLCTLEQETRIDPKTKKSFQVGKYRAPISHPSFELFRAWQFLNNIKFKEENNKNSTWQPLDLELKKEILEEKFFRKSKAYFPFSEIVDIIKKKGLRWVLNYKPKQTVTGCPVSARLKDIFGDDYLNVKIDKLPSSKQKKNYYDIYDIWHVLFSFEDQDFVAAFASEKLKLDEEKAKQFVFAWNAMPVGYGMLSINAIEKINRFLFKGIQYTEAVLLANLPSLVGEDIWIENEATFLRNIDDIIRENRSEKHIIQIINSLVAKYKSLDPKFGYKDDAYALDGSDVQDITDAILEHYGESVWLSKEKAEADRIFSTVKDCYQAFFKTIGLERVNLDGERHFLVSSNGKNYYKADSGFYKQPKLKDTLAAYSVKVLKVDISKLQKIYHASDISIYPPAMPDENGEIKMGSPQTGSFKNPMAMRTLQELKKLLNYLIETNQVDSDARVVVEVARQLNDANKRWAIEAWQRQREAENMEFATAIDELVKQEGVKANSKSELDIDKMRLWYEQNGEESVPEISETKKEIKGIRWTENKKQSYKDITTKKTAIEKYRLWREQNCICIYTGKPIGVSDLFNTNIVDFEHTLPRSKSFDNSLANKTVAFMDFNRTIKKNKIPSQLSKERYELVLKNIEPWEEKIERIKQQIDFWQTKSKKAADKQWKDDAIRQKHLWKMELEYWSSKVERFKIQEITSGFKNSQLIDTQLISKYALHYLKTFFEKVDVQKGEVTAIFRKIYAIQPQNFDEKKDRSKHSHHAKDATVLTLIPQAAKREEILKEYFETLENGLKFQTIKPYATFNVNSIFEIDDKVLINSLNNIQFLSKAKRKVRKRGKVQLIEGTNKDKIATGDSVRGQLHQETFYGAIKPAKLDEAGKMQKDENGNFIQEDKLRFTVRVPFEYKAKPDVPGFKTWEEIEKQVVDEGLKRQIKQQIDNVGGVKEAFDEGIYMFDKKGNKVNKIRHIRVWASVSEPLPVKKHTYLSSKGYKQH

SEQ ID NO: 6541 - protein, 1208 aa, unidentified
  REGION 1..1208: note = Description of Unknown: Cas Enzyme sequence
MTKILGLDLGTSSIGWAVADRTEWGYRLIDQGVAVFQEGVEREHGIEQPSVKRRTDARALRRHYFRRRLRKIELLKVLVEHDMCPYLSPEQLHAWRAEKVYPKSDDFIRWQRTDDNADRNPYHDRYTALTSRLDLSLQRDRYVLGRALYHLAQRRGFLSNRKDTTDEKETGKVKSGIGELSAKIAEAGCTYLGEYFYTAYRRGEKIRTQYTSRTDHYLKEFDAICALQQLPEELTKALRRAIFFQRPLKSQKGSVGRCTFERDKARCPLSHPRFEEFRMLQFINNIRIETPADTGCRPLTAEEIGRIRPLFTRKKSSFYFEDIAKKLAGKGRYACIGDRCEAPYRFNYRMKTSVAGCPVTAELRAALGDDWRSELRSRYTLAAGKSENRIVDDIWHALFSFDNDERLREWLCDKVRLTEAEADKLVKCRLPQGYASLSLNAIDKMLPYLREGYRYDEAVFLANLGAVLPPDTPPDERHAIEREIAAAISGYKRNPYDRYDTKERRVSGIIDAHGIDARTDRLYHPSMIETYPKASPDADGILRLGSPRTSSIRNPMAMRALFRLRQLVNTLLRTGVIDGRTKVNIEFSRMLNSANMRKAIERYQRDNENERKKAVEEIRSEYADATGRKIEPTDEDILKYLLWKEQNKICLYTGDSIGISQFLGDDPLYDIEHTVPRSRGGDDSRMNKTLCERRFNREDKGAKLPSELSCHAEILARIETAGWNKTIDDLRERIGKLRHVTGDEAIQQLHYLNMKLGYWLGKYKRFTMQEEPDGFRNSQGVDTGIIGKYARAYLKSVFDSVYIVKGETTSDFRKAWGLQGEHEKKDRSNHSHHCIDAITIACIKPRDYDEWTRYAAAKEAYEAERGEKPSLKKPWPTFTEDVKAIAERLLISHHTADNMPKPTRKKLRIRGKVQRTDDGRIKYAQGDSARGSLHKETFYGAIEHEGEIKYVVRKRLDQLKESDIDRIVDPAVREKVRAAVDRCGFKEAMAGTIYMNEQKGIPINKVRIYADSVTSPLRLKQHRDLSPKEYKRNYYVVNDVNYCMAIYESVDSKGKACREFELVNNIDAANYFKRSADRTSFDSLFPETSRKNRYPLKYVLKTGTMVLFYENSPEELYDCTERELAKRLYEVSGLSSLTIQSKYYYGRITLKHHREARPADDLKAKNGVWKTGEQYRPVIAIYHTQLKALVEGFDFELSITGKIEFKHR

SEQ ID NO: 6542 - protein, 1362 aa, unidentified
  REGION 1..1362: note = Description of Unknown: Cas Enzyme sequence
MEKKEYYLGLDLGTSSVGWAVTDNQYQLIRAKGKDLWGVRLFEEAETAAGRRTNRVARRRRQRETARIGLLKEYFADAIAEVDSSFFERLEESKYHFEDKKIQDKNTIFADKNYTDKDYYKDYPTIYHLRMELINNAEAHDVRFVYLALLNMFKHRGHFLNSGLKTEEQNNKIQESYASLLMIANVQYGLELPESFDFVKLEEVLSRKDISRSKMAEEVAGLFNISKSKNKREYEVVKGICGLAVSITVLLDVKELDENHKKVQLSFRDAGYDEKIAEISSLMEEQDMELLDTMKQIHDIGLLASVMKGSKYLSEARVKDYTKHKKDLELLKKVIRENIPEEYDEMFRDMLPGSYSAYVNSVNADEKQRRNVKGRKQEDLYKKIKAVLKKIEDCEEKEYILNEIESESFLPKQLTASNGVIPNQVHAMEMKKILKNAEGYLPFLKGKDDSGLTVSERILGLFQFQIPYYVGPLNLQHADKKEGHAWAVRKKQGKVLPWNIDEMIDMKQTSEEFISKMVRHCTYMNGERAIPKDSLLYQRFCVLNELNNLRIRGIKPSVKLKQHIYQDLFMKGKKVTQKQLFTYLIGCGILEPGETDAITGIDKDFKNTLSSYGKFASVFGEDMKLDSTKEMVDKIIFWGTVYGNDKTFLKERIRECYGDKLREEQVKRIVGFKFHDWGKLSKKFLELPGCDKSTGEVLPLISMLWESDCNLMELLSDKFTYAEELEKQSVAAEKVLSEMQYEDLDELYLSSPVKRMVWQTILILQELEGVLGGVPSRIFVEMPREDGEKGKRTDSRKQKLAELYKGCKTDGRNWGKELDRWSDKELRSKKLYLYYLQQGKCMYTGEPIDLDDLFNDNLYDIDHIYPRHFVKDDSLENNLVLVRKEKNAHKSDNYPIEDSIYKARRAWWKSLLTDDMQSKFITREKYNRLVNREAFSDDQLAGFISRQIVETRQGTKVVAHLFENMFPDSEVVYVKAGNVSAFRQGKKDKKDKTMLKCRSVNDFHHAQDAYLNIVVGNTYFVKFTKNPRNFINEYRKNPEKNRYHLCNMFDSDVSRNGEIAWLAGEKNGKPGTIATVCKMMAKNSPLITRMNFETHGQISDATLYGANVAKAESYIPLKASDSRLQDVTKYGGFGSVKVAYFFLVEHEKKGKRIRTLEAMPLYLRDKIGKDRELIKQYCEEELGLIKPDVRMAKIKIQSLIRRNGYCMHISGKSNQQLIVRNAIPLCLNQYWVNYIKKLEKTVGTGYVDDNVTDEQNKELYSILIQKHKNSIFAKRPNGIGDKLLSRQERFGSLDLLEQAIVLMQILQLTQLSNMGADLSLIGEAKKTGITLISKVVSDAEEFVLVNQSPAGLYESEIDLKTV

SEQ ID NO: 6543 - protein, 1332 aa, unidentified
  REGION 1..1332: note = Description of Unknown: Cas Enzyme sequence
MKDNYYVGLDLGTESVGWAATDENYNFLRLKGKTAFGARLFSEAKDCKDRRKFRSSRRRIQRRKNRIYLLNYLFAEELAKVDKTFLLRLENSAYWLSDKNRDITTKHLIFKNKEDEKNFYKKYKTIFHLRKALIDNDSSAFSDIRYLYLALHHIIKYRGNFLSEESQNYENLDKNILDNVNNCLKSLIEDDFEEDFINGNIIDEFKKIVLNENLIKSIKKKEIKKLFYNPFKDFGYVDLFINLCIDGKFSSLKKLLSDAEDDISSIEFNKFDDNKEKYAQLLGDAFTLVEDAKKVYDFSLLHSLLKHHSYLSDAMIEVYDKHKEDLKLLKDVIINIDLKRNNTLEENRLYTKIFKDKNSSINYACFIHNGSYQDRISLENFNTELLKIIKEYKDDIDEETYSNLTKRLEKKDFLKTIAHVSTSVIPHQLHEKELRIILDNAEKYYPFIKDIKDKIIAIFKFRVPYYSGPTTGPYSNFIRKSNEKIYPWNFNEIIDENKTKIEFFKKLTNQCKYLFNETVLPKASLLYQEYMILDKLNALQVNGAKLNLDEKAKIYNFISSRNKTTLNNLKTEFKHLYGVNVSLSGVDEQASFEATSLKVFKEHFSLEDYDLVEELIKIATVYADDKSSLKKLLQSEYKNLSKAQFSAILNIPTKKWAPFSKKLLDEIVSIDDNGIAHSIISVMREENKNFQMVLFDEKYRFNELIDEYNNQARGERTTDDLIEELLDNTPAKFRRSINQSLLILDDLVSISKTNPKKIFIEVTREDLLNRKKKRTDSRKKELATFLASWKKDVSEYASNVPHLIKELEEIDELKLKSKHVYLYFKQLGRDLYTGKPIDLNDVLNSNKYDTDHIVPQSLIKDDSLDNLVLVDRNYNQKIKKDTYPIPSSIKTTDVKNLWEYLKNKKAISETKYSKLIRSTELTQDELQAFVNSQINAVNYSNKVLKDILNLKYPDTQIIFSKAKYASYLRKALEIAKLRELNDAHHAVDAYLNIVAGNILFTTFSKRFKPVETDEKTYNMQRVLDYTIRNNNLKDKIINNCLRHDALITYKCDFSNGAFYKQTLYSPNSYNKSLIPIHTKKDNPLNNVEKYGGYLFFKNSKMALITYKEKNKIFKRIEDVKLLHEKMFKQYSPEFINSIYLNNKAIDIKIIQFIYNRQKICYDGGIYTICSIGENRFKLKIAYQNYISNDSLLYFNIAYKRINDLPDNKDEIELVTDLRKKQKVVISKQKNYDIFNELISKTKNKVYDSCTYIVKLRDIDDKDAFMQFNLKDQITIIYELIKMLSRDAESSLLSTFFKQTYKGLLRPSKNITGKKVQLIYESPTGLYSYKKDI

SEQ ID NO: 6544 - protein, 1263 aa, unidentified
  REGION 1..1263: note = Description of Unknown: Cas Enzyme sequence
MESKEKYYVGLDIGTGSVGWAVTKENYEIIKRNGKALWGIRLFESANTAEERRGFRAARRRTDRNKNRIALLQELFSEEITKVDPGFFQRMRESKYYHEDKRDINGKTPEVPYALFADKNFTDKDFYRRFPTIYHLRCELIRNPNVKPDIRLLYLALHHIIKHRGHFLFEGKKISEVTKFSNAIQALLECAEENDMEIVLDEEDKRQIEEIMKSGEISRTEKKTRLGKIIAGNDKQKKALAGLIAGCTVKLSDLFNDKTLDEEDRNKISFSDSKYEEYISQVEMILAERFLLIEAAKAVYDWAVLSDILGDVRYLSEAKVNIYEKHRQDLAKLKDLFKSDRAVYTKVFGISGKSANYSAYIGMVKKNGKKVPIDKKCTREEFYDFLKKILNQFPGGDAQKAVVDELLSEIENGTLLPKQVIRDNGVIPYQLHEKELEAILENGAKYYPFLREKDGNGISVMDKIHEIFHFRIPYYVGPINTHHSDKGGNSWAVRKAEGKIYPWNFTEKIDEEKSAESFIQRMTNKCTYLIGEDVLPKESLLYAKFNVLNELNNLRIDGEQVSVEIKQKIYTDVFQRYQRVTGKKVKDYLICEGIITKKQELSGFDQNFKSSLKAYHDIKQIAGNVSMSVEQQEDIIRDITLFADSQKMLRGRLHQKYPQLSDKQILQLSGKRYSGWGKLSRAFLEQLESVNRETGETLNIISALWETNDNLMQLLSGRYGFADEIQKWNNRNVSDQEVNYQSVQDMYVSPAVKRPIWQTIKIVRELEHIMGCAPERIFIEMAREAGKKGERKVSRKTKLQELYRSCKKEVPELYDQLQCEEDNRLRSDKLYLYYTQMGRCMYSNEVIDIEDLFTNRYDIDHIYPQSKVMDDSLDNRVLVKRELNSNKTDVFPVPKEYADRAKGLWTALLQKGLISKEKYHRLTRREPFGEDELAGFIARQLVETRQSTKAVTQLLGKAYPDSKIVYAKASAVSEFRHKFGLVKVREINDYHHAKDAYLNIVVGNTYYVKFTRDAGWFVRNNPGRTYNLKRMFENEEVKREDEVAWIPGESGTIGIVKKWMGKNNILFTRKAYEVKGGLFDQQIVKKGKGQVPIKSGAGDSRLADIDKYGGYNKASSAYFMLVESEGKKGQTRRSIEFVPVYLAKRLEQSQENLLQYCRENLKLQKPRILLPKIKFNSLFNVDGFLMHLSGRTGKRLIFKGANQLVVSEGIQKTVKKIGKFCADYKVNKKTVISEKAELTEQDLTDVYEEFQNKLRNTLYGRRL

SEQ ID NO: 6545 - protein, 1162 aa, unidentified
  REGION 1..1162: note = Description of Unknown: Cas Enzyme sequence
MKRILGLDLGSASIGWAVIEEQNSEETVVETTSVSKDRIVAIGSRIIPLSTDESSQFSKGQALTKNADRTQRRTQRKGYDRYQLRRALLLEELSRLGMYLGRTLRLSTLELWGLRARAADERISLAELGRVLCHLNQKRGYRTVKSDFGDKKQGEYVRAVVERYRELHGRGVTIGRYMYDGLKADPAFRCRERVYPRDAYVEEYDAIMACQRAFYPEVLTDDVVARIRDCIIFHQRPLRSCKHLVARCELERHDVCANGRVRNCGPRVAPRSSPLFQVCKIWESINNLNIRNKRNDTLYISMERKRAIFDFMNTHDRLKAGDLKSLLGERSREWQFGKATGAGLQGNTTYCAIARALGDYAGRDGLLRFDLTTVDSMRADTETGEIAKEIDPAFERQPLYRLWHALYSISDMEELRAVLRNGFGIGDEVVLDNLCRLDFVKSGYGNKSSRAMRRILPYLQEGMQYYDAKRAAGYDDTALTKEQNESRPLADSLQPVQKGELRQPVVEKILNQMVNLVNALMSEYGRFDEIRVELARELKQSREEREKATKAIAAATREGDEIARRIREEYGLTPTRSRIQKYRMWKETGQICMYCGCPVNVTEFLSGFGVEVEHVIPRSVLFDDSFSNKVCACRICNAEKGSRTAFDFMKSRSEGEFNAYIERVNDLAEKGKISNAKRKKLLMPASELPEDFIERQLRESQYIAKKAREMLQSVCRNVYSTSGSITDFIRHLWGWDEVLHDLNFERYRNAGLTERVEREVDGRRFSVERIAGWSKRMDHRHHAVDALAIACTKQGYIQRINNLSSLKDVSFRPYSHGEQGEAVRQRLTRLERYIRMQPHFTTAEVARAVDGIAVSFKSGKRAAGVGKRYVYRGGKRVCVQRGIIIPRGALSEETVYGRIRNSESGREEYVVKYKIGTITSKHLESVVDKRIREILRSRLEQYGGKPEKAFAEPVLDHQGRVIRSVRRRVTSSNNIPLRYNEQGEPIAFVEPGNNHHVAIYEGADGKLHEHVVTFWHAVERKKYGVPVIVTRPGEVWDSVTSDMPESFLRQLPDSPDWHFKFSMQQNEMFILGMDEESYRDAMQRHDYAALCKYLYRVQKLSQSYYVFRHHLETSVDDEYNGVKKESLSIKMGKMIRIVSMKALQAQNPHKVHVGITGKIFEL

SEQ ID NO: 6546 - protein, 965 aa, unidentified
  REGION 1..965: note = Description of Unknown: Cas Enzyme sequence
MSSEGNAKYYVGIDIGTDSVGWSVTDHQYHVLRRKGKALWGIRLFEEAKTAEKRRFNRTNRRRLQRRKQRIRLLQEMFAEEIGKVDPKFFQRLDDSAFWLEDKQEQQIYSLFAGESYTDVDYYREYPTIYHLRSALLREKREFDIRLVYLAIHHLMKHRGHFLFSGVGDAASFDTTFQKFRDCLEEEFGIELACDSEESFAEILKDKRMGKTGKCAGLTAICHVGKENRQLKEILKLITGMKVSLSAVFEDEALKEAEHNKISFSESSYEEIRLDLENEIQERAGILDVFHAVYSWAILADILAGGEYEGNAYLSVAKVHTYEKHRDDLQKLKKLVRKYCPQEYASCFSSNQEKNNYCAYIGSCRKNGRRKQMKRCSQEEFQKFLKKMLGKMPSGDLEVEEVKKEVENGVFLPLQVSRDNGVIPYQVNKLELEKILEHVEMYLPFLKQVDTKCGKSVREKIIELFEFRIPYYVGPLNTAKGENCWMCRKEPGAVRPWNFDQKVDRDQSAEAFIMRMTNPCTYLENERVLPKNSLLYSEYMVLNELNNVRIRNEKLPVELKQDIYQNLFKKEKRVTGKRFLEYLNTNGYDLKRDEISGFDGDFKASLTSYRIMKNIFREEIEKYSVQQMVEHIILWITLYGEDQKMLRRVIRKHYGENLTEEQLQALSRLKFQGWGRLSRRFLDEIEGMDRSTGECMTIMQGLRNTQNNLMQMLSQQYTFMETIDEENGGYHVEEITYDHLVKDIVASPSIKRAVWQTVQILEEIKGVMGCEPEKIFIEMARGPEEKKRTVSRKDKLLEIYEAIKEEAPGWKEELEKYSEGDFKAIKLYLYYTQMGRCMYTGKRIELSQLNQADIWDRDHIYPQSKTKDDSLDNLVLVDRTANARKSDGLISAEIQRKMGSTWRNLRDKGLISDKKYERLTRTIPLTDEELAGFISRQLVETRQSSKVVATLLKRIYERAEIVYVK

SEQ ID NO: 6547 - protein, 1132 aa, unidentified
  REGION 1..1132: note = Description of Unknown: Cas Enzyme sequence
MVLSRGSGRLEETMNYRIGLDIGIASVGWAVLENNEEDEPNRIVDLGVRIFDIAEIPKTGASLASPRREARTARRRLRRRRHRLERIRFLLEQQGIVSITEFMKRYYSQDLPNVYELRVEALERKLTKDEFAQILVHIAKHRGFKSTRKAKSEDKKAEEENGKVLNAARENKALMEEKGYRTVGEMIYKDEVFRTTAPWSVEGYILSPRNKEGNYRHTILRDLLVEEVVIIFDSQRKFGNDWATKFLEQSYITILTSQRSFDKGPGNQPDGTPSPYAGDLIEKMVGKCTFEREEKRASKAAYTSERFVLLQKVNHLKIVDGDGNVRSLTQEERQIIIDLAYAKEKVEYTEIRKKLKLNEREIFKDLNYGKESIKKVEGSKFISLQYYHQFKKILSDFNWENLKEEDITKLDKTAEILTLYKSDDNRKEQLKNFAFTEEQMDGLLEMNPNKFQHLSIKAMKKIMPYLEEGLLYNQACDCAGYDFKGDNKQEKSMFLKGEVVNCVLEEIPNPVVKRSISQTVKVINAIIREYGSPQAVHIELAREMSKNFDERRDIEKQIKKNQESNEDTIKQIKEYGVVHPTGQDIIKFRLWKEQNETCMYSGNHIPLERLFARGEYDVDHIIPYSISFDDSYRNKVLVEAKYNREKGNRLPYEYFGDKEDYWHKYEILVNSTIKDQRKRQNLLKKSFTEEERLAFKERNLTDTKYITRVVYNLIRNNLLLVPYTNGGKEKKIKKVFAVNGAITAYMRKRWGLGEKSRVTDKHHAKDAVVVACCTDGMIQKISRNVQGRELAYAGNFQFIDVVTGEIRDRNNFTREEWDAEYGVKIPTPWKWFVKELEMRMADKPMYFMDDLRKMGYPYNEKVEPIFVSRMPNHKVTGAIHADTIRGPRHYDEEGIVLTKTDIKQLKLDKEGEIQDYYSPDSDRLLYEALKKQLQLFGGDAEKAFAQPFYKPKADGSEGPVVRKVKLMKKLTMGVKVNGGTGIAENANGAMIRIDIFKEDGKYFFVPVYIRDTLKKELPNRAATAHKPFSEWKAMKEENFLFSLYPRDLVYLKKKNGIKLKKSIIEEKQKEEFWAYFISANISTASIAGIAPDRSFEFEGLGIQSLEIFKKYHIDVLGHKYEIKNEKRLRFNE

SEQ ID NO: 6548 - protein, 1360 aa, unidentified
  REGION 1..1360: note = Description of Unknown: Cas Enzyme sequence
MNDEKKLKPYNIGLDIGTSSVGWAVVEEETNKIMKKQNKALWGVRLWEVKSFNNATPAESRRMFRGSRRRYDRRRKRLKLLRKIFEEEMNKIDPTFFTKLKESAYQEDDDRNKTIKQTSKDKLSIQKYYKKYPTIYHVRQAVMNGTETDIRLVYLAIHHIIKYRGNFLYTQESFNINNLNIQNKLQSIFETFSNLNTTLEIKEPSDIDYEKLEQALLTTSKADRKILVSEVLKEILPNESVKEFAKMITGGKFSICKLFGLEETNDNKITISFKGSDYDDKYNDIESAASSMIEVLNEIKELYDMLFLTELFKGKEHTNLSSLMIERYETHKKDLQFLKTLIKPKEQDSENTKKIRQDNYKKLFKTKGKKICIYEEYIHNKISYEDFKKELNQILSNVLELETNQKILDEYTTKHQKRIENGDFLPRITDSDNGKYPYQLNKDELIQIIENQPYKFLKETMQKENGKTVYKLVQLLEFRIPYYVGPLNTTTDKSDVKNPNAWLLKRDGKESIMEITPFNFDEVIDKDKTAEEFITRMISHCTYLLKEPAIPQNSILYSEFKVRNELKQIKINGHHLPLELQDSIYKGLFLKSEKTIDEKTFKRYLKQNNILPMYDDVEITGYSASLKFANTMKPYVDFLGENGVFKNTSYTTKEAEEIIRWITIFEDKEILQRKVKEKYKELSNEQIQRIGNLKYKGWSNLSEKLLTGIYYENKVTASFQSIMDLMRETEDNFMQILSKKQYGFQKQIDKQNEISEIGKISYQLVENLVTSPATKRGIYQSLKVIEEIVEYIGYEPANIILEMARGKEKKQRKDSKKDYLLKLYKDCKNNIQDYEKLTRQLQEQDPQKFDNQKLFLYFIQEGKSLYSGTPLNIEDLESYEIDHIIPRTLIKDDSIDNKALVLREENQKKAASFTVPKEYRDKCSVWWDKLEKNGLITGKKKYNLQRAYYREEDIEGFINRQLVESRQIMKHVGNILKAQYGKSHIIYLHANVSSQYRAKYELFKFRELNDYHHAHDAYLAAVLGNYKEYYLKNADFETLKAKNQEWFEQKKYKEMNYGYLVNSLEVDSFHNKTGEVFDAPKFIKRIEDTLYRNDILISKKTEIKTGEFYNQTKNKKGLKGVPLKDNMPVEKYGSYTSLNPTYAVVVKYNKKGKEEQRMMGIPIYIEEKSKVEPSLKENYLKNLLSLKPTDDIEIIKDRIPFFSILDWNGQICSLVGATDKVEVCNAKELKIEKEKMKRWKYTFNRLLNGKKSDNLTDTIYEEQLREILDYILVKMEKEYLLYKNLLPELKISLESKIKDVELLEKVIKELLNLLKFNSKTANLKDIELSSAYGKKHSRIITNASIIYQSTTGVKTRRYEF

SEQ ID NO: 6549 - protein, 1419 aa, unidentified
  REGION 1..1419: note = Description of Unknown: Cas Enzyme sequence
MKTILGLDLGTTSIGWALVKEAETSEEKSSVVKIGVRVNPLTVDEQTNFNKGKPITTNADRTLKRSARRNLQRYKLRRKYLVTELKQAGIINDESTLAENGPGTTFETLRLRAKAASEMISPEEFARVLLMINKKRGYKSSRKVKNDDEGQIIDGMDVAKELHEKNLTPGEYVYNKLNEGQRHIPEFYRSDLQAEFDRIWEFQKQFYPDLLTDGLRDELVGKNKNQTWAICQKPFDLQGIKHTVKGAELRKENYGWRSKSLYEKLDLESLAVVLQEINSDINSSSGYLGSISDRSKELYFNNQTVGQFLVEKINDNPHFSLKNKVFYRQDYLDEFEKIWSVQSRFHPQLTSELKKDIRDIVIFYQRPLKSQKGLVSICELEGHEIEVTADGKTKKKLVGPKVCPKSSPLFQEFKIWQIINNLTVNGQPLTQENRERLFDRASTCDKLSETEIIKCLRPQKEEKPQGSLFDDEDMYDEKALMRIKAKKKEVKLNYKGMDGNKTFAAVLKACSRIIVLTGHDEFDFSKMPYSEAAKTISGIFSGLGYKTDFLHFNSDLESPEYEKQASFRLWHLLYSYEGDKSASGIDRLVDKVMEITGMEREYAKVIAGISFAPDYGSLSTKAMKKILPYMKAGNEYSLACTYARYNHSKNSLTKEQIETKELKDRLEILPKNSLRNPVVEKILNQMSNVVNTVIDEYGKPDEIRIELARELKKSAAEREELSKAITDADKKHKEIREKIKKDFPEITNPSRNDIIRYKLYQELKDNGFHTLYSDTYIPYEKLFSKEFDIEHIIPQARLFDDSFSNKTLESRQINIDKSNSTAYDFVKGRYGAKGLSEYEARVENLYKLNSISKAKRNKLLMPLSDIPSDFIARDLRDSQYIAKKAKSMLESIVRYVVSTTGSITERLREDWQLVDVMKELNWNKYDRLGLTEIIEDHDGRRIRKIRDWTKRNDHRHHAMDALTIAFTKRSYIQYLNNLNARISKEAGKEYLMDLSDFDLSDLPKSERSNAVRAIENTQLYRDSKGKLRFIPPMPLDEFRKEARRHLENVLVSIKAKNKVVTRNVNKTKCKGGTNKKVQLTPRGQLHNETVYGRIQRYATKLEKVGPSFTLDKIARVASPVYRAALEKRLSEFGNDPKKAFSGKNGLDKAPVYIDAMHTRAVPEKVALLSMEEMYTIRKPVSPDLKIEKVVDKGIKRILQARLEEFGGDAKKAFSDLENNPIWLNKEKGIQIKSVKIKGVNNAEPLHDKRDNKGNTILDADGKKVPTDFVNTGNNHHVAVFRDADGNLQEQVVSFYEAVGRINLGLPVVDREYKKDEGWEFLFTMKQNEYFVFPNKETGFDPKEYDLLNPDNYALISPNLFRVQKLATKDYVFRHHLETTVEDNATLKGITWKRGGLAMLNGVVKARINHIGQIVQTGEY

SEQ ID NO: 6550 - protein, 957 aa, unidentified
  REGION 1..957: note = Description of Unknown: Cas Enzyme sequence
MKRVLGLDLGSSSIGWAVVDERNDEILNEENGRCAKKDRIVDIGSRIIPLSVDENTQFSKGQTLTKNADRTKCRTQRKGYDRYQLRRALLLDELRRLGMYDGSTLKLSKLDLWGLRAQAVNNKISLRELGRVLCHLNQKRGYRTVKSDFEDKKQGAYVQAVVERYGELHDRGLTIGQYLYEGLKSDPAFRCKERIYPRNAYVEEYDAIMARQRMFYPDVLTDEVISHIRDYIIFHQRPLRSCKHLVAKCELERHDAEIGGRVRNCGPKVAPRSSPLFQVCKLWECINNLNIRNNRNDPYILSIEQKRMIFDFMNTHGKLKVNDFKSLLGIKSREWQIGKSLGTGLQGNTTYCAIAEALGNYACKEDLLRFDLHVIDACSANPETGEVLKIIDPSFESQPLYRLWHTLYSISDISELRDALRNGFGIEDDAALDALCRIDFVKSGYGNKSARAIRRILPYLQEGMSYYDAKCAAGYGDTTLTVEENEVRPLADALSPLRKGELRQPVVEKILNQLANLVNALMSEYGRFDEIRVELARELKQSREERAESTKMIGAATKENEEIAARIQNEYGLLPTRSRIQKYKMWNESGKICMYCGQPVNVMEFLQGFGVEVEHIIPRSLLFDDSFSNKVCACRKCNKEKNNRTAYDYLKSKSEGEFNAYLSRVADLAEKHMISKTKQKKLLMPASELPEDFIERQLRESQYIAKKAKAMLQSVCRNVYATSGSITDLLRHIWGWDDVLHDLNLERYRNAGLTKNIERELDGRIVSVERIAEWSKRMDHRHHAIDALTIACTKQGYIQRINNLNSLKEAAFRSFSDERQDASTQRRLTRLERYIAMQPHFSTSEVAAAAENIAVSFKSGKRAASVGKRYVYRGGKRTCAQTGVIVPRGPLSEETVYGRIRNGENGKEEFVVKYKVGTISLKNVDDVVDKRIREILRNRLEQFGGKPEQAFAEPVLD

SEQ ID NO: 6551 - protein, 1119 aa, unidentified
  REGION 1..1119: note = Description of Unknown: Cas Enzyme sequence
MNTLDTSHVLEQWVKHNFYAPDVVVLGIDMGIQGIGIAVRKGDKLIYCKTLLLELPKAKALETRRQFRAARHARKNRRVRMRRLRELFQRHQLPWVDDDVSSRSDPILLRYRAIFGSNPLASREALSLCIRSCVERRGYDYYAMTGGENEEFPWGEEPKFSDAKRWLSSAYVDEEMKKKLLEMASLLKSRGGELSEKERGEWEQLIDEQAEKAKDFSIPAKLKEYAGYGVHTNKRRWKGLKYPRSHVEAHLRDILERHRHLIQDYDDFCKALFLPCTTKAEKKRAIFHYNRKTPAEAEKHYQKKIKRCPYCSWLGLSGAQCGTQGDKDIRKWNVVDFVSNRTFEWTMNKLPLGRLPMPEAGVRVLLEAIDNGVNRWSDIKKAWEKALRPYVLGKGDWNTKPLQQLKDLLAPGNKTARAGISPEAARELLKQVTSGGTCYDPASMEQVKKEIGLYEERKKIRECSGTYPQAQLLLGALRKHPREGQDAFAVHGFLQKLFETELAAQLDGKKVPDYCVIECVRNAPANQDQKSEMEKKQAENRKRREKQAESYGKQNPTRADYLRMRLFEEQGGGVGKPARCPFTGEELGTDPFDRDHLELAHLFPNARGGLYIVDNLVLTRRETNAAMGNRTPREAAAAALPGWLSWEEMQRRSKSFRWGKMKDYLFAFTPTENQPFPDFNDAALTRPAQLAVALRHLAACWMGIDQDPEAMRQRIGTPSGSYTAAARRGMLEEGYVKDRSLHEHHRIDAAVMTCIPPAEGINNVRYGGIFLSKVVERSRRLSTLEGLPPFELRQELEKPCETSPIISHRGDDKSRSLGDSTFWRVDAERMTSQRTPLLADKKVTAGNILATLRRMGISPQKLPTEKEIQKWLERRLPLVQGDPDVNQSDYLLLSDGRTPVKRIWKFGDPGKGKGNLQQSPLGWSGIITGEGKFHQLRKLGGTNDRMEIWLGWDKDRKCWKYQKRPIPTARALEGLKRMGIPWRGREGSPSWLTDLLDSKGAKDMKTLVCGTLPPHAQKVGVLRKGDVFHVKFKVDDNKLKSLKKPPNFNPNAHPVITEEKDSWGSISAINSNEQVEFKCLTMSERRVLKLRKVSDLARLLGLPEEPERLAREMNLIPPS

SEQ ID NO: 6552 - protein, 1432 aa, unidentified
  REGION 1..1432: note = Description of Unknown: Cas Enzyme sequence
MKKILGLDLGTSSIGWALVNEAENSDEVSSIIKLGVRVNPLTVDEMQNFEKGKSITTNADRTLKRSMRRNLQRYKLRRDALIELLKKVGFITDKTILSEQGNRTTFETYRLRAKAAEEEISLEELARVLLMINKKRGYKSSRKVKGEEEGALIDGMEIAKKLYDEDLTPGQLCLQLLESGKKFFPDFYRSDLQEEFNKIWNFQKQFNPFSFCDVAKEEVKGKNKSQTWAILAKYFVETKKVNVWNEHEAQTENREEVYKLVGLKRTVKGEELKKENYRWRVQALTEQLDLEKIAVVLQEINGQISASSGYLGAISDRSKVLYFNRQTVGQYQMAELNKNPNMSLRNMVFYRQDYLDEFNVIWEKQAEFHKELTPELKKEIRDIIIFYQRRLKSQKGLISFCEFENREVVVEKEGKKQTKIIGCKVIPRSHPLFQEFKIWQTLNNIEVFVGEKKGKRKKSNVSSDLFGDTEDALITEGRRFLYQEEKKILAKELSIKKGLTKAEILRLLFENPQELDINFKQIDGNQTGFALFSAYSNMIEKYGYEPLDFKKPAEDLISQLKTVFTDLGWNTDLLFIDLDKENKEWEKQPYFRLWHLLYSFEGDNTPTGNGKLIEKIMQLCGIEKEYAIELANVSLQDDYGSLSAKAIKKILLYLKEGNQYDMACEYAGYRHSKSSLTKEEIENKVLKDKLEILPKNSLRNPVVEKILNQMVNVINTVMEVYGRPDEIRVELARELKKSAKEREELTKAVAKNTREHEEIRKVLQSEFGMINVSRNDIIRYKLYEELKDNGYKTLYSNQYIPREKLFSKEIDIEHIIPQSRLFDDSLSNKTLEYKSINIEKGNKTAYDFVKEKYGEEGLQQYLNRCENLCKDKKAKLRKLKMELNEIPDGFIDRDLRNTQYIAKKALSMLTEICRRVVATTGSITDKLREDWQLVDVMKELNLPKYEALGLVEVYEDKDGRKIKRIKDWTKRNDHRHHAMDALTVAFTKDVFIQYFNNKNVAWESDSKEHTNIIGIKTRYFESGKAVPPIPLGQFRVEAKCHLENLLVSIKAKNKVVTTNVNCIKKKGGTYKNTQQTPRGQLHLETIYGSHNQYVTKIEKVNASFDAVKIATVSKQDYRNALLKRLEVFGNDPKKAFTGKNSLEKNPIYLDRAQTIQVPDKVQTVELETAYTIRKPVDPTLNVDKVVDKKIRLILEQRLKEYGGDAKKAFVNLDENPIWLNEEKGISIKRVTIRGISKAQALHDKKDKDGNFILDETGKRIPVDFVNTGNNHHVAIYRKPVLDKKGQVIFDDEGNPMHELDEDVVPFFEAVTRANLGIPIIDKDYKKSEGWQFLFSMKQNEYFVFPNEKTGFNPKEVDLLDPDNYAMISPNLFRVQKISTKNYMFRHHLETTVIDNKSLRKIAWELIQAPNKLVDIVKVRINHIGQIVSVGEY

SEQ ID NO: 6553 - protein, 1355 aa, unidentified
  REGION 1..1355: note = Description of Unknown: Cas Enzyme sequence
MAMGSYEGKYYLGLDVGTDSVGYAVTDEEYHVLDFRKRAMWGSRLFEAANTAEGRRVLRTNRRRLQRRKWRIELLQELFAEEIGKVDSGFYQRMKDSMLWPEDKTERQIYSLFCDETYTDVDFYRDYPTIYHLRKALITEEGPFDVRLVYLALHHLVKHRGHFLFPGSVENATSFLAAFEKFSQTLSDELDIELECLSEQELAEVLKDKKRSKKDKNAEVMKLLQCSKTDRQLKAVIGLMCGLTVKLADLFDDAALKEAEKASICFAGEAYEELWAQIEPVLQERCVVVDTIKAVYDWSILADILKGGEYEGSSYLSVAKTAAYDKHRKDLNILKEVCKAADRDMYRGFFQKEEKDNYCAYIGYTIQNGKKKKVDKCSYDDLKKRIKKIISMYYQDSQDERIAYILKELDGESFLPLQVTKDNGVIPYQVNEIELEKILENARSYLPFLGQEDESGVSVTEKIISVFKFRVPYYVGPLNTNENKNAWAVRKEEGVIKPWNIRDKIDFDQSGERFIRRMTNKCTYLIGKDVLAKNSLLYSEYMVWNEINNIKLGTEKLDIQLKQAMFDTLFKKKKNVKRKDILDFLKSEGVEIKQEQISGIDITIKSSLASYHDFRKIFGEKVDAYQTKQMIEDIILWITVYGDEDQMVKRIIRQNYSEEEISEEQMKKILRLKYQGWGRLSKEFLSELEGADTETGEVYTIISALRNTNDNLMQLLSQRYTFMEAIEEENQQDKKEITSMTYESLMEDRVASPAVKRASWQAVLIAKEIKKIMGKAPAKVFIEMTRKEGEKKRTISRKEQLLKLYHQIEKEESRKWIEELGKRDEKDFRSIKLYLYYTQMGRCMYTGEPIDLSQLTDATVYDRDHIYPQAKTKDDSLENLVLVKRTVNAKKSDELLSAEIQNKMQPFWKCLKEKGFITDKKYERLMRKTPLTDEELAGFINRQIVETSQSVKILAEVMQELFKESEIVYVKAKAVSEFRQEQLKMVKVRSLNDYHHAKDAYLNIVVGNVYHEKFTNNPLRWLKENGERHYSLNRIYDFDLIKDEKVIWKRGKEGSIRTVSEQMKKNQIQYTRYAITNKTGQNGGLFDQNPVGKNQNPGVPLKKGMDKNKYGGYKTITPACFALIESEDKKGNLIRSIEAVPLYLKKQFEVGTASFEEYCETVYGLKNPRVLLSQIKKDTCLVINRFPMHLRGTTGKQLILQGAVQLCLDGEFEFYLKKIEKYIQRNLERTDKKTLLELGANDGITKEENLRLYQELCRKQKDTIYQYRPNNQYKPLLNAQERFEQLSGEEQCIVLNEILWLLKCKPNAANLSLIGGGSRAGTIKLNKIITNCDSVVMKNQSVTGLYEQTINLLKV

SEQ ID NO: 6554 - protein, 1237 aa, unidentified
  REGION 1..1237: note = Description of Unknown: Cas Enzyme sequence
MKVLGLDLGTASIGWALIEIDDSNSISKILGLGSRIISYNNSKDESDFSAGRGESACSVRTSMRTARKLIDRYQLRRANLKSALIALSLMIPDETFPPLSPADLWKLRSDAATMGVRLSKSEIARVLLHLNQRRGYKHSKSDIGETKQSEYVERVNNRYAEIKDLGLTVGQYFYQKLKGSETQSKSGHSFYTYRIKEKVFPRAAYAEEFDRMMETQSEFYPDILTPDNIRMLKQTIFYQRPLKSCKHLVSFCEFERKIFKDAAGNLVDSGPKVAPRTSPLTQVCKLYESINNIRIVNPRLKKLTKDKQPSLFNELSDTAADIRKYQYEYKLTGEERQRIFEYMNCHEKLSETELMKILGLKKSEGFKLDKAAAKGLQGNTTYCKISEALGAYEDKDALLKFDLTDTDYVIEETGEVITKISPEYIRQPLHQLWHTLYSISDKDELLNCLRNKFHIEDKSTLEKLYALDFVSPGYSNKSSKFICKILPYLRDGYQYSDACKMVGVNHSDSLTKQENNRRTLSPHIGLLKKGELRQPIVEKVLNQTVNLVNAIINKYGEITEARVELARELKQSREDRKDTADRINRQENVNKELAARISELGIQPSRRRIQKMRMLEETGNKCMYCGKVITPTQFIEGHGYEIEHIIPRSVMFDDSFSNKVCSCRECNHEKGAMTAYDFMKSKTDQEFNSYCDRVEELYKKGSISKSKRNKLMMALSEIPQDFIERDLVESQYIAKKAREILRQSIRDVHASSGSVTSYLRHLWGYDMILHDLNLPKYKDAGITEKIEYEHKGQTHLTERIKDWSKRKDHRHHALDALVIALTRQSYIQRLSTINASGIKDTADYVSLDKWAVTQPHFSVAEVANAVDSISVSFKAGKKLVSSGKRYIKKKGKRICAQSGILVPRGPLTKESVYGFIKVYDGKKNIKHAVNNPDLIIDDAVRKLIQKRLDQYNGDCTQTIKSFKKDPLELNGKEITEIGCHRIESVMNYNIDSLKKESDIKSIVDPVIRKIVKDRFDEVGNKNFVKSLADKPLYSDNGSLIRTVRCFTGLKPDTLACVRFDQKGSPIGFSQTRNNHHLAFYKKPDGQITESVVSFWDCILRKRYGIPVIVNDPNTAWEQIANLEDNLDIQKLAASLPPVNSEMVMYMQRNEMFVLGMSDDEWNDAVKAKDLVTINRHLYRVWKLAAKQYCFKFHTDTKAAIQEGDKEMKQYYMLTSISALQALNPKKVKVSILGEIAL

SEQ ID NO: 6555 - protein, 1486 aa, unidentified
  REGION 1..1486: note = Description of Unknown: Cas Enzyme sequence
MKKRILGLDIGTNSIGWALVEIDSETKIGRIIGLGSRIIPMAQDILDKFSGGAPIESQTALRTNYRRTRRLHERHLLRRERILRVLNVLGFLPEHYAASIDFERHFGKFVGYDEPKLPWRKMNDGSVEFIFQASFNEMLNDFRKAQPQILYNKKGEPAKIPYDWTIYYLRKKALSQKIEKEELAWLLLNFNQKRGYYQLRGEDEEDSKQTIEYKALKIVNVIADETVDNNGQTWYSLELENGWIYRRQSKISLSAWKGQTRDFIVTTDLDELGKVKKDKEGKEKRSLRMPKEEDWLLLKKKTESDIESSHKTVGAYIYDTLLQNPSQKIRGKLVHTIERKYYKEELKLILNKQKEFHPELRDNDMYADCVRELYRNNEAHRLVLSKRDFTHLFVDDIIFYQRPLRSKKSTIDNCPLEYRVYIDKSKSGLEVKKPLKVISKSNPYYQEFRLWQWLRNLAIYRREDDCNVTTDFLSTDEEYAALFDFLSQKDQIEQKQLIQYLLKNKGIKDREESKKYRWNFVEDKKYPCNETRCEMTKRLKKVNDLPIGFLTAEVEQRLWHIIYSVTDKVEFEKALQSFADNYNRDNEFKLDTDSFVTAFRKFPPFKSEYGAYSEKAIKKLLPLMRIGHYWSWDAIDREVQERIDKILTGEYDTNIPDRVREKLAGLTCREDFQGMPLWQAQYVVYGRHSEASAIEKWTSVEDLNSWLKDFKQYSLRNPIVEQVITEAMRVVGDIWKYYGNGMSDFFDEIHIELGRDMKQPADKRKRLSEVIQQNEKTNTLIRELLKELQAENGEVHPESSKHQELLKIYEEYAFRDNEGRDKNEIDDMSRIRGSKEPTHAELTRYRLYLEQRYRSPYTGQIIPLGKLFTDEYQIEHVIPRSRYFDDSLSNKVICEAAVNRLKGSYLGMEFIKKYQGQKVETGFGKTVTILSEYDYKKFVQKHYAEIPTKRNKLLLEDIPEKMIERQLNDTRYISRFISTVLSNIVREENNDDGVNSKNIIFGNGVITSRLKSDWGLADKWNDLMLPRFERMNEKAGSNSFTRWSKQHHKFLPTTDSLPKKIELKRLDHRHHAMDALVIACMTREHVNLLNNKYAQREYDKIRYDLKHKLMRFEKESYFDEQKHKQQERYVSKDFLKPWDSFVTDAATALSQTVVSFKQNMRIITKATNKHEKWIESDGCKKKELVAQKGVNWAIRKPLHKDTVSGKVDIKGVKVSKGQILVAYRKELSSIFDLKGKDITDKKIKDTLEHITDKGIQKILRIYLLDKNNDPQSAFSPEGIEELNRNIAYYNNGKPHKPILRVRVYEKTDKRFVLGTRGNKSTKYVEAAKGTNLFFAIYANEEGMRSFDTIPLNEIVERLKQGLPPVPEKNAKGEALLFYLSPNDLVYVPTKEERDNRIDINYIDSNRIYKMVSCTKYQCFFVPHRIAYPIVSADDLKKDTSAYESASCRISELGSNNKSEKAWDEEIMIKQVCVKLQVNRLGNIKII

SEQ ID NO: 6556 - protein, 1100 aa, unidentified
  REGION 1..1100: note = Description of Unknown: Cas Enzyme sequence
VSYILGLDLGETSLGIAILNEKNGEPISLDSMGVRIFPDGREDKTKTPLAVKRREARGIRRNLDRRLKRKEKLLNFLIENNLISQNEEERLKLKELNPYELRAKGLDEKLTLDELSRVLIHINQRRGFLSNRKVDNNDEGSDLKSAIKNTKEKIESLGYRTLGEYLYSLMQKDSHKDLRVRVQEIQEKKILDKINKDTGEITKQEKMVSVSDYNYFPSREMYKREVQEILKKQAEFYPQLNNRFFDKELNKEISIKDKIVDIIFYQRKLRPQEVGKCQFEDGEYRCPKASPLFQEYRILCELNNLELCDFNDGVCLSDGDRKEIKQMLMSQKEVKFSAMRKKLGIGANLLFNLESDERDKLDGDKIGYELSKKGNFGELWQKINEDKKEEIIDRLLNEEDEEGLTKYLKDNFAELTEEQIENIKNINLPDGHSSLSLKAIKKLIKHLRDGKRYDEACELVYGSHSAKNNSLNLNELPYYGEILKTHVIGGTTDSQDKDNPEKYFGKITNPTVHIGLNQLRYCINKIIQEKGKPEYIAVEIARELKLNKDQKKRLKAEQDQNIKDNKRINEELEKLGLPQNYDNRMLYKIWERLSPKDVNKRCCPFCGEKTISPSDLFSGLYHIEHLLPFSRTYDDSINNKVIACSSCNTEKGDRSPFEAWGHDSVRYNEIMARVELLPKKVQWRFEKNAMEQFNDDNKILARMLSDTQYLSKVACEYLSCLYPDDGKKHIRTIPGQLTEKLRYHWGLNKLISGDENIKDRKDHRHHAIDAFVVACTNQSTLNKISKASGQRYIKKTDKLIESLEPPFEKFDLQDIQRVVDNIIISYKEDHKDLKQAKAKNGSIAQLHNETNYGLIEDVDGKSGIFATRKPFIDIDRDLIMKSPDKDNKYIADDKIRKDLQELVVDVSDKQEVKRIVENYAKTARQNGTIKSIRIHEVKPYKSLMSVKDRNGKVYKYAETNGNYCAEIYMPNRGKNKGKWCVEIISNFDAHKKDFMPKWRKEEPEAKLIMRLFINDMLEIEINKDNESSAIKKLLPFAVDNRVIVRVKKMTNGIIYLRPHSIAKEVKADEFSWQGTGDGLQTANAKKVRISPLGKIIYLKK

SEQ ID NO: 6557 - protein, 1160 aa, unidentified
  REGION 1..1160: note = Description of Unknown: Cas Enzyme sequence
MAKILGLDLGTNSIGWAIVEQHETGYALVDKGVDIFQEGVAREKNNEKPAVQERTNARALRRHYFRRRLRKIELLKVLVRYDLCPPLSGKQLDEWKRKKVYPLTDEFIRWQRTDDNEEKNPYRDRYRALTEPLDLSERKERHALGRAFYHLAQRRGFLSNRKEQGGDAEDGKVKSGIRELTEEMERAGCTYLGEYFYRLYGRKEKIRKKYTSRNEHYLAEFRAICEKQRLPEELRTALHRALFYQRPLKSQKGQVGRCTFEKGKSRCPASHPLFEEYRMLCFINNIRIRTPDDAQFRPLSPEETETVRPLFFRKSKAHFDFEEIAKKIAGKGRYVCKGDRGDAACRFNFARTATVTGCPVTAALKDLFGDEWLAEICALYTLGAGKSERQILNDVWHALFSFTDEEKLRVWAQEKLQLSDDDARKFAAIRLPQDYAALSLNALCKILPYLRGGYRYDEAVFVANLKAVLPAAVWNDETRRHGIEQGIADLMANYTRNPYDRYDSKEQRISDYLHDCGIDNVRIDRLYHPSMIETYRDAQPDAEGVLQLGSPRTPSVRNPMAMRALFRLRALVNALLRDGKIDRDTKIHIEFARGLNDANRRKAIEQYQRERENEHAKFAEEIRRQYEAATGVQIDPSDEEVLKYRLWEEQNHQCLYTGKQIGIADFIGASACCDIEHTVPRSRGGDNSQMNKTLCENRFNREQKRAKLPSELPVHAEVMERIETLGWPKKIEDLQKRIEGQRRKSKSAASKEEKDRAIQARHKLQMELDYWRGKYERFTMTEVPEGFSNRQGVDIGIIGKYARLYLKTVFDRIYTVKGRTTAEFRQMWGLQPEYEKKERVNHVHHCIDAITIACIGRKEYDRWAQYTGDEERYERGEAAKPSFEKPWPTFTEDVKAVADELLVAHHTPDNMPKQSRKRLRVRGRVQCTGDGRPIYVQGDTARGSLHQQTFYGAIERDGEIKCVIRKSLDSLEEKDIDKIVDEAVRQKVKDAVEAVGFKAATDPGYTVWMNEEKRVPIRKVRIYAPTVTNPIHLKRQRDLSVKEYKRDYHVANDGNYCMAIYEGTDSRGKTKRTFEIVNNLEAARFFRMSRDRQAHPDLVPLSDEKTGYPLKWILKTGTMVLFYENSPEELYDCTPGDLVKRLYKLTKFSSMQSGNNKYGT

SEQ ID NO: 6558 - protein, 1145 aa, unidentified
  REGION 1..1145: note = Description of Unknown: Cas Enzyme sequence
MKHSDKENYYLGLDMGTGSVGWAVTNKNYEIIKKHGKALWGIRLFESANTAEERRNFRISRRRTERSKNRIALLQELFAEEISKKDLGFFQRMKESKYYPEDKRDYTGNTPELPYALFTDEGFTDIDLHKKFPTIYHLRHALITHPETKPDIRLLYLALHHIIKHRGHFLFEGKKMSEVADFTNAVQVLTECAKENNIEITLDSAQTSKLEKILKNKDINKTDKKKKISELIIENNKEENAKQKKSLAGLLAGCNIKLSELFDDKSLEEEEHNTLSLSDSNYEINISQIESVLADRFLLIMTAKTIFDWSVLSNILGSSTYLSEAKIQIYEKHKEDLLKLKSLLKSERSLYRQVFGVPESDKVANYSAYIGMAKKNGKKQPIEKKCSKEDFYAFLKKILYNFPCCEENKPIMEELLTEIEKGTLLPKQVIRDNGVIPYQLHERELKKILENAAEYYPFLNKKDADGYSITEKIQSIFYFRIPYYVGPINSYHRNLGSNNWAIRKNDVGRIYPWNFSEKIDEEKSAENFILRMINKCTYLVGEDVLPKESLLYAKFSVLNELNNLRIDGELPPVKVKQKIYTDLFMRHRNVTGKTLKKFLINEGIIQRDQKLSGFDQNFKSSLKAYHDIKQIAEGVSLSEAEKEDIIKDITLFSDSPKMLKNRLRLKYPALSDKQISQFTEKRYNGWGRLSRAFLEEIESKNTKTGENFNIITALWETNDNLMQLLSKKYKFFEVIEERNFQNTSEGAIIYEDIQNLYVSPAIKRPIWQTLRIIKEIEHIMGCAPERIFVEMARESGKKGERKISRRAKLQQLYQSCKKEAPELYSRLSENKDDNVFRRDKLYLYYTQLGRCMYSNEVIDFDDLFTNRYDIDHIYPQSNVMDDSLDNRVLVKRELNSNKADVFPVPSEYVKKCKELWITLRDKKLITEEKYYRLTRRETFDEGELAGFIARQLVETRQSTKAITQLLRKAYPKTEIVYAKANAVSSFRQKFDLTKVREINDYHHAKDAYLNIVVGNTYYVKFMKDAAWFIKNNPGRTYNLKKIFEQETVKRKNEIAWIPGDAGTIKTVKKWMGKNNILFTRRASEGTGGLFDQQILKKGRGQIPIKGGTIDTRLSSIEKYGGYNKARGAYFILVQSEDKKGNLMKS

SEQ ID NO: 6559 - protein, 1284 aa, unidentified
  REGION 1..1284: note = Description of Unknown: Cas Enzyme sequence
LASGAKIPYDWTIYYLRKKALKGAVTKEELAWILLNFNQKRGYYQLRGEEETENKGKIVEYYALKVISIEETEERKGKDIWYNIVLENGMVYRRTFSMKPDWIGKTKEFIVTTDLDIEGNPKCDKEGNIKRSFRMPKDDDWTLIKKKTESDIEKSNKTVGEYIYDAILSNPKQKIRGKLVRTVERRFYKQELIAILNKQKEFIKELEDEQLYIECTKELYRNNESYRESIADRGFTYLFVDNIIFYQRPLKSKKSLIANCPYEGYIYKDKKTQEKKTMYIKCIAKSHPLFQEFRLWQFIQNLRIYERQKEVGGKVLMDVDVTNDFFKSEDDIVSLFDFLNCREEISQEALFGTYFKIKKARGKEIKYPYRWNYVEDKSYKCNETHYKIISRLKKANISQEFLTKEREEHLWHILYSVSDKAELKTAIKNFGERNGLGETFVAEFINFPPFSKEYGSYSAKAIKKLLPLMRMGKYWKVEDIDTNTKERISKILDGEYDETIKNRVREKTILLEDITQFKGLPLWLACYIVYDRHSESKEASKWTCPEDIDNYLDKFKQHSLHNPIVEQIIMETLRTVRDIWTKHGQIDEIHIELGRDMKNPKDKRERMAKQAMDNENANLRIKTLLAEFMNPDYGIENVRPYSKNQQEILRIYEDGVLSNIDEVPDEISDIVNRLSFSDIKKKPSHSEILRYKLWLDQNYLSPYTGRPISLSRLFTNDYEIEHIIPQSRYFDDSFTNKVICEAEVNKLKDNMLGYEFIKAHHGEKVQLSQGEVVTILSIPEYEKLVQDCCKHNHTKLKKLLMDDIPDDFIKRQLNDSRYISKLVKSLLSNIVREEGELESISKNVITCNGSITDRLKKDWGMNDVWNRIILPRFKRLNNLTGTDKFTSISVNGHEIPDMPLELQKGFSKKRIDHRHHAMDAIVIACTTRNHVNLLNNESALSTNKNNRYQLSRKLRIYQEIVVERNGVTRRMKVAKEFIKPWPTFTIDAETALRNIVVSFKQNQRIINKTSNYYQVYNIEKKKKAFESQEKGDSWAIRKPMHKETVYGEVNLRKIKAVSLSDAIGNIKSIVDKDLKRKIQELILLGYNDKRIKKYFEDNKDVWQDINIKKIPVYYFTKETKERFFATRFNNDLVTLFSGVSKTDKAKDIIESITDTGIQKILIRHLENHDNNPVTAFSADGIDEMNCNIKALNKGKEHQPIFKVRVYEKADKFAVGRKGNKSKKFVEAAKGTNLFFAIYENENKRSYATIPLNVVIDRQKNGLSPAPENEKGYTPKYVLSPNDLV

SEQ ID NO: 6560 - protein, 962 aa, unidentified
  REGION 1..962: note = Description of Unknown: Cas Enzyme sequence
MKRVLGLDLGSASIGWAVVDERNDEILFEDDNAVSSDNIVGIGSRIIPLNVDESTQFAKGQALTKNADRTKKRTQRKGYDRYQLRRALLLDRLRQTGMYDGQMPRLSTLGLWGLRADAVERKISLPELGRVLCHLNQKRGYRTVKSDYGDRKQGDYVKAVVERHEELHRLQQTIGQYMYNGLKADPAFRCKDRIYPRDAYVEEYTAIMKRQQEFYPDILTDDEIEYIRDYIIFHQRPLRSCKHLVAKCELERRDVSINGRIRNCGPKVAPRSSPLFQVCKIWENINNLKITDKQNEELYIPLDRKLAIFDFMNTHEKLKSNDLRSLLNIQSREWQFGKSVGSGLQGNTTYCAIAKALGDYADKDRLLQFDLRLADGRLADAETGEITKVIDVSFESQPLYELWHTLYSISDVGELRNALCDKFGIRDDAVLDALCKLDFVKSGYGNKSSRAIRKILPYLQDGMQYYDAKCAAGYDDTTLTSEQNEARPLADTLQPIPKGELRQPVVEKILNQLVNLVNALMSEYGRFDEIRVELARELTQNKEERKKATDYMAEAAKRNDEFARIIREEYGLVPTRSRIQKYRMWTETDYTCMYCGQPVDVKEFLQGFGVEIEHIIPRSVLFDDSFSNKVCSCRKCNREKGNATAYDYMKSKGDAEFNAYIERVNDLLEKKKISKNKYRNLLMQAAKLPEDFIARQLCESRYIAKKAKEMLLSVCRNVYATTGDITAALRHIWGWDNVLHDLNIDRYRAAGLTEGVEREIDGRKITVERIKDWSKRMDHRHHAVDALTIACTKQGYIQRINNLNSLKDVSFSSYSDEKQSEAHKHRLTRLERYIAMQPHFSTAEVAKAVAGIAVSFKGGKRAASIGKRYIHRGGKRICVQDGIVIPRGALSEETVYGRIHSRERGKDEVVVKYKVGAISSKDVDSVVDKRIREILRNRLEQYGGKPEKAFAEPVLDHQGREI

SEQ ID NO: 6561 - protein, 1087 aa, unidentified
  REGION 1..1087: note = Description of Unknown: Cas Enzyme sequence
MPREESGRSDQKDRIVGIGSRIIPLSVEESTQFSKGQALTKNADRTKRRTQRKGYDRYQLRRALLLDELSRLGMYDGSTLKLSKLALWGLRAQAVNHKIGLKELGRVLCHLNQKRGYRTVKSDFEDKKQGAYVQAVVERYGELHDRGMTIGQYLYNELKADPAFRCKERIYPRDAYIEEYDAIMARQRLFYPELLTDEVVAHIRDYIIFHQRPLRSCKHLVAKCELERHDAEVRGRVRNCGPRVAPRSSPLFQVCKIWESINNLNIRNSKNDSYVLTLEQKRVLFDFMNTHEKLKSNDFKALLGIKSREWQIGKSLGTGLQGNTTYCAIAKALGKEARKADLLRFDLQVTDRVNPETGEVLPIVDPSFESQPLYRLWHTLYSISAMSELREALRKGFGIEEDAVLDALCRIDFVKSGYGNKSARAMRRILPYLQEGMSYYEAKCAAGYDDTTLTAEANQARPLAEQLAPIQKGELRQPVVEKVLNQLVNLVNALLSEYGRFDEIRVELARELKQSREEREKTTKMIGAATRENETIAERIRTEYGLTPTRSRIQKYKLWEESGKICMYCGQPVNVKEFLQGFGVEIEHIIPRSVLFDDSFSNKVCACRKCNAEKNNRTAYDYMKSKGEGEFNAYLARVADLAEKNRISGTKQKKLLLPASELPEDFIERQLRESQYIARKAKEMLQSVCRHVYATSGSITDLLRHIWGWDDVLHDLNFERYRDAGLTKEVEREVNGRKVFVERIANWSKRMDHRHHAIDALTIACTRQGYIQRINNLNSLKEEAFRSYSDERQDAATQRRLTRLERYIAMQPHFSTSEVAAAVGNIAVSFKSGKRAASSGKRYVYRGGKRVCAQTGVLIPRGPLSEETVYGRIRNCENGKEEYVVKYKVGTLTLKNVEDVVDMRIRELLRDRLEQFGGKPEKAFAEPVLDPQGRAIRSVRCYTGLSATVPLRYNEQGKPNAFVKPANNHHVAIYEDKEGNLHEHIVTFWHAVERKKYGIPVIVTRPDEMWDSVTEEMPETFLRQLPESAGWHFRFSMQQNEMFILGMPEEAYRDAMEAKDYARLSDHLYRVQKLSHTYYVFRHHLET

SEQ ID NO: 6562 - protein, 1018 aa, unidentified
  REGION 1..1018: note = Description of Unknown: Cas Enzyme sequence
MGLDIGISSVGWGLLEIDENKNPQRILDAGVKIFSPGEVPKTGANKNLERREKRGSRRITRRREFRIDRTRKLLNINGYLGTEIINGKVSEQNNKLTKIYKMMIENYYKNKDTNPYKLKVEALDRKLSKDELSIILVHYAKHRGYKSNREEDTTDSIEGKVKESIEKNREIMSSSKYRTVSEMFLKDERFNERIRNSNDDYKLCVTREMYLEEINKVLNSQIKFGLITEDFKKEYIEIWSSQRHYAKGPGGNSKYGGNLIEKMTGKCKFDGLPRAPKCAPSSEIFVMLTNLVNFRYKDANGEFKSLTGEEIQKIVNLAKQQENISYSRLFKELNIVDASVKGLSATDKERTKAKSNAELKDINYKDYTEEQKKLYNKLRIEEINKRTFIKLNTYSKMRTTFTKQLGSDKWNEIKENFELLDLIAEILTNYKLDEDIKTEIEKNNIDELLIEPILSLPNCKDHMMLSLDLIKKLNKIMVDGITYDKAMAILNIDHSVINSNKEKQDLLIPINQSYEITNQRVIRSLSQARGIINSIIKKYGTPYAINIETARELSKSMDERRKIAKAQNEKRENNEKIKRNIADLFNKKFSSPEKISNTDVLKYKLWIEQNGKCTYSLENISLENLFDDNIVQIDHILPYSRTFDDSYFNKTLVLTKNNQNKRNKTPYEWFGSTEKWQEYKAFIENLNIPEKKKENYLLINLTEEIEGDYREQNLNDTKYISKYLTSYIKANLNVEKVGSPSGAITGKLRNYWHLNGLTHSYESETYRINEKEVSDEKKNRENHLHHAMDALIIAATSSSLIKKVSDYEKYKRFINNKTMGEIVEYATQNDSEFNIENFTDENDKIINSSLKEYVQEMRENKYFKTKDGRVRVLAPEPYKGFTEEAKIRVYEQDKNVMEYKLKDFNYNENEIRSSFPIIPKFTKTKASGKLHEETLYSLDKRNPKEIKKITRIDIKSKNFNMKKLENIVDKEAGAKEVYETIKLWLQNENGETAYKRIGDYPTSQKTGNKIKKIKIESP

SEQ ID NO: 6563 - protein, 1046 aa, unidentified
  REGION 1..1046: note = Description of Unknown: Cas Enzyme sequence
MMKEKNKIYYIGLDIGTNSVGWCLMDEHFRIIKKGRKNLWGVRKFDTAETAQKRRLYRSTRRRYNRRRERIRLLREIMNDMVLEVDPSFFIRMSKTSFLDKDDKKEVLKENYKNNYNLFMGDYTDKDYYKEFPTIYFLRQHLCESKVKEDPRLIYLALHHIVKYRGNFLYENQDFDVKKMNLEEDLKNFINRILEMNGYNSKIDNQQTIQILNQVNLKISRKEKVDKCLEILKVKKDEKAICKNILNGLVGLKFNVTKMFTNQSLKYTNDGKDEDIKLNFNDGNYEEELEKYIDALDEYIDYISEMKALYDKIFLKDIFRDIKDDSSSETMISKAMVERYNMFKNDLSLLKKVIKCNYGMKVYDDVFRNKNIEHNYYKYIHHPGKNSRDDFYGFIKKILKGQENEKEIYKRIELEEFLLKQNDRNNGIIPYQLNLYEMEKILSQQGEFYPVLKERKEDIMKILTFRIPYYYGPFTSSKFGWMKKKEGMKEIRILPWNHENVVDVDKTAKEFITKLTNYCTYLLDEKVMPKKSLTCQMFEVLNEINKIRVDEQLLSIDVKNKIIEDLFMEKKKVSEKDLLGWFKENHIFLNNENLNITGFQKEKQFSTSLSSWIDFKKIFGEINDNNYQMIENIIEDITIFNEKRILKRKLKKDYLLDDGIVNKILKLNYSGWSRLSYKLVNGIHCNNRFGPSATIIDVLKNSHMNLMEIINDKKLGYQDEIDKCNSKFDTKITSDDEIERLACSPAVKKGIRQTIKIVEELINYMGNNPKHIFIEFAREEGKKKRTDSQIKRLQAIYKDLKMQSEHDKYVKEQLNSKDNQTAINNDRLFLYFTQKGRCMYSGKILEIDKLSHYQIDHIIPRSLTPDDSLDNRVLVINEENQRKLDDLVVPEIVRKRQATFWKELYDEKLIPPKKYYNLTRAEFNEDQVQKFINRQLVETRQIIKNVANILLNKYPETKINPIRANLTHEFRLKYEIYKNRNVNDYHHAHDAYITCVIGAYINARFPNLESKYTYGDYLKEAKKNNNHEKSGFIINSMNYDAFNSDT

SEQ ID NO: 6564 - protein, 966 aa, unidentified
  REGION 1..966: note = Description of Unknown: Cas Enzyme sequence
IAGKQCSKEEFYTFLKKEVIGAISEAEKTAYLREEIEKGTFLPKQVTKDNGVIPYQVHLDELCKIIDNLKERVPVLKENEEKIRSLFTFRIPYYVGPLNGIRKGDSSTNWVQRKKKDKIYPWNFDEIVDEEATAEQFIRKMTNKCTYLIHEDVLPKNSMLYSKFVVLNELNNLRINGEGISVELKQKIYEDLFKRHRKVTQKRLKDYLVREGIADRNVDITGIDGDFKGTLTAFHDFKEKLTGCELRQEEKENIILNITLFGEDKKLLDRRLKSLYPTLTEVQRKGLCSLSYKGWGRLSGAFLEGITAPAPETGEAWTIIRTLWETNDNLMQILSEKYFFVQAVEEENGVEEINTVSYSLVEKLGVSPAVKRQIWQTIQVVTELCKVMGNPPERIFVEMAREKAERKRTEFRRKKLVDLYRACKAEEREWIETLEQTEEHQLRSDKLYLYYTQKGRCMYSGERILLEDLWDNNKYDIDHIYPQSKVMDDSLDNRVLVKKVYNAEKTDTYPIRESIRKNMQPFWKSLQEGGFISKEKYERLVRGTGFEPSELAGFIARQLVETRQSTKAVASVLKQILPDTEIVYVKAKIVSQFRQDFDLIKVREMNDLHHAKDAYLNIVAGNTYYVKFTGNAAWFIKENPGRSYNLKRMFTSDKDVARGGETAWKAGENGTIHTVKKVMSKNNILVTRRSYQEKGGLFDQQLMKKGKGQVPIKGSDERLRCVEKYGGYNKAAGTYFMLVESEDKKSNKIRTIEYVPLYLKEQIEKSGQEAVRYLIEERGLKNPRIILKRIKIDTLFKVDGFDMWLSGRTGNQLLFKGAVQLILSSQDEQILKKIIKFVQRQKENKNIKIVEQDKLPEEDLLRLYNVFVDKIQNTIYHSRLSAQEETLTEKRDEFIRLSKEDKCVILYEILHMFQCQSSAANLKLIGGPGKAGILVLNNNVTKCGQISIINQSPTGIYEQEIDLKTV

SEQ ID NO: 6565 - protein, 1096 aa, unidentified
  REGION 1..1096: note = Description of Unknown: Cas Enzyme sequence
KKLEIRDMDGFKEVMREKALKVKDRKKRLLGCVDEVGKDKQLETILGLLAGGKVAVEDLYDGQVAIEEPAKIALEDLEQEEEKLTAALGDQMELLLAAKEIYDWALLEDILNGKETLSSAKVEQYQKHKSDLAKLKRVIRATGDRGLYREIFHKAEKETANYPAYIKNEPEAKKKCSDQDFYQFLKKRLEKLPNQTDEVKEILLELEGETFLPKQTTKGNGVIPHQLHEVELRRILERAGKYLPFLNEVDESGLSKQEQIVEMFRFRVPYYVGPLAQGGTHWVVRSDQKIYPWNFEKVVDLEQCAERFIINMTARCSYLGEPVLPKDSLLYSKFMVLNELNNLRINGRKPSVAVKQSIYQALFAKKKRVTLKQLQNYLLSEGLLTKEDEITGIDGGFQASLAPRQEFAWLLKRPGGEEATEDIIRHVLLFGEDKKLLASWLKKTYSALLSQEEQKALLRKKYSGWGRLSREFLTELHHVDPQTGEAMSILDALWRTNDNLMELLSGRYTFGEAIEEYRTRKLAETGFTLEDYLKDSYASPGIKRAIRQTIGLISEIEKIMQGPPKRVFVEVTRSEGEKGKRTVSRKEQLKALYQKCGEDSGPLFQQLEKCGDGELRRDKLYLYYTQLGRCMYSGESIDLERIDSDYDIDHIYPQSRLKDDSLNNRVLVKRVLNAEKGDKLLPGEIREKMRGFWAMLKEKGLITNEKYMRLTRTTDFSEDELAGFINRQLVETSQSAKIVAELLQKRYGDRTEIVYVKAGNVSSFRQDQRIGVDGRQKQVGRCGKGERTTQDPLFVKCREINDFHHAKDAYLNIVVGNVYHVKFTRDPRNFLRSKKTYSLNRMFDFDVVRGKEQAWKQGEDGTIATVRHFMGKNNILFTRMATETKGGLFDGQIVAKGKGQAPIKSSDVRMTCDKYGGYNKVAGAYFCLVEQKVKGGKKTAPKLVRSLEPVYIMYKSLYEKDPETYCKEILHMEEARILIPKIKINSLVELDGFRMHISGRTGERIIYKNANQLVLPVEWHQYVKNISKYLDRCAKAKRELELTTFDGITGEKNLELYQALVEKLKTPRYIVKFETPLKTLAGLQEAFGKASLPDQC

SEQ ID NO: 6566 - protein, 1018 aa, unidentified
  REGION 1..1018: note = Description of Unknown: Cas Enzyme sequence
MDQNTYLGIDLGIGSCGWALTTDSSIIALGSRTFDVPETAKERTPTNQLRRISRGLRRVTARRRQRMNAVRALLHQYGLLDRADKVGLAATDKINPWQARAEGLDRRLSPRELALALGHIAKHRGFKSNSKRDKGANAADESSKMLMAAAKLQEKEQLWRSVGETFWNDPELRQRKRNRDGDYSRTVLRADLEREVCLLLRTQRALGNSLASETLESDFLNVAFFQRPLADSDDKVGECPFEKGEKRAARHAPSFERFRLLARLTSLHIGGTPLSAEQIAASTRDFGRQQGLSYSRLRKLLDLPLAERFDGVAPEDEGKRDVVARSGKAMPGSAALFKVLGEGGWDSLCKTPAVLDSIAAILTFREDVGRIRDGLAELGLDSPVLATLMKGVEDGAFAGFKGAGHISAKACRAIIPFLAQGMVYSEACGKAGYDHSKRPETNLDTIANPIARKALGEALKQVNAVVRTHGKPTHIHVELARDVGKSLEERQEIDRGIEKRNREMDRLRQQFLEDFKRDPKGDDLLRYELWKEQRGFSLYSGEPIPLDKLISSDNEVQVDHILPWSKSGDDSFVNKTLCFTTENQKKKGRTPYEWFGAEERKWDEFAARVETIKEMKGRKKRNYLLKDASVLEERFRTRNLNDTRYACRLLLNRLQQDYPGVTVAARPGPLTDRLRRAWGLQGLKKNEAGERIEDDRHHALDAMIVALTSESMLQRLTNLFQQAEAHGLPTNWHGIGHLHALLRDTGGVPNAFSALEPPWPGFRDDVVKALSGVTVSRAERCRARGESHAATIRQVSERDGAPVVYERKAVEALSEKDLDRVKDADRNHRIVDSLRDWIAAGKPKDALPKSPQGHVMRKVRLTTSKKVDVKVRGGVADRGEMARVDVFRKANKKGKWEYYLVPVYPHEVATLDEPPNLAVSRSDDRAEMSKDYEFLWSLYHHSWIEVVKPDGELVSGYFSGLNRNTVSISISQHWSKSEVTGSIGVKTLTSFSKFAVDRLGNRSEIVKETRTWRGKACT

SEQ ID NO: 6567 - protein, 1435 aa, unidentified
  REGION 1..1435: note = Description of Unknown: Cas Enzyme sequence
MKKILGLDLGTNSIGWALVSTDENGKPYKIDGMGSRIIPMGTDKQDYEKGVGITKNATRREKRTSRKGNKRYKLRRNKLLFILNELGMLPEQFQFKNGIPEPTKLQDLELLPVSKKTKQLDALGHIELRVKALECPIELKNFGKILYQFNQLRGYSGGNNDDSFKKSNDEEANDGEEKRYEVLNKKVRIISVEKLEETLKGGRDKNEDIFKYSVTVLKDDEEIEGWTKLQNLADKVGLEEELTIRIKRPKNKPVDYEFALPQKSNWRKAMEADEKLLSEGDGKEKGIKKKGLFISELRLRDLKRNGKWAKIRNRVFLRNRYKEEFDKVWETQAQQHSILKNCPEETLNKIADYIFPGNSESQKQLRKIALEKGLKYIIKEQVIYYQRPLKPQAELIGNCRFEKAEKVIPTSHPFFQEFRCWKQINNLFVTSKTLIGNKFRYQNRYLTTEEKRAIYEKLQTQKEVGFSAVVEILNIDKSKGKLDKEQKDYFLNGLNVKAKLKGCDTLLSFKKELGEYFNDFISQDKNLVEQLWTVIFDMKNHEGSEYDVESKWVSSIIEVLKKYTDEETAKELSLKIAQKIKFPRKYASMSEKAIRNILPLMLPAPQIISETIQQQFRNIQHSIETGEILDNPKYKLEDYVIDFAKNNPNVLHDGGIMESFAISLVYGKHTAETIKPQIINYHDILEDKERAKKLRNPIVAQLANETMQVIKAIWKQYKFSPEELEIRVELARDLKNSAAEREKIWNGQRKNKTINDKAKEKLQENGIAITDENILKYRLYEQQKFMSPYTKKKIIPFSKLFDDKEYDIDHIIPKSRYYDDSFSNKVICEKYINEEKSNRTAWEYISQQNSKYRNENGELEIVSANEFLSHLNDNYFGKKKRNLLAEKIPSNPVERQLKDTQYISVAIKSELAKIVGSDNVKTSTGEVTDFLRSRWGLRKLFMELTESRFKQMELWDLDENGNPKTKWVNRYVDENNKNQYEIKNWSKRYDHRHHSIDALVVALTTQSQIQRLNNLNKYYQDELTVRKNEFKIEVKEGESILESFFNLEAKRRDEILQQIESSRYFEMPFNNLVDQLKSQLETMVVSHKPKDKLGIKIDENTNKKQLKIRGALHQETYYGKLNGRDTKRVELSSLSITKNKATKKEEIIDLIDKVLEAEIVEHRKQYGSMKEAFTGEGLKVFNDKRIADGKQPAYKVKVWYNKEEKKESGLQRLYDRNDKQSVITGDNYLFLVMEKNGKRIFDIASLYDSVSIANDALKYGVNDFKKKIVEDYMIKHIDKPEKVLFTLQQNELVYLPNNVEEREFLLGMSVDKFRDWINIKANKKAFSNKVYKVVMFTGSDCKFIPHNYSNVISVPKEFSKEQKEELKKKYEDKKGIPKNELNFVEFGSYRDCSPYETGETFVKSLVNKKQKQKPLKIQDSCIKIKIDWLGNISLV

SEQ ID NO: 6568 - protein, 1112 aa, unidentified
  REGION 1..1112: note = Description of Unknown: Cas Enzyme sequence
MAMQTEGTSYTLGLDIGIASVGWCVLGDDRIIDLGVRAFDKAETAKEGESLNLIRRNARLARRRLYRRAWRLKKLARLLKREGVIDSTEDIHAQISDGVSPWQLRRDGLDRLLTRGEWARVIYHLCKHRGFHWLSRAEQKKADADASGESGKVKKGLATTRTLMAEKKYRSAAEMILAEFPKAQRNKQGDYGKALARSLLGNELALLFQRQRELGNRFAGESLQVSIIGEGRSGLFWSQKPALAGADLLKMLGHCTFEKAEFRAPKASFSAERHVWLTRLNNLRLSIDGTVRPLNEDERRVALPLPYQQSGELSYRQLRAALNKAGLMAESAGFAGISGRAQAQQQGVSKAKDPEATTLVKLPAWHELRLALKKAGLETEWQGMAGAAMAGNSDLLDRIAWVLSVFKDDAEVASELRKLPLPNAAAVIDSLLDIRFDKFHALSLKALRNIVPLMESGLRYDEACLKAGYHHSQLFKPGDGKLLYLPPLYGQRDDKGSMTLNEDIDVPRNPVVLRALNQSRKVVNAIIRRHGSPSAIHIEMARDLSRNIDERRRIEKEQAEFRERNEQNKGEFRQAFNIAGQIKGGDFEKWRLYREQQCKCAYSIEPIDLNRLLEPGYVEVDHALPYSRSFDDSKNNKVLVLVAENRNKGNRTPYEYLGGAQNSERWQKFVAFVESNKAYRLAKRSRLLRKDFGAKESAEFRERNLNDTRHICRFFKNYVEQYLKLDSASDSKRCVVISGQLTAFLRARWGLIKVRSDNDRHHALDAAVVAACSHSMVKRLSDYARNRELEKVREGFVDMETGEIVDPARRQQLREHFPDPWPHYRDELIARINIDDEEQLRLEMERFGTYPAHALATLSPLFVSRAAQRRNGGAAHKETIYAQSKQSREQAGLTQKVTLSSLTLKDIDNLVDPHRNEKLYAAIRARLEAHDGKGEKAFPAGNPLRKPDRDGNPNGPVVRGVRLAINKMSGIPVRGGVAKNDTMLRVDFFQKGGKFFLVPVYVHHRVTGLPRLAIAPNKDESEWTPVDDSFDFCFSLHPNDLLRITLAKETYLGYFAGCDRSTGAISIWAHDRNRAIGKDGLIRSIGAKTAKSIEKFDVDVLGRIYPARPEPR

SEQ ID NO: 6569 - protein, 1340 aa, unidentified
  REGION 1..1340: note = Description of Unknown: Cas Enzyme sequence
MPNKVFSPISIDLGAISTGLYLYHEQQGIIEKEGHTIINDSSVTWSMANRTAVRHHQRNLKRRKMAKRLLFLLLNANLDKAQAELLSGLLNRRGFTFLSEGSDSLKDIDEYVLNIITEDLQKLEGLTPDDIATNHELFSKELSSEAFGQIIKEHKDIKNELISCKKAILNTCEEISRESEGHKPRKQYLKDIKEDILADTRYHSIASENNISVEELANIVGHISNLQLRVLRKYFNDESLKSLKVFDDAKLHKIFYKWLSSWSCKGDSTEAQGRKLLRAHRDKSIYQVFKEIDPIYSIPPYENMANRNLDKDRTLFINPAKLTDIFPDYEAAVTKLVAADNSYIESKAVEISEESRRHTGLHLSRESIILQRFLDRSMITDTFCLRRLAEENGIDKNPDGFANLLKIIGSKPQAERLIKTAAQYYKEVGKAKRGLYAEKGSLLSPINAKTPRKNKTAHDSISAVIGSELSQSSLESLKELMKEKIGRKSIKGIVTDAAKAQKDHGNKLKHIIEKAEWKYANGHNIDKDEKSLMMLLENVKKSADVIAEKFNADPERFNNVFSFAQIANILFTDQKGYSKSAKCVIMENGWRSQLREATDKHGEVVYVANASRLPVDSVRPFDGMLDKIIKRLAYEIAELKIKQIQSHNLKGAVHIPIIIEENRFSFTMDMYSIKKMKKKQNTAKDKLIKQEKHFQDKFHRIVNASKGICPYTGKPIGSSGDIDHILPRAKSRKSGSQVFNSEANLIYCSTEGNRKKADMVYTLEDLSENYLNALYPNMDKNMIVKCISETISKHSNTVYYTELTEDEQRDFRHALFIPELSSKVYPLLHTRSKTMVNGTQAWLCKNLKSTLEKNLASAGITPEIEIIKVNSEDISELRKMLAVQDNRFAKPADATQSPVSHIADAAMAFAYCLRAGVLPIGDFEQLTEYLPKNYSVKKIAPKPIYADSKNPASKKIFNDTIYGINFLPVLLFKDGSISNGFSKNNCVPVKTKDYLELMKPFLRYKGKNISANFEEIAKNSPMEFALFTIDTDTAMKLMHKTAKEPVSELELTQTSELNRLFYTTVKSNIRSTLWDANGKYKGIPHEKKLKNAGITLPLAKEWQKLCNYIETMGISTDNKLDNNTYDGIISACGLFDRQPDTRKHSKERKIYSLPITGEGTIAIRQFTPNGSTVWQIKKAAKVVNEGFTVDKKGKWREVSFSHFRNSPNVFIVGEKFAEYKSILKFGMVRKVDLGIADTSTYMKLAEKTRVDICLLLSADKFTSEILPFIDTDIKDVMLLPDKLMLNCKHLLEIFQPRDGKIELIKIGPEISILFRNTGFGAPLKNAFIKGDDVDEAYSPF

SEQ ID NO: 6570 - protein, 1169 aa, unidentified
  REGION 1..1169: note = Description of Unknown: Cas Enzyme sequence
MNQKVLGLDIGTNSIGFSLNEISIKNGQTIFKELTSNSVIFSEYIKAEDRRAFRSSRRRNERKSRRNEIVRKLLSDFDLAEKSIISKPIEYFNKLSKNKNPYILRQEAVNGKNLSKDDFTFSLYSIITRRGYSNQFKTEDSKDEGVINDAINENRKQYFNNEFSIPSLVLLNKKLNLEKDGFTNIAIRNKKDNYNNSLDRDLWQEELEILLESQKENKELFETIEMYYSFKNKLINGVNENSKGIFEQRALKSMEDMIGFCSFYNKFHENPQKRIPKSHISSIELTMRQRIENAVLGNLIFNDKTGELFIPTKEQIDNTVELWLKKPPTKTINTKNIFDKAGLKNIKIKTSNKQDETVLDIGIHTQLLEIFKKTDLDIFKTHKDLYSQILKKIFYFVNKEQIVKEIKKVDKENLLTNEIIKELSKVSKGAKDGYASFSLCFIEEILEKMRLGKSYHNALVELEYFRKYLDMKPYSYLPPLNPSEKDLIWLEKNIANFKREHIFYQPLVSPNVKRVISILRRLVNDLISQYGKIDKIIIETTRELNSKKEEEQIKEAQANSRKEIKSAEKKLIDYNYELTNKNIERIRLLTEQRLKCLYSGENLTVEDALDEQKTEVEHFIPRSKIWINSYKNKILVLKKHNQDKSNLHPITYLKSKNSWEEFTSRVNKELTNDSKIFWLTNEENINKNWEKENLEDRFLNDTRSATKIIANYLEHYLYPKQNEYGKGETNQNVIRVTGKAISELKRLWGVDKVQPKNEDDKKDRQTNYHHTIDAIVISLLNESAKKALNDFFKQNENGFKTKEILKKIKTRFPITSDGTNLVEFVKEKVKKYENNEIYICPVIKKRDNVVGFKDGNVKLYLDKEKEEFYQIDKKAIDKNLLFDNYGKDISDKEVSKKVEDLISYLDLPKQENIKNALLEYKNKLLTTRENISNIKKELDELKGELPNKRNYEDTDQTIAIKDKIFRLDELKKDEEYLQNEPCFFFTKKGLKQIVRNIKVKTKSASKADSIIVTDKTQKNRLQRLSIDVYKELKEKDIPFVAKLNDTTLNVDLFNTSKGQVIGLNYFSSIKNNIPPKINEKKIGLIKDYEDKITIQKGDILEIENLKKSTKEYFIFNGGGNIAGGNNKIELKSINKKEAKRIFITLNKDTIARKVFINYQGDISYEEFKK

SEQ ID NO: 6571 - protein, 1405 aa, unidentified
  REGION 1..1405: note = Description of Unknown: Cas Enzyme sequence
MTNILGIDLGTNSIGLTLMENNVFTWYGVYTFKKGVGEGKSGEFSYAAERTKHRSSRRLYNARRYRKWETLKVLIENKFCPLDIENLNKWKHYKKGIGRVFPINDEYFQRWIKLDFNGDGVPDFSSPYQLRRLLITEKLDLSISENRFKVGRALFHIAQRRGFKSSRKNGDKEKSSVYNGGSDSAAIPVNKYKELLKEKGSLGAALAYLEDKGIRVRNRYTLRSDYRDEVKKILEFQQIHDEEFKEKLLLETKNGSIFYQRPLRSQKGLVGKCTLEPSKPRCPISHPRFEEYRAWSFINNIKYRIDNDTTFEPIPIELKEKLYHEKFFYKSSSKREFDFSEIRKFIKLNGGNNWELNYSQKMDKVSVSSCFVSARLKSVFGDDWLNFEKEVIRKNKKGENEIKTYKIEDIWHILFSFEDEEYFEEFLFKTLELDDNQIKELKTLFNSFPVGYANLSLKAINNILPFLREGMIYSEAVILAKIPEILGEKVFEANKENVLKAIKDEIEKNRLQKKIITITNNLIFKYYALDYQNRFGWKDTSYKLVESDIKDVEGVALEHFGEKTWPKLNKDYKQQILTEVIEKYQAFFASSKREHIKPPHLVNQIKEYLDTNFNVYEKLLDKIYHPSQIDIYPKKEGQQFLLSPKTAAFKNPMAYKTLYRLRDVINYLIEVGKIDEETRMIVEIARELNDSNKRWAIEKYQRDREVENREFANAISEFIKAPDFSGVADPGNKDDVDKVRILLEQANEKQSDEEFELKKIIIDPYKKQKEKNEAQKSLVKKYRLWLEQGMRCLYTGKVINIYDLFDINKVDFEHTIPRSKSFDNSLANLTVCYADYNRNIKKNRMPTEMPNYDTDSHGYSAIKPRLDAWEKKVEHLFDQIELWKSKSKNAKDKAEKDNAIRTKHLWQIEYDYWKNKLDRFTRTEVPQGFVNSQLTDTQIITKYAYHYLKTVFNKVDVIKGSNTAAFRKIYGIQPKVEPKDRGKHYHHAIDAAVLTLIPSSRKREEILKRAFEYEEENRNRQYHEKPFSDFNYSMIEEIQKNILINNIADKDQTLSPGKKIVRKRGRIVWLKDKNRKFLLDENGEKIPKIAQGDSIRGELHQQTYYGKIKIAAKNNDGSLQKDDEGKIVYNQVDGKDEMWVVLRKPIENVNFESDIIVDEYLAEYLKKQLFEDKVQQNKLKDFKGNTIRHLRCRAKAARGFMKPENVTIVKEQTFKSLKEHKNYIYADSGENYMFGLYENENGRSIVPLNVFEASQYKRYLDDLSPENLFKSKEPIYIGRGKKVKEATLKHIFMVSQKVLFFENSREELKDLDREDLSKRLYFVKNLADAKQGLVRFQYHLEARDDKQLTEDFPVNKFGQKGKNGFSKFSTESVSPRLLLSPGNFDFIIEGKDFEMKLDGSIEYKF

SEQ ID NO: 6572 - protein, 1208 aa, unidentified
  REGION 1..1208: note = Description of Unknown: Cas Enzyme sequence
MKIAWGIDVGVASLGFAVIELDENGQPRDLIDGVSHVYPAPTGGAERRLYRSMRTQNQRRSARLERLRAHLADLLAIDPSFDQAGPPDEDGARKQGNGGLSRVRLRALGLTEPLAPEDLARAIMHIGRNRGRRLTRGLKGDDAADGSGSIKDESPGTAKTSTDRKETVLQAAKRTGQALANLGKEMQVEQAAPSQLLWKREKQGLPTRQSKRTPDAPTFTRRMMEDELDQLLAVQAEHHPVLTEQVRADLAGKHGLVFNEEDPPPPNVGPCRYGVKGPDGQIERRLPIASDLFQTKRILEELAHLVTLTDPRTGGKTPLTLAQRDDLLALAVEGEDLTVARIRKALGIGTGRDAPILGLQAADRGRGGKGRKADTKIAGHALARAFREAGQADLWKNATPEQRSHLSEALRTVDDYEALTAELMADFGLTEDAATKLAHTRVPAGFSAAGPTATRLIADHLTAEIIPVSEAVARAGLDDTVGVKEHVPRSAPLPYYGEVLKDQCVVDTRTLKRDPTPSDSPEARFGRIPNPVVHAAMNRIRKVANDYLKRYGPPDRICLELARDMNKSAEDREEIEKKNRQRQTENDRFAKALIMEGLPATRDNLRKMRLWEWQKHKCLYSGQTIGMHHFATDVDIDHILPRAVTLDDRMGNLALCFRSANAHKSKKTPYEAFGSGLTLSDGTKRDYAHILKQVEADRSGSLWRFQPDALERFKDQGHFQERFLNDTRYIGKLARAYLARLVPQESDVLCLTGGITSELRRHWGLSTLIRDIMIEEGRLDPALFEDQGDPPEDERKRDAHAVALSERVKQRSKIRWDDRHHLLDAIVAGCVTRSDVQRLHTMTARRIAEEDRATILADIRKGMAGQPTAGFCWDPQTFPARVKAFLTEATPDHPTRVTLKPDHDPRGQLHQQTQYRVVCENPKDPGKFVTLAHQDIEGLAGQYKGRAEFLKKVQGALEIGGPAQQAVKAAAERGENIWWGGHAPLAALENLQRSNNALKDALLAAWDCAALTPDDKGKAKSGTALAREAVAAVIAESGQRRYSQMSHQQVRILGKNEKGRPKTVYVTKGNHCLVCYRTDAGERSLSIVATLDANDPKYAADWLRDGCQHLFTLHKDDLVEMDAPSATQSVTAIGMNQQRRIYRVVSISGGDGSIDVEFLPAQESRAPKEVPKGTRVRLSSQSAFFATRLVPVHLTPTGYLKWKPPVGN

SEQ ID NO: 6573 - protein, 1372 aa, unidentified
  REGION 1..1372: note = Description of Unknown: Cas Enzyme sequence
MKKILGLDLGTTSIGWAFVEEAESDKERSNIIKLGVRVNPLSTDEQQDFEKGRPLSINADRTLKRSTRRNLQRFKLRRENLIQILKKHKIISDSTVLTEIGKDSTHETLRLRAQAVKTKVEKDEFARILLAINKKRGYKSSRKVNNEEEGKLIDGMRVAMKLYERNITPGQFCYELLKGGGKLLPDFYRSDLQNEFNEIWKFQKQFYPDILDEELHQKLINQGQQNTRKRFLAIKGIYTADNKGKRSEKKLQSYKWRSEAVSMKLPIEEVAYVITEVNNNLNNSSGYLGAISDRSKELYFNRETIGENLFRQLEENKHTSLKNQVFYRQDYLDEFEKIWETQKEYHSELTNELKKEIRDIIIFYQRRLKSQKGLISFCEFESFEKQIDVDGKAKSKTIGNRVSPKSSPLFQEFKIWQNLSNIIVKNKTTKEEYILSQDDKELLFSELNIKGNLSKVEFLKLLFDKPENWDLNFTIIQGNNTNHSLYEAYAKILSLEGYEFDLKNDSASYIREMVHNVFQDLGIDTSILRFNSEIEGRYFQKQKSYLLWHLLYSYEGDNSNTGNDALFTKLNTEYGFKKEYAQFLINVSFTDDYGNLSTKAMRKIIPFLKENTYSEACVLAGYNHSHSITKEENEKRVLKEKLVNLPKNSLRNPVVEKILNQMINVINAIIEDPKLGKPDEIRIELARELKKNAKERSEMTSQINAAKVKHDQIRITLKNDFGIRNPSRNDIIKYKLYQELICNGHKTFYSDKYISPAQLFSKEIDIEHIIPKALLFDDSFSNKTLEFRSENLDKSDETAYDFIKRKYGDNYLNIYMNKIEKYYKEGHIGKAKYKKLLKSFSEIGEGFIERDLRESQYIAKKAKEILFEISKSVVSTSGKITSRLREDWGLINVMKELNLEKYRNLGLTFMEERKDGQKIEKIIDWTKRNDHRHHAMDALTVAFTKHNHIQYLNNLNARKNENHKKHSNIIAIEKKETFIDNNGKRLFKSPITNFRQTAKLHLSSILISHKAKNKVVTRNKNKVSGSNKIQIALTPRGQLHKETVYGKSVYYQTKDVKIGSAFTKEIIAQVANQSYKKALIKRLEENNYNPKIAFVGKNSPLKNPIVTDSGKKLPEKVKIVWLENQFTIRKDITPDLKIEKVIDNGIKRVLESRLKQYSNDAKEAFSNLEKEPIWLNKEKGIQVKRVTISGVNNAEPLHIKKDHLGNDILDVKGIPVPADFVSTGNNHHVAIYIDGNGNFQEEVVSFYDAVARVNAEMPVVWKQHPEHPNWQFQFTMKQNEMFIFPNEKTGFDPKEIDLLDEANYHIISPNLFRVQKIATKNYFFRHHLETNVETKKELKNICYINYRNTNAVDGIIKVRLNNLGKIVSIGEY

SEQ ID NO: 6574 - protein, 1372 aa, unidentified
  REGION 1..1372: note = Description of Unknown: Cas Enzyme sequence
MKRVLGLDLGTTSIGWAYINEAENKKEKTEIRKLGVRVIPLTTDEENDFQKGKSISINANRTLKRGARRNLDRYQLRRDALIEVLKKHKFIIDSTLLSEEGNDTFSTYAIRANAAKSRIGKEDFGRVLLMINKKRGYKSSRKAKTEEDGTAIDGMAIAKELYENNLTPGQYVYNLLKKGNKHIPDFYRSDLENELKSIWNYQKKFYPEILTSEFREQIKDKGKQVTSKIFLGKYQIYTAENKGKRDDVKLQAYKWRVDAISQQLAKEELAYVIVEINNNINASSGYLGAISDRSKELYFTKQTIGEYLYAQLRKNPHARLKNQVFYRQDYLDEFEKIWETQKGFHSELTDDLKKEIRDVIIFYQRKLKSQKHLISHCEFENYHKAIPKSSPLFQEFKLWSYINNIELRYIPDRAIMKNSEIDIELKEKLFEELNIREKMSATDILKVLVDNPKDYELNYKNGLDGNKTNAAFYNVYYEILKLENEEIQVNRLSAEEINNIIASKFAELDIDQEILLLNDSLKENNYDKQPIMQLWHLLYSFEGDNSRTGIGKLIKSLETKFGFKTEYAKLLANISLLSDYGRLSARAIRKILPHLRDGNTYDVACSYAGYNHSSSLTKEEREKRELKDLMELLPKNSLRNPVVEKILNQLVNVVNAIINNENLGRPDEIRLELSRDLKNSASERADMTSHINKANIEHEKIKEKLQNLFPFNQGVRITRNDIVKYKLYQELEPLGYKTIYTDTYIPLERLFSKDFDIEHIIPKAMLFDDSFSNKTLATRDFNSREKSNKTGIDAIVEKYGENSDEYFRYKKSIELLYKEGKISKTKYHKLLMKGNELPEGFIERDLRNSQYIAKKAKLMLEEVVRTVNTTTGKITARLREDWQLINVLQELNWDKYNKLGLTHYEKSKDGNDIPKITDWTKRNDHRHHAMDALAVAFTRYEHVQYLNNMSARKDEKHKKFHEVYGIEQKYLFRGENNKLLFKPPLPISELRAEAKKHLESILVSFKAKNKVVTRNKNWIKGKNEPQITLTPRGQLHKETVYGKIIKQEANLEKVGTKFDFDKISHVTNKKYREALLARLNEFNGDPKKAFGGKNVVSKNPIYLSDDSKSSDKSALPEKVKVLSKEPLYTIRKEIAPDLKLDKIIDQGIKRILQQRIVEFNGDAKGAFTNLDKNPIWFNKEKGIAIKRVKITGVNNVEALHFKKDHNGKLIFDEEGNKQAVDFVSTGNNHHVAIYKDENGKLHEEVVSFYEAVARVNSGESIIRKIHPEHSDWSFQFTLKQNEYFVFPSESFHPGEMDLLDPNKAYLISPNLFRVQKLGSKDYWFRHHLETTLNDKGSTKNIIWKRINSTESLSKIVKVRINHLGQIVQVGEY

SEQ ID NO: 6575 - protein, 905 aa, unidentified
  REGION 1..905: note = Description of Unknown: Cas Enzyme sequence
MPQSPLVLSFDIGYSSIGWSVAEVVDPAKNLHAGVVTFPSDDVLNSERAGHRRTRRNIAARRNRVQRLKLASVGAGFVTTEEIETLDRMERKSAPGWRHCPRFLAARVLGELPDSTLTGLQLFHVLRWYAHNRGYAPPSWGLFDEADGEQEEDFEKVRNAEKAMHEFGADTMAQTWCALLDADPTAGRWPEPRHWAKGENMAFPRERVQAEVTRLLVAHIGKLPGVTSDFVRCLIDDWEHHPKIRPWLQGADPRTEKPRDYALPKRYEGGLLFGQHIPRFDNKIIPWCPFSLKEDTKSGKISGRNVPKKHGRAFLDFKVAMRLNDLALSELVESDGRLSAGQRMTLFKRIEGYGDVTVRQFADLVAEVCAISKPDLTTRIPEREGSDRPFELRPERKALLAILSGGRSLPPWPLIHSIWDCFEDAEAVLRPVFHGKPTSWADLIEQAKAPDVLLERLEELFRLGKGKPSRSKKAQPLPDFEALLRFKTTITKAHGRARYCSEKLRSATDEALGGLDPRRAPTTETSDEAGCLYLSERQRDLQDRLPLSKLTNNHLVRHRLLIFRRLLEDLVNTFANGNRERIDAVVVEVARDLNEYSGKNTKQRVALFQEKQRPFNDAAEAFAQALIDNAQYTPEQAQALATYANVRRFRLMREQNFECPFTGRHLSAEDIAKDRVDFEHIIPRSLKPTDSLDAMVITYRSVNQAKRNRTAMRFIKDMAGERLDTDDVGWGYHTPQQFETAVNRMRPKGRLNTAAKRSQANRCDALLVEDYDPREANFLQRDLTQTGYLMKYAVGEARKFFRSAPRQPRFIHLEGRVTTFFKKAWKLTETLAPISPLFLREYADPRTGRWQSKVRPKAELRRFTHLHHALDALTLGLATALVPGIERKELRRALSLRQAKGDDAT

SEQ ID NO: 6576 - protein, 1381 aa, unidentified
  REGION 1..1381: note = Description of Unknown: Cas Enzyme sequence
MKKVLGLDLGTTSIGWAIVNEAENDNEKSSILKLGVRVNPLTVDEMQNFEKGKSITTNADRTLKRSMRRNLQRYKLRRENLVSILKQQSFISEDTILSENGNHSTFETYRLRAKAATEQVTLEQLARILLMINKKRGYKSSRKATSSDEGQLIDGMAIAKKLYDEKLTPAQFVLQQLQDGKRFIPDFYRSDLQTEFNLVWEFQKQFYPEILTIEFRKHIEGKGLKATAAAFWGKYSFNTAENKGTRDEKRLQAYQWRADATKKQLAKEEAAYVIAEINNNLNSSSGYLGAISDRSKELYFNRQTVGQYLIDKLEADPHYSLTNQVFYRQDYLDEFNTIWECQTKFHPQLTPELKSEIRDIVIFYQRRLKSQKGLVSYCEFESRQIEVIIDGKKKKKNIGLKVCPKSSPLFHEFKIWQGLNNLQVIERKTGNKRFLEQEEKERLFEEVNYKKELFKNDALKLLFTNHKELDLNFNTIEGNRTQSDLFKAYQNIIEASGHGEHDFSKMSSKEMVEIVEGIFMGLGYNTQILRFDASLEGKEFEHQPLYQLWHMLYSFEGDDSNTGNEKLINRISELYGFEREYATIIANVTFQPDYGNLSSKAIRKILPYLKEGHIYSLACEYAGYRHSKSSLTTEELNTKILKDHLEVLPKNSLRNPVVEKILNQMVNVVNSVIDTYGKPDEIRIELARELKKSAKEREEMTATINRSTSEHEAIRERLKKEFGLQHVSRNDIIRYKLYEELKPNGHRTLYSNTYIEPGKLFSKEFDIEHIIPQSRLFDDSFSNKTLETRSINIEKGNNTAHDFVLAKYGDDGLKNYLKNIEVLWGNDPTKRTKLKKLKMKGTEIPEGFIERDIRDTQYIAKKAKSMLEELVKEVVSTSGTITDRLRNDWQLVDVMQELNWDKYDRLGMTEIIENREGHKIKRINDWTKRNDHRHHAMDALTIAFTKRSHIQYLNNLNARSDKAGSIYGIETKELYRNGNDKLKFKPPFPLNEFRAEAKRHLEETLISIKAKNKVVTSNINTTKTHDGTKKKLQLTPRGQLHNETVYGSILQYTSKEEKVGASFDTKTIQRVANKKIRTALFNRLIEFHNDPKKAFTGKNSLDKNPIWLDEAHSSQVPEKVKTVSTETIYTIRKEVSPDLKIDKVIDVKVRRILQARLNEYNGDAKKAFSNLNENPIWLNKEKGIAIKRVTITGISNGEALHEKKDKEGKIIVDQNSKPIPSDFVSTSNNHHVAIYRDDSGNLQETVISLFEATARANQGLPIVDKNYKQNEGWQFLFTMKQNEYFVFPNEINGFNPVEVDLLNPINYQLISKNLFRVQKISTKNYVFNHHLETKAVDGDTLKNKKNLIGITHIFIQTPSKLENIIKVRINHTGQIVSVGEY

SEQ ID NO: 6577 - protein, 1271 aa, unidentified
  REGION 1..1271: note = Description of Unknown: Cas Enzyme sequence
MKKILGLDLGSASIGWALIEESDNNTSIIGLGSRIIPYEETEGKDFAKGTGESRNSLRTKARTARKGYDRYQLRRKYLVDTLVPSNMFPDETLKNLPKIELWALRNKAVHSQITLKELGRLLLWLNQKRGYKSSRSDANLGKKDTEYVATVKSRHEKIKELNLTIGQFFYQELSNDPFFKVKENIFPREAYIEEFDAIWKEQEKYYPELSHCPKEILKQIANSLFKGDNQEYLRQEIAKGGLYHTIRNMIIYNQRPLKSQKGLVSVCEFEGFWRTGKDGKEYFVGPKVAPKSSPIYQLSKMWENINNIKVGSRTGGDIEITTEQKQAIFQHLDNNEKLTVTDLLKILQLDKKNCYINKQIEKGLVGNITKQAIRQCMGDSTQYNHLLSLNLNIVENDKKGYLIDKKTGEILNEKTTQHIDAKIEHEPLYQLWHTIYSIQDKQECSNALQTKFSIDSIIADKLADIDFSKHTFGNKSAKAIRKILPYLMEGDKYSEAMSYAGYEHSDSLTKDENMKRKLLETLKPIEKNSLRQPIVEKILNQMVNVVNAIIEKHGKPDEIRVELARELKQSKEERNDTDKAMSKRQRENENITKRLAEYGLKATRNNIIKWRLYEEIDNEEKKLNAVCIYCGQPISLTEAIKGNDVDIEHIIPKSKLFDDSQSNKTLAHRHCNKNKNDMTAYDFMKSKPTEVFEAYIERVNSLYANYVINKAKRDKLLMPEDKIPDNFIDRQLRESQYIARKAREILQTICHNVWATSGTITAELRHLWGWDDVTMNLQFEKHKQLGLTEMVEWESEHGKNKHKKEVITGWTKRDDHRHHAIDALTIACTKQGYIQRFNTLSAEKTREDMKSTVEQKSVVFNEKRSLLEKYIISEQPIEVSKVEDAVANILISFKSGKKVAVVGTRKTGKRGNKKVVQTGVIVPRGSLSEESVYGKIQTIDERKPIKYIFENPQLITKPYIKQLVEERIEAYKGDIKKAIDSLKKEPIYLDREKEIVLEYASSYKTEYVIKYSVDINFNKVDKVIDGKIKSILQQRLDKFGGKAKDAFKDIQLSDKSIIKWYEDEGLERPIKSVRCFTGLSAVVPVKKDEEGKDIGFVKPGNNHHIAIYTDKDGNKFEHVCTFWHAVERKKYGIPIIIKNAAEVWDKIQLRPEGTYPESFLEKLPDVQLKLELSMQQNEMFVLGMANEDIQLAIETKDYKAISDKLYRVQKMSIKPSSGAIDIFFRHHLETQIIDNANSKTSKRFINIQSLGALFGLNPYQLKVDRLGNISI

SEQ ID NO: 6578 - protein, 1428 aa, unidentified
  REGION 1..1428: note = Description of Unknown: Cas Enzyme sequence
MTKKILGLDLGTTSIGWAYVIESDNPDESEIKQIGVRVNPLTTDEQTNFEKGKPFSINKERTLKRGARRNLDRYKDRRNNLIEVLKKANILSQDSILTEEGQHTTHQTWQLRAKAAVDKIEKEELARVLLAINKKRGYKSSRKAKNEDEGQAIDGMAVAKRLYDEQITCGQLVYQLLREGKKSIPDFYRSDLQAEFDKVWNFQKQFYPKILTDEFYKELKGKGQRATSALFYKTYNFNTAENKGSREEKKIQAYKWRSEAISQQLEKEEVAFVLTEINNNLNNSSGYLGAISDRSKELYFNKQTVGQYLYQQLQENRHARLKNQVFYRQDYLDEFEAIWKEQAKHHTELTEELKAEIRDIIIFYQRKLKSQKGLISFCEFESREIQIDGKKKTIGLRVAPKSSPLFQEFKIWQNLNNVLVRKKGSRKRNVKQEIQGSLFEEEKEIFVFDLETKEKLFEELNLKGNLSANKVIELLGHKPTEWEINYSALEGNRTNQALYNAYLKILDIEGYDEDLLKLSDKDDINVADLKTPASEIKNMVRDIFQVLGISTDILEFDAELDGKDFEQQASYQLWHLLYSYEGDDSQSGNEKLYELLEKKFGFKKEHSQVLANVTLSDDYGNLSSKAMRKIYPFIKENNYSTACELAGYRHSKHSLTKEEIENRPLDDKLELLKKNSLRQPVVEKILNQMVNVVNSLLEKNRKENPDFRFDEIRIELARELKKNAKERAEMTTNINSAKTENEKIFKLLQAEFGLKNPTRNDIIRYRLYEELKNNGYKDLYTNKYIPREILFSKQVDIEHIIPQSRLFDDSFSNKTIVYRETNLDKGNQTAFDYIDSKYGNEKVEEYILRIEALHDAWKKNKEEGISKAKYQKLLKKETEIGDGFIERDLRESQYIAKKAKEMLFKITRSVVSTSGSITDKLREDWGLINIMKELNLPKYRSLGLTEMQERKFGQKVEVINDWTKRNDHRHHAMDALTVAFTKHNHIQYLNYLNARKNENHKLHNNIIAIENLETETMIDNNGSKRRVFKAPMPNFRQVAKEHLENVLISHKAKNKVVTKNKNKIAGKVAAQETLTPRGQLHKETVYGKYQYYVNKEEKIGTKFDEETINKVSNPQYRKLLLERLSANGNDPKKAFSGKNALSKNPIYLNETKTETVPEVVKLTWLEEDYSIRKDITPDNFKDEKSIDKILDEGVKRILKKRLRKNDNDPKKAFSDLDKNPIWLNEEKGISIKRVTISGVNNAEPLHYKKDHFGNDILDEKGDKIPVDFVSTGNNHHVAVYRDEKGNLQENIVSFFEAVIRVNQGLPIIDKAYNQHLGWQFLFTMKQNEMFVFPNEKSGFNPQEIDLLDPSNKKKISPNLFRVQKMSKVIYGNSPVREYVFRHHLETNVDEKKELKDITFKNIKSLGYFEDIVKVRINHLGDIVSVGEY

SEQ ID NO: 6579 - protein, 1098 aa, unidentified
  REGION 1..1098: note = Description of Unknown: Cas Enzyme sequence
MTDYLFSFDMGTNSLGWCVLRLDAKGQPDKIADAGVRIFSDGREPKSGNSLAEGRRVARGMARRRDRYKRRRKAVIRTLVEYGLMPADAHARKALLAETNDRSPKDAVGRALTDVYNLRARALDEELPLFHIGRALFHLNQRRGFKSNRKADKRSNEKGAIELGANRLREKMDEAGARTLGQFLAKRRAAGEWVRVRAGAFGDEESEENKSSTRTVYDFYPVRKLLEEEFEAIWRKQQDYHPEVLTDERRAHLFTVMFYQRPLKPVIVGKCSFNPKEERLARAHPLFQAFRLYKEVNELEVVLPDQSQRKLTLDERDALILKLRGQRKATYAALRKVLKLSRDMRFNKETDNRPDMLGDEVHAALSAKGLFGNRWSVFSMDEQWAIIEQLREQEDPLALHEWLVSTHGLDDDVAEAVAAVHLPDGYGRLGATALATMLEELKAEVIPEAEAAKRAGYDHALAREGEGSDNLPQYQEVLERRIPPGTGEADDPYDVRKGRITNPTVHIALNQLRRVVNGLIRQYGKPDQIAVELGRELKLNDKQKAEVNKTIGENTRAAIKRSEKLRELGEKDNGYNRNLLKLWEELNPASPEDRVCVYTGRPIGIRMLFSGEVDVDHILPWSRTLDDSQANRILCMVDANRVKGNRAPAEVREWEADYDSILERANRLPRNKRWRFARDAMEKYKDDEEFLARQLTDTQYLSRLAHEYLDSLYPGKEADGDDSPGRRRHVRVIPGRMTEMLRRNWGLNSILPDHNLSGGAAQAKNRKDHRHHAIDAAVVGVTTRSLLQKIATEAAMREAAALEETITDIQEPWSGFREDLKAVVDRIVVSHKPDHGTLPRNGEQGRTAGRLHNDTAYGITGELDEKGNTIVVRRKPFLSLTDKEIHGIRDDELRESLYTATVGLSGRDFTAALDHFRKNDRKFRGIRRVRMTESLSVIPIRDRDGRVYKGYKGDANFRYDVWELPGGKWVSKVVTMFDAHRPDHDPDAARPHPAARKVLSLKQNDLVAYDHPQEGPAIGRVVKFSAAGQIVLAAHNEAGSLKARDADRGDPFKYFSKAASGLREIGARQIRVDATGRVFDPGPQDRQAREARKAAGIA

SEQ ID NO: 6580 - protein, 1105 aa, unidentified
  REGION 1..1105: note = Description of Unknown: Cas Enzyme sequence
MRTLGIDLGTSSLGWCLVDTRGEPLASDEGSIIAIGTRIFGDGREPKSGASLAVDRRAARAMRRRRDRYLSRRAALLSVLTEYGLMPADEDARQQLVRETNDGKSRDSGPRRLGKPADVSTSVHGLRARALTEKLTPHQIGRVLFNLNQRRGFKSNRKTDRRDNDQGKVEVGVNRLGDAMREAGAETFGQFLHGRRLEGKSVRTRLRPEAGEGAKGDGYDFYPSRAELEREFDCLCEAQAACHPDLLSDERVAHLRRVIFYQRPLKPVVAGRCSYNQDETRLPRAHPLFQAFRLYKEVNELALVGEDQQARKLTVEQRDALIGKLRSTRTASFSSLRKTLKLGSEFRFNKESETRVGLLGDEIYVSMIDPKCFGNRWADFGVEKQWEILSRLREEEDPFELHRWLIERCGLTDEEAEAVAGVQLPEGFGRLGPTALAALADALKHETYEDGTVITEAEAARRCGYNHSDKSDPDFPGHEFLPKYQEVLERHIPPGTGNPDDVYDVFLGRITNPSVHIALNQLRRVVNALIRLYGRPDRIAIELGRELKLSEKQKEEVERTIRKNTREAEERSNKLAELGQADTGYNRLRLKLWEELNRDQPLNRVCIYSGEPITASMVFTPEVDIDHILPYSRTLDDSEANKILCRTGANRRKRNRAPAEVAEWADRYDDILARAGTLPRNKRWRFARDAMEKFADEEGFLARQLTDMQYGSRMALTYLASLYPTEEADAEGVLRRHSRVRALPGRMTEMLRRRWGLNDLLPDHNIAGGDTVKEKNRKDHRHHAIDAFVIACTSRSLIQKIATASAALEREGAEKVVGEVREPWPGFREELRARVNAAVVSHRPDHGTVSRTGYAAGKGQTAGKLHNDTAYGLTGEKDEKGNDLVVSRKPLSAFKVARDLDGIRDRQLREALQEATYGLSGREFEQAVHRLATQDRLDGKGNPFRNLRRIRVIEPLKVIPIHDRSGRAYKGYKGDSNHRYDIWKLPDGKWVSEVVTTFDARQPGWQSAIRQRCPTAKKVLSLKQDDLIAVDGDDGRAIYRVVKFSAAGQLCMAAHNEAGALKSRDADPADPFKYFYKTGSALKAINARQVRVDEIGRVFDPGPRG

SEQ ID NO: 6581 - protein, 1081 aa, unidentified
  REGION 1..1081: note = Description of Unknown: Cas Enzyme sequence
MSNLVLGLDIGISSVGWGVINESSGEIIDAGVRLFEEATRNANEDRRNFRGARRLKRRKKHRLERIKEYLNSYGISCKNIQSVDPYKARFKGLSDPLTENELAAALYHLSKRRGTTIDTPEEESTSGNELSTKEQLKRNAKKLEDKHVVEIQYEKLRNNEPVRTHENRFRTKDYVNEAKELLHTQQKAHSFINDEFISNYIDLLTSRREYYEGPGSKKSPTPYGEWFFDEDGKLQHESMINKMRGKGTYFTNELRIPKKAYTAELFNILNDLNNLRYPSKETGEMEALTQEEKEELINTYLKKGKKITLKNIAKLLDISNELEIKGARINLKNNKPEFTEFLGLKQLKKLLKDVSLPESFFENRDCLDEIAETLTAEKSLERRQEQLTDLFKEYYNDPLTEAVKNLKQDTSFKEYHALSKKAMELILPELWKTSKNQMELFTEHGLGENRIEQLQSGNKIQFDDEAILSTVAKRAHRESIKITNAVRKQYGEMDYVVVEMAREKNSDDEKKNYKNFQKKQGQFEERMAEQLNVDELKDLYLNGKQMLALKLMEKQDYKCIYTGKQILPMDIVNDPTLFEIDHIIPLSYSFDDSQQNKVLCYQSENQDKGQLTPFQYFQSGKAKRSFREFEAECTNLFKSKKISKKKLNYLLEIRDVQNDEEVQTNFINRNLVDTRYAMRSFSMNLRTFYQKNELPTKVLSIRGSFTSALRRRAKLRKDRDESHAHHGIDALIVAAIGRMPLINQFKTINMTNEGVAADKDTGEIIDEDRIFNTPTLNFLRGLRNYESKLKYSHKVDRKPNRTMTNQTLYSTREKDNKKYTVGKVKNIYELDKNGFKSLKKKIDKNPENFLMAQHDPKTWELVVKVIEEHSHAENPFQDFYNQHGYIMKDGKVPVKGLKYLDNKLGVHVDITDKYPKSRREVVLLSRKSIRIDVYQNDDGKYKYLGVPYNWFKKDGKEYVLDMEQYNGSEGLQADYKQIDDSYTFQYSFYKNDRISYDKEEKITNSETGEKEKQLVHYDKMFRGDNHPRANRIEVEDISFRTNKQQLLYVSSVQNIKKFNVDVLGNEYFIEKEDFKDRIPTI

SEQ ID NO: 6582 - protein, 1057 aa, unidentified
  REGION 1..1057: note = Description of Unknown: Cas Enzyme sequence
MADQSATTILGLDLGANSVGWALIEYEDDRPKRILGMGSRIFDAAVEGDLEKGQEESRAVARRKARQLRRQGKRRVMRMIKVGELLQKAGLLPPGNLRDSVERDTLFKVLDRTLREQYADRGFDAAGLDGIRGIAYFLRARALYEPLEPYALGRAIYHLAMRRGFLSNRKAPMKKDEEEGEVKKGISELEQEIRAKGALTLGEYFYKVDPVQEKRIRKRWTARQMYQQEFEIILARQQEFGSISLAPKTVRKLYKAIFRQRPLKSQRGTVGPCSLEPKETRAPWHSLLAQEFRLLQKINDLKLISPEQEKRKLTEEERKKLYDYLMEHAEISFPALLRELGLKSRDGWAINLTSGEETRLKGNEVASRLIEIFGRDRWLSMSDAEKAQLINELNSNIKDAKLLRRAREVWKLDEENAQKLVSLRLPQGYCSLSRTALKKIVPLMRQGLDYATAVEQAYGKRNHRIYDLLPPFLDVDRTLRSPVVIRTLTETRKVVNEIIRKFGKPDRIHIELAREMKQSRKRREKRMKEMREREKQRSAAREAIKNNLRLDPNAISARDIEKWLLAEECGWICPYSGKAINYHNLFGPQAEFDIEHILPYSKSLDNSFVNKTLCHREWNLRKGNRTPAQAFKDTPEWPAMLQRVRAFRPLAAVNKPQFTPKGHPDIASKLELFMKEEIPPDFVDQKMNDTRHASVAAKRYLELLYPQDERLKRIKAFSGGVTAELRKCWKLNSILGDPESPDPRKNRADHRHHAIDALVLALATPGMVKYLSDAVEKQQQCQRSIRGYQKWVEEPWSGFLDDVRNAVSAIVVSHRVDHRLQGQLHNDTFYSPPRVDENGKTYHVVRKPLDGTFDDKKAKRIEDPKIRSIVLQHLEAHGNDPKKAFNAPANHPRINGVPIHAVRIRDYVKPEKIGKAFCPRYALTDSNHHMEVIEEKDKKGNPVWKGIVVSRYEAMQRKHRGEPIIQRDHGEGKRFVCSIASGDMFSYREKESGPILVGKVRCISDQNIEFVSIYDARKQKEIKSDDGWKKRSINILRTMNFQKVTVSPIGEVYPAND

SEQ ID NO: 6583 - protein, 1084 aa, unidentified
  REGION 1..1084: note = Description of Unknown: Cas Enzyme sequence
MDVLATHRSDAAPPNSQEKLTYLLSVDLGVLSLGWAALELQEGEPIGLLDAGVRSWELLTAAETDIEKGQEEPPGQQRRQTRQMRRQLFRRAQRLRRTWRALQRMGLFPPGSRSPAARKALLDQLDFQARTWLRQNVFSEAPPANFEDAWIYHLRSAALDRPLPPELLGRVFFHLAQRRGFQSSAKKDQQKDKEEKSQVKTSIAQLRQALQASGARTLGEYFARLDTHQERIRGRWTSRQMYRQEFEAIWAAQAQFHPEWTGEHKDQLFRAIFFQRPLKSQKGLIGLCPLESKFQYPPGGGPPKVLYRHRRATIASLEAQRIRSIQRINDLEFINPEGEIRCLVDPDSAADRQRLYELAEKNETLTFAEIRKALGIPTGKKGQGWKCNLEAGGEKKLPGNTTAARIRRILGDHAWEALGSDGQKRLVDTLLAYISTEALQKALQTAWGFDPQTAQQLADLDLESGYYSFSRRAIRKLLPLLEQGLRLNEAIRQVYGRLPGPSVCLDRLPPVRQVFPSVNNPLLIRALTELRKVVNALQRRYGKPALIRIELARDLKRSRRQREAMSRRMRDQQTSRENACQIAQQFLGRQPTPFEILKVLLAEECAWCCPYTGRKIELAALLGSEPQFEVEHILPFDRSLDNSFANKTLCYHEENRRKGNRTPWEAYGSDPQRWSQIILRVKDFQGEWAKEKLRRFLMQELSKDFPLRHLSDTRYICRLAADYLGVLYGGRTDSDGRLRIETTTGGLTAMLRRAWDLDSILGPGMDKNRADHRQHAIDAIVIGLTDRRIVHRLSTAAARLPKHVLQRMALQLDPPWPDFFQQVKQRVLSILVSFRPHHRLSGALHDQTYYATPTPDSVNPQKLRTKVRKALSALSKEEAANIVDPAVRKAVQEKLAALGQPDPKKAFASPENLPYLRSRKGQIIPIKSVRVWKSDTVTPIGSGLRRRWVKSGNNHHLEIFAHLDAQGNETRWDGQCVSLLEAVGRYRQGQPIVRRDHGPNTRFKFSLAKNDYIQWINDHGKIEILRVVSISDNDIEFRLPWDARVSTIIFKEKQRIRAKYSTLFKRKARKISVSPLGEVFPAGD

SEQ ID NO: 6584 - protein, 1040 aa, unidentified
  REGION 1..1040: note = Description of Unknown: Cas Enzyme sequence
MSRLVLGLDVGISSVGWGIIDLDTEKIVDSGVRLFAEGDSGLNANRRAFRSTRRLLRRKHHRIERIKKLLIENNIISNDFKPLGNPYEIRVKGLNNKLTNDELAIAILHIAKRRGITGLTIVDENDNRNDALSTKAILAKNQEELANKYVCEIQLERLKNGKVRNESNRFKTEDYIKELRQIFSNQNISLDLQDKIIEIIKSKREYYEGPGNEKSITPYGRFQIENGRLIEISMIDKMRGHCSIYPEEFRAPKMSYAADLFNFLNDLNNLIINGERIKPEEKREIIDKYINQKGSITPNQLAKYFGVSLDEISGFRVNEKQEPIITEFKGYKAILNCIKKNNLSNQLLEDKKQLDKIIEILTNRKGYEDRYNELIKIGLKIDEAETIAKVTGMSGYHSLSLKVMYEVIPDLLETEYNQMQIFQMNGYFQEKSNKYKGAKTIPFDEDAVLSSVAKRSMREALKIVDAIRKKYGELDTIVVEMPRDKNSEEEKIRIRKEQAKGVKIKEEIDKIVGGKQLNAETRLKVRLYLEQQCKCIYTNEDIELNTLINDPFSYEIDHIIPISISFDDSFDNKVVVKAKANQDKGQQTPYQYFKSGKASITYDKFKTIVLGLPITRKKKQLLLYEKDINKYENRKEFINRNLNDTRYASRVILNSLTNYFKANNINTKVHTIRGAVTSIFRKKAQIDKDRDESFEHHAVDALIISGIKKMKLFDNILSVSLNNNNVYDNETGEIITLDNEKEYYDEKFINFIKKLRKINPKYSHKIDSKPNRSMTDQTIYAVREYNNEHYIIGKFKDIYGKDGETVTELFRKGEATKLLMYKNDEKSYRLLEEIVNQYPNEKNPFQAYLEENKDYIRKRCKKGKGPIIRSLKYINKRLGSHMDISHKYTINDSSKVVLLQINPFRIDIYQEPNGLYKFLKINHDAIYKDDNNKYHIKTDWYQKEKENRNISNDAQFKFSLYKNDLFYYEWQHKGDLITGLVRYNGTDYNYNKIEYKLIDRNSTERQYLTIGKNIIKLEKCGTDILGQIYKIENKTCKFDL

SEQ ID NO: 6585 - protein, 1071 aa, unidentified
  REGION 1..1071: note = Description of Unknown: Cas Enzyme sequence
MTSSSHTQFILGLDLGVASVGWALLQAEQDPETSGWIPVGLERLGVRVFDPGTEGTPEQIAKGRDESRGQARRAARGLRRNIQRRAARLRRLYRLLSERGFLPELPTDDRPEFLRRDEALKHLDRSILDRNGRRQDSDWATKSPYLLRALALEQALLPHELGRALYHLAQRRGFKSNRKAAPKADEKPGELELEFQRTREALQGERSLGAWLAKQDPHEARIRTRHHQRQMLEQEFEAIWAAQTPHHEALRDPDFRAAVHHAIFYQRPLKSAAHLIGWCSLEKGAWVTFTNKKGKLRRVYRAPRRAPKAHPLAQRFRLLQKVNDLELWFSDGRKAKPTSEQRQALLERLSQGDLKPSDAKKLLGLGRFDRINLLTEGEQKSLPGDRTAEKLLPILGPERWQALNPEARERLVGDLLRIEDADALRQWAETHWKLDPQTALALAKVRLEDGYIDLSLKAIRKLLPHLEAGWPYATARAIVYGPDRAPEAEDSLPPVPMAFPALRNPLVARTLTELRKVMNAILKRYGKPVTIRIELARDIKRSREDRKQLSNRIEKLRKEREAAWKAIQQECEKAGIALPKGRKDAEEKWLLWEECGGVCPYTGHAISFHQLFVTGEVEVEHIIPYSRSLDDSFQNKTLCFRRANQAKGDRLPSEAFSDQQLAEILQRIEAWDPKKAPARAEKLRRFRLKPEELTTDFTSSQLNDTAYASRLAQQYLGRLYGGLSDAEGHRRIQASKGQVTAILRRALGLEGFLGASEGPKNRDDHRHHALDALVIALTSPGTLQALSRLAQQNALAQARELKLPAPWENFREDVQRNLDDLNVSFRQDKRSVNGRLHEATFYRRGSDGRVYVREALTNLSAKDIPLIRNDGVRKAVEAALERAQEPDPKKAFKDPAKLPYLEGSKGKRIPIRKVTVEVSKSLIQVGENDPTRWTPADGNHHVAVVAQTDARGRATWRGHVVTRKEALDRHRKGLPIVARPEGFVMSLSKGDLLRWYEKDAHGNEVEKLFLIRSVYGDENSYIEGHDPRDARDKETIKKDHRFVRKSLAQLMALKAEKVLITPMGDLRRCRD

SEQ ID NO: 6586 - protein, 1125 aa, unidentified
  REGION 1..1125: note = Description of Unknown: Cas Enzyme sequence
MSGNPSSGQPPFQRKKLKRGLTQEQIDSLGPLTFGFDIGIASVGWAVLSETRIVDLGVRCFDAAEDPKTGESLGERWRTQKVVRRRLHRRVDRLKALRRLFVQEGLLAKPDATLLAAPPTETRQVNLQTPWALRSRGLDERLEPIDWARVLYHLVKRRGFLSTRKAERVERSATTANAKEKQGLLAGVAATARMLQVDGERRYRTLGELAFKSEAFYMAKRNKAGAYSRSFDRNLLLDEIKTLFDAQRKLGNTHTSDGFHGQVCQLLMYQRPAVTGEAMLKLMARCTLEPSEYRAPRNSYSAERFIWLGKLANLRIVQNGERRELTQGERALAVAMPYENKSGKITYKQLRNHLGLGTSPQIGFAGLSYGSKRNKKGEAVDPEEATLIQLRGWPALREALLDANLKESWEKLSVNPAQMDRAAYALSVYQTDDELRPALSALDFSPTEVEALLTIDFKGFIALSSKALERILPHMELGLRYDEACDRAGYNHAQPQAASRSHGRLPKFSYEDIRNPVVFRALNQARNVLNALIDVYGSPARVHVELARSLSKSFEERRDIQRDQETYKKSREEAEKMFREHFAGRSPNPRNQDLLKYRLYREQDGKCAYSLAAIDLERIVEPGYCEVDHALPYSRSFDDSMSNKVLVLTKENRDKGNRTPYEYLGGANDSAAWRAFEACVVGNKQYRKAKRDRLLRRNFDDMSAEGFRNRNLNDTGWVVRLFANRVRDNLRFAPGRDGQVAEQPVLTPSGGFTSFLRTRWGLHKDRESSDLHHAQDACVIAAATPALIKRVSDYNRKRETLEILPGGAIVDVTTGEIKKDAKAHFPEPWSHFRDEVLARLSNDPSKAVSLVSPAYGADVLAHMQPVLVSRAVKRRAGGAVHQDTVRSVKPHLGPQTSSKRTRLTDLNIAKLDQIVGAQDLRNAGLMHVLRSRLEAFGGDGKKAFSPSQPPVHKPRRDGTDGPVIRTVQMKDVQKGGVPVRGGVADQASMWRVDVFEKAGKFYLVPIYQSDRVTGRALPNRAATANTPRDQWRLIDDSYQFHMSLFPNDLIRLKNRKMDFTGYFAGLDVATAAISILAHDRSSAIGKDGLLRGLGVQQGTEVFGKFLVDVLGTKFTAKQFVRDDLA

SEQ ID NO: 6587 - protein, 1273 aa, unidentified
  REGION 1..1273: note = Description of Unknown: Cas Enzyme sequence
LGPDLGTNSIGWALVEIDEYSIPFRIIALGSRIIPLDSDSRDQFVKGQAVSKNKDRTTARTQRKGYDRKQLRKKDLKNLLEKFKIYPSEELMNIPMLDLWKLRNNAVNENEDITAEQLGRILYMINQKRGYKSARSEANADKKDTDYVEKVKGRYTQLKEKNQTIGQHFYNELKTANSNHTYARVKENVYPREAYIDEFDTIINIQKNKHAFLTDDVINKLKNEIIFYQRKLKSQKGLVNVCDFESFETTYIAKETLKEKTIYTGPKVAPKTSPLYQTCKIWENVNNITLKTKNPEGSKYKWSDYYPTLEQKEKIAKHLNTNSKLTFEELLKIVDFKKEYVYANKQLKNGLQGNITYYEIEKVLGKSDLLKFNTDIIAINKSAYLIDKKTGEILEEKDAFIIDPEIENEPLYQLWHTIYSIKDIEECKNALIKRFRISETEADKLSKIDFNKQAFGNKCSKAIRKILPYLMQGYDYSESCSFAGYNHSNSLTKDENEKRILKEKLELIPKNGLRQPVVEKILNQMINVVNAIIETYGKPYEIQVELTRELKQSKDEREDADKYNRDAKKLNDEVEKRLQSLSVPSTKKFIQKYKYIVQTRGVIDEKGKLQSYKLENAKVTNQCIYCGESFSLTEALTGDNFDVDHIIPKALLFDDSQTNKVLVHRSCNKNKTNTTAYDYIASKGEDVLNAYLVRVDNWYKSGIIGYGKMQRLKMSYIEYTERKKLKKETEADKKLWENFIDRQLRESSYISRKAVEILKQICTYVHTTEGSVTAKLRNLWGWDDVLMNLQLPKYKELKQTKLKEWTSEHGKHKHQKEIVSNWTKRDDHRHHAIDALVIACTKQGFIQRINTLNASDTRNEMERDLAEAKKEYNEKLTLLEKYLESQRPKTFTTKYVEEAADNILVSFKAGKKVATKGVRKIKKDGKKVVVQNVLVPRGALHEQFVYGKIKVIDKNKSIKYLFENPKAIVDKSIQYLILDKLAEYGNDAKKAIASLKKNPVYLNKEKMIALEKADCFITETVLKYPIQNITSKDVPFIVDNTVKQLVKKRLEQFSSKEKEAFKTTLWFNETKQIPIKSVRLFTKLTAVQAIKKDKNGKEIGFALTKNNHHIAIYKDAENNYSQHACTFWHALERKKNNFPVIINDTKTLWNDILNKKLTKEFAEKLPPDNLKIEYSLQQNEMYILGMANEELETALNTKDKKNLSKHLYLVWSVSENNFWFRHHLETKNSELKQTNGAKESKRYYLFKSVGAFLNANPKKVRISALGEITKIGE

SEQ ID NO: 6588 - protein, 1014 aa, unidentified
  REGION 1..1014: note = Description of Unknown: Cas Enzyme sequence
LTKVIPEKIEFVNALKELYDMVFLKILFKDTEEPLISSLMIEKYNVHQNNLKLIKTLLSYDREEYTKFFKTKKEDKQDEKNKKDKKCCLYEQYMQNPNTNFDNKKLKEVLKETLSKIANKIEDTKLLEKYNELKENLESENYVVFPKITDTDNGKFPYQLNKEELIRIIENQGKYYPFLLEKVNDKYKLVKLLEFRIPYYVGPLHNYSNNYKIENPNMWMVRKQDGKLIDPFNFEDVVDINASAEKFITRMISNCTYLLEEPAIPANSILYSKFKVLNELKQIKVDDQKLTVEQQNDIYNNLFLKETGIITNEKFTSYLRQKNHFNPYPELKITGYSSKDRFANSMQPYIDFFGENGIFKNTNYKEEDAEDIIRLITIFEDKKILKEKIKVNYDLSDEAINKILSKKYKGWSNLSKKLLTDIYYQDEITKEYKNIITLMEETEENFMQILHSKKYKFQEKIDEINNKKTTSKLSYELVQNLVTSPATKRGIYQALKIVDEIVGFMGYEPKYISLEMARGDEKKERKDSRKEKLLEIYKAIKKDVENYNELYSKLNSYEKINSKRLYLYFLQLGRCLYSGEKIEIEDLNDSNKYEIDHIIPRTLIKDDSIDNLALVKKETNQKKAASFVVPWEYRNQSSVFWNQLHKLGLISINKLNRLRRNEYKDSDIEGFINRQLVETRQISKHVANILKKLYPKSNIIYLHANLSSDYREKFKLYKFREINDYHHAHDAYLATVLGQYKEEYLNMIKFSKLKEINNDYYNDKQYKYGYVVNSLKDGLQHVSKETGEILETSNLNKIIKNTIYRNDILVTKKTEFGTGEFYNQTLRPKTSKNIEKKIELKKNLPVNWYGYYDNLNKAYTIVVKYNEKNKEVNKMLGIPIHIYMQSKNNSNLIKDYIKKALGLKDNTNFDIIKNKIPFNTLLNWEGKLCYLVGAGEGIVEVCNATQFHIEKEKMERWKEAFHRLLNGHNKAIDDVNYGIRLSEIIDYIIEKIEQKYPIYKSEVVKLKEWFNYKN

SEQ ID NO: 6589 - protein, 1265 aa, unidentified
  REGION 1..1265: note = Description of Unknown: Cas Enzyme sequence
MKKTILGLDLGVSSIGWALIEVIMETYQPIRIIAMGSRIIPLDSNERDQFQKGQSISKNQDRTIARTQRKGYDRKQLRTNDLKKTLQKLNIFPTKELMELPMIDLWKLRSNASNHSENISAEQLGRIFYMLNQKRGYKSARSEANMDKKDTEYVAEVKGRFEDLKEKNKTIGENFYDELLLANNSSQYFRIKEKVYPREAYIEEFDKILDVQKSKHSFLTEDIIDKLRNEIIFYQRKLKSQKGLISFCEFESFEKEFSDENGNKKTKIVGARVAPRSSPLNQYCKVWELVNNISLKVKNPEGSKYKWGDWFPSFEDKERIADYLNKNDSLSFTKLLEMVNLKKSDVYVNKQILKGLHGNLTYATLSEILGEENPHLKFDINISPIKKQAFLVDKKTGEILEERDAFEVDKCIEKEPLFQIWHTIYSIKDLDECKKALIKKFNLTEEIAEKLSKIDFTKQAYANKSHKSIRKILPYLMQGFDYSQACSLAGYNHSNSLTLQENENRLLKEKLSLIPKNGLRQPVVEKILNQMIHIINSIIDEYGRPDEIRVELARELKQSKDERNDADIQNLKNKKLNEEIAKRLTEMGLPATKKFIQKYKFIFPVREKKITDAKVVNQCIYCGETFNLTEAMRGDNFDVDHIVPKALLFDDSQLNKVLVHRKCNSTKDRLTAYDFIANKGEEALKEYLERVDDWYDKNVISYGKMLRLKVSHKEYLERKSKNKETEADKKLWENFIDRQLRETSYISRKAKQILQEVCRNVNATEGNVTAKLRKLWGWDNVLMNLQMPKYKLLNQTEIVEWTSDFGKQHHSEERVINWDKRDDHRHHAIDALVVACTKQGFIQRINTLNASETRNEMNKRIEESKNKYNEKLSLLDNYLKNEQPFTTRQVESEADKILVSFKSGKKVATISKFKAKGKNLETGVITPRGALHEQFVYGKIKVRDYNKPLKYIFENKDLIIDDKIRALIEERIRNNDGDIKKALSSLKKEPIYLDVEKQKILETAHCFKDEFVIKYKIQDIKQKDIPFIVDKKVKDILSEKIKQHNGNEKEAFKDVVWYNEKKQIPVRTVRCFTGLSAVEPIKKDENGKDIGFAKTGNNHHIAIYKNADEKLLQHSCTFWHAVERKKYKIPVIINDTSDLWNCILNTELTQEFLDKLPEDKLVLQHSLQQNEMFVLGLSDEDFEKAIQENDKSLISKNLYLVWSISDSDYWFRHHLETKNSELKKIESAKESKRYYRFKSISSFMNQNPKKIKINHLGEITKIGEY

SEQ ID NO: 6590 - protein, 1193 aa, unidentified
  REGION 1..1193: note = Description of Unknown: Cas Enzyme sequence
MKKILGLDLGVSSVGMSVIYENGSDKKIAELAVRIIPEDPNFHGKFYSGNTASKNLERTKNRGIRRGNQRFKQRRDNLYRTLKENNIFPNESLFKLDALSLYELRYKAVTQKITLEEIGRVLIHLNQRRGFSSNRKSNNEEEKSSDYKKRITELQYELGEMTIGQKLYLELKESNNPISILIRERTYLRSSYIEEFDRIFECQKTFYPLILTGGINEDDNKGTLYDTLKNKILFFQRPLKSQKGLVSECNFEKHHKSINKSSPFFETFRIWQRINDLSWKTTKGETRYPTLEQKKLLFNKLFKGEDLNVKGELTVTKIKEVLGYSKNDKIYLNFTELDGSKTYRLIKNALVKANLNKIENYLFFNYHINDEKGGLFELWHILYSLPTEVEIINTLKKRFKITLEQATIIAKEVGFNADFGSLSTRAIKKLLPYLENGLGYNQACDKVGYDHSGYKTKIELKGKLENIKQNSLRNPVVEQVLNQVVNIVNLAIEKHGMFDEIRVELARELRNSAKTRKKITKSNADNKRANDNTRERLKTEYDFKIVNGRDIQRYNLWNETNQICLYCNSPISKTDFLTGQADIEHILPKSRSFSNNMNNFILAHKKCNSTKGQMTAYDFMSKSSEKLNEYIEKVNTIYNDGKGKISRAKFENLMCSGEDIPSDFVERMKKDSQYISKEAVKMLKTVCENTYTTTGQITDFLREKWGLKEVLKEINFEKYESIGQVEVKEIKDSIGKTKSIKIIKNWTKRDDHRHHAIDALICALTNQKIIFKLNNLNKIYQLEKETLTKEERLQIEKILSENAPEDVKFDLKTFAEHSDNYFDPPFHNFKEETKKHLDNIFISIKKTTKVLSPTFNKAKKIDIQKTWTPRGRLHEETIMGQVKRITDKKTKLNEKFYFLDNIVDKGVKGVIENYLKQYNGKPEIAFSSKNLKQNPLIYKGKEIKDVSIYETTCTKRVKISENITEAQIEKITDNKIKKLLKKRISDHSGKLKQAFANINDNPIWLNKEKGIQIKTITVFDESKVEKVRDGFVKTGGNHHAIIYKTEDGKYNDKVVSFWEAVEIGLLNIQSKGNPYPIIDKSDDSFLGKFQFSMQINDLFVFDLKHSLNPQNDNEINLLDSNNRSLISKKLFRIQKMSKKSSGEFDVHFRHHLETTILRDIPELTWINLRSNKLLHRLTKIRINSLGEIIKIGE

SEQ ID NO: 6591 - protein, 1120 aa, unidentified
  REGION 1..1120: note = Description of Unknown: Cas Enzyme sequence
MNKKPPRDARNYRVGIDVGTHSVGLAAIEYDELGRPTEILSAISQIHDSGVLEPKTNTTRLAASGVARRTRRLVRRRRRRLLDLEAKFKDWGYAEPDESTDPYAAWRARARLATEKINDQEELGKALTLALRHLARHRGWRNPYHSTKSLRAAGDASEQFEAYKKRVEESLGKTFAEGVTVSELAVAAMDFNNRLPLRMGKTTNLRADRTAASYLGGKLMQQDNANEIHKWARVQGLPAERVSEIIDSAFKAESPRGSWVNKIGKDPINGEPRAPKATDTFQRFTILTTLANVRVKADGGVRPMTVGERSRAYEYLINHKPGEQPTWSDIAAVVELSRGALQGAAALDEDQTERLPQRPPIMLTNARMREVKKPLHPLRDWWATADRESRDALILLLTDQIEDESSAAGGAAQEVVAALDDDALAALEGLDLPGGRAAYSLGTMRQIIDFLLGHNGDLHIARKALFDLPDDWTPPAEPINAPVGNPAVDRVLKIVGRFLAAAEAEWGVPAQVTLEHVREAFVSAASVTERDREMRRRMEANELQRLKIKTEENAGHRTTMADVRRFDAITRQKGACLYCGDTITFKNSELDHIVPRKGVGSTNTRTNLVAVCITCNRSKGKLPFGVWATKTEREGVSVEEAVKRLQFWTKDKGLGAQSWTRFRADVRARLEQTSEDPEIDGRSMESVAWMANELHARIAAYFGAQTKVSVYQGALTAGARNAAGIAEKIPFVGGGGKTRLDRRHHAVDAAVVTLLDESVARTLAERNSLRASRFYEPWEKQDEWKTYSGNGEAAKSRFAEWRASMESLAQLMIAAFADDRVVVMENLRLRLGSGRVHEDTIHPLVKRAVSSAFTRDEIDAASTPALWHALTRDPDYSKSDGLPENPARRIRVQGQHLGPEDEIGFFGDAKKDQIQRKAALAVRGGWAALGDSIHHARIYRWQEKGKAKWGMLRIFSADLHRHRNEDLFAVEPDASWISMRNAHPSIGRADLSELEYVGWLVAGDELEVKMTSKVRTGHVAVASDALELGEVQRWTVTGFMNESRISVVPTQLSAEGMARFLELRPDLAASAPSVDYVLKRWTPYINVLLGHGSPRVLRRDALGRLRAHSQSHLPVSWSSD

SEQ ID NO: 6592 - protein, 1287 aa, unidentified
  REGION 1..1287: note = Description of Unknown: Cas Enzyme sequence
MEKNFGDYFLGLDIGTDSVGWAVTDLNYNILRFNGKSMWGVRLFDSGNTAEVRKTARAGRRRLKRRRQRINLLQDIFAEKIYNVDSGFFQRLEDSKYYIEDKHEQQTNTLFNDSDFKDKDFHKLYPTIYHLRKALLEDGKRFDVRLVYLALHHIIKKRGHFLFEGTTINSFDSFSVPFDMFVEKVKEALDIDIECKDLDALSEIMSSKRLSVNDKKKQLSELLPSQNATGKEIVNLLAGGTVTLSVLYDDDSLVESNMNKLKITDNFTEEDLDNLTMILDNKADLIIAAKQLYDWSMLSDLKKKYTYLSEAKVADYEKHKTDLKLLKKVIKKHYPEKYDEIFNAPNIHGNYCSYVDLCMKNKRKIPVLKKCTREEFYKYIKGILNKRKNLEDKDVDYILTEIETQTFLPKQKIKDNTILPYQLHLEELERILENASKYLDFLNFKDETGFTNKEKIIKIMTFRIPYYVGPINDAHKVNDGYGGNCWVVKKSRERITPWNFDSVVDIEASAEKFISRMTSKCTYLESKNVIPKHSMLYSEFMVLNQLNNLRINGEKISVELKYRIIDRLFKKYYKVTLKRLREFLEIEGVIEKDAVITGIDGDFNVSLTSYIDFSRLLGDQVNDTEMIENIIRWIVLFGQDKKILRAKITKTYKDKLSDNEIDRIMTLSTKYSGWGRLSREFLTEIYSVDKETGEYFNIISGLRNTNNNLNELLSKKYDFYKEVIRINREELPDFSGRIDYALVEELYVSPKIKRGIWQALLIVDEIRKIMKSDPKKVFIEVAREPGEKVRTKSRKEQLLELYKAIENDSRDWIAELEGYDDNRLRQDKLFLYYIQMGRCMYSGEPIPIDELFTDTYDIDHIYPQRYIKDDSLANRVLVKKVYNAIKGDKYPIDHEWQKKNKTYWKMLYDKGFMGKNKYERLIRKTELTNEELAGFIARQLVEVRQSTKAVANILKSIFGKSTEVVYTKAMLVNDFRNRFNKDEKNKYYFYKVRELNDFHHAKDAYLNIVVGNVYNVKFTHDPINFVKKSKRNYSFNTLYDYDVIRNEYCAWKAGPEGTIKTVHDTYNTNNIQFTRHSYESKGEYFDSQPVKKGSGQFPLKVGDFRLSKNTDKIAQYGGYNKLTGAYYLLVEHGKENKRVRSIEYVPLVLKKQLESDKGKMTAYLIDQGLINPRIIIPKIKVNTLFCINGYYLHLSGRTGNRLTYKNGVQLTLKPEEEEYVKKIYNFLKKASEAKRDIRITPYDHITADENVKLYDRLASITGNDMYNQKYMYRVPFEKLKEGRQLFV

SEQ ID NO: 6593 - protein, 1160 aa, unidentified
  REGION 1..1160: note = Description of Unknown: Cas Enzyme sequence
SDTKGKKQEYWITLEDGREGRTTISNIETYCGKLTELEIRRRRTKDGTENFEFALPDKTDWQNRLDALDKQILQSRMHVGEFFWSKIKENRHYRIRQNFVQRDRYIAEFDALWDKQQEFNRMLTDEVIKNKVIETIVRNPSEKEKWLKKSLKDFIKNYIIYYQRPLKSQNSKKALCRFEPVIKVQNKKTGEIIEAGNKCMPLSSPLYEEFRIWQKLNNLRIKDIYEKSHELTTEQKEILFEKLYEGNTLKPSSIFKLLNLNKALFSELNFEQIEGHTVKAKIINTLKDRATEIISNETSLYKVWHLLYSVNEFENRKKNLQKWFGLNEEESEKLAKVRFDKKTGSLSPRAVKKILPLMRAGKYFNESDIPDYLIQKINRIINGEYDPEITDELREKFSECKDLRDFSGLPYWKAATLVYGSHSDFSSVEKYEQAEDIQLIPTGELRNPVVEKVINETLMVARDIWKEFGKPDEIHLELAREMKMNAAERQKLTKFMREQQKQNEAFEEILKKEFQITKPTKTDIIRYRLWNDQKQRCIYTGKTIQKAQLFNGETDIDHILPRQRYFDDSFNNKALCFRSINEEKSNKTACEYVQSKGDEFWQEFVGRINELYKEGKINKKKKYYLLTDKIPEDFINRQLNETRYISRRVKAELEKICTVVSTIGNITDYLKEDWKLNKVFKEVQLERFQAIEARIGKQLIFEIKNNGYHDYQIEGWDKRIDHRHHALDAITIACTNRSMIQQLNNLAQLHPASESLKNNITRHFPIPSPDFREQVRDILDNMIVSHKSRKRLLTYKKGWYKVFDPLTGKYIMKRQENPSPGIRGQLHDEQPLGEIKEYEKIQVKEAFQRIADNKNTLQLYLDSAFPVQWQKQKLFEKLEKYMLDPDKVLKNLRKDPVTKLNGEELNYVTILKRKYVKTRNLDTAITPNQIENIIDRKLQTEIKEHLKKYGDDVKKAFTTEGLLEFNKNRKIPVYKVRCKVDDAEVNSVLTREPLERDSEKNPKLHIEKGDNYCFVIYENEKNGKREYETVSFFDAVNLAMEGQSIVTEKEGYKHIILKHNEMIYVKRPNENFEDIDWSDLKNIVKRIYRIVKFSKKQLYSLPHYVAAKIELPVDIIEKFNEFGTPNCIEFIDSDNPRTKIAEKLIKIRINRLGQIQPDFL

SEQ ID NO: 6594 - protein, 1060 aa, unidentified
  REGION 1..1060: note = Description of Unknown: Cas Enzyme sequence
MEETVFAFDVGKGSLGVAARRGNEILEARSLLIPAEFASITEQRERRRQFRTRLAHKAREKWLKDQCRAAGIEVLEGRFPGDRKNNIPPRKADPRLEREFAEPGDPTVYTSCLLRIMLLRGEKLEGWQVYKALHSAIQRRGYDPKVPWAKKGKEGDHPDDNGTEEGNETTEGEKSDADKEERENQKRINAYEKNLYDIVGGREEFMYPCYHDAAMMGLWDPSSDKFTARQTNDAKRARYDTSDITDTGGAKGFAPRHLVQKELRALIDAAAKNYPTLAGKADFLMYGPAEMQYASFYKKTRDDYKIKAGSEWDWQGALSQKIPRFNNRSVNHCVCIPRFHVCKAEDILSIRTTFLLKLINMRYLDSESRKTQLTAEDIRAIFDEKTKKEKKNLSSTDSAKLYSMNATEWKKWLKKNKSGIPANKGDKIEKPEINGRSSYCRPALRLLVKLITSGESPHAFHDHISSEISNTDTKKGLVREDLAFLRLMPDDWNRIHIPAVQLVDKYCLEGGAIDDAIKQLINKQNSPVIRHRLGLFWKELVSLEKKYGIPDRVVVELVRGDFLGEKKKEKVINEQNRNRRKREVARKKMEDFNWEPSAKNLDKMILLLQQNCQCLFTGELLSFSNPDLLEIEHVVPRGEGYKGPDSNLNTVVTTIDTNRKKRKRTPYEFIQQDKGTADWDAYRNRVIMCKRELGKLKVQILTAEHPEELLEKYTPLAETAWIARLARDIVCLSFGWQPGLEDQEQRIFTVKGRLTANARYKKGLNSLLGTDGKKKNRDDPRHHALDAMVLSFITPNKPLIPTTVTREDFKRWLENKTIFEPAAFKKPTLGETFYAKRKHEGKDVMTLRIPIFEWKKIKPNIPDIRDKCIREQIEKFKDELDSFLKTNPMEKKDIEKYEQQRWIEFVKYLRQSSKGGSRVFKVSITSGTTKEFADLSKEHHWPEIHWNEKGQYKKGKKEHWGQFVCQDKNGKPFVFPVYAFQSIHNERKRRISEGYQNLMFFQTGCKVKLDKDVYVGEKIIPAGEYILSTISEMNQQVSLKNIDPEPAISSLLSAGFHRVK

SEQ ID NO: 6595 - protein, 1065 aa, unidentified
  REGION 1..1065: note = Description of Unknown: Cas Enzyme sequence
VRYSLGLDIGITSVGWAILDLENKYIEDLGVRIFERAENPKDGSSLAAPRREARGSRRRLRRKRQRLNDVRDLIVYNKLLSSSELEALFETPSEFTPWQLRTDALDRKLTQKEWARVLIHIAKHRGFKSNRTASADEKDAKAQEDGKAKEAMKANEILMSTGNDGKGYRTIGEMMQLDPKFAEHKRNKGGDYSNTVLRSELESEIKILFSAQRKQGNLFASESFEEKYIEIFNRQLPFASGEIIEKMTGYCTFEHDQKRAPKASWTAERFILLGKISNLRVRVDGKKMELSLEKMRTIEELAYKHVKVTYKQIRKTLDAGDNWYFENMPPVKSSKDKEADPESATFTELKAFHEFRKTISKSLGEEYWETLISTSPTTLDTLAYALTFRKTDDEIKSYLKERNVDDKLIKAILPLNFSKVVNLSIKAMSKIIPHMEKGYRYDEACELAGYSHYSPYGSSERSLFLILPEFEEIRNPVVFRAISQTRKVVNAIIRKYGSPERVQVELARDLSRSLKERNIIAKEQQDNRAQKEKYAQDFENTFSFRPNGSQLEKYRLWKEQGGYCPYTGEYIRPDMAFTSNDGSYAEIDHIIPYSRSFDDSFINKVLVMGSANRNKRNMTPYEYFGSDKEKWEKFVVNVDTHIKNRRRAQRLKIKDFGETEEGAMKERSLGDTRYITKFVAGWIENQLIFSDPSIKRPVTRLNGRATATLRWQWGINALKDREKSDLHHALDACVIAAATPSIIKSISDHSRKKELSLLRSEEEHNKKTRLPEPWPRFRKEIEARLSENPVEAIKEFGLTNYSEEKLESIKPIFISRKPERKATGAAHEETIRSSKYIEELQKTAVKTNILSVNLNKLEDMVGKERDKALYEALRKRLKESGNDPKKAFKDGFRKPQNNGEPGPIVRSIKIFDSGTSGVKVRGGIASNGGMVRIDVFEKDSKYYLIPYYVDDIAKKRVKNKAIVHSKDEEYWITVDASFNFLFSLFKNDLVKILDSKGKEIFGYYVSCDRSTGAIELLHNASETNWRGIGVRTAKKLEKYTVDVLGNYYKVKKEKSPYELANCDSS

SEQ ID NO: 6596 - protein, 1404 aa, unidentified
  REGION 1..1404: note = Description of Unknown: Cas Enzyme sequence
MGLILLVKKNKAEWYLGLDIGTNSVGFSATDLEYNILTKGGKLQCGARLFKDAQDASTRRLFRSTRRRMARRKVRIDLLQEIFDPVVSQKDASFFIRLNESDLHLEDKSVKSDYPLFNDKGFTDKEYYKKFPTIYHLRYHLLNNEEKDIRLIYLACHHLIKYRGHFLFPNFNTNRGCSGFENKLKEINEFLLEQSFEKLFVENNLENSLDSIINDKSKSDKQQWDEIKEKLNPTNDKKLNSVFTAIRGNKISLSKIWEDLDEAEKEIKEELKDFKFSSDKYEECLIHAEEILNDDQLTLLELLKQFYDLIQLNRIVAGSSSIAEAMVHRYEEHKADLKLLKKFIKTHLPDEYDKMFRKNIDFVDKGHIHASYVNYVGSNITHNRKSTSHSTMCVDKNKEPVTADYSDFLKYTKALLEKAGNVAKTSEEYLILLDKIEQESLCKIHNTQENSYIPYQLQEAELKAILKKQQNNFEFLKKEAGKILSLLTFRIPYYVGPLNEAHKDIPDKFAWIEKLPGFEKQKVLPWNFEKVVDAAKSGENFITRMTAKCTYLPSEDVIPKQSLLYQKYMLFQDLNNLKINGNRITQDLKMFLYNSICQKETSLTKTKIKKHLENHGKITKKDSVGKENENDLAFNSSISSYIKLKNIIGNSMNDEMCENIIKWHTVFGDEKRPVQARIKRQYGKELSEEQIAKLSKLSFKGWARFSSKFLNGITTTDQTTGETGLTIIKILEETTQNLIEILNSDNYFEKFQDIVEKEMQKLRREEIDYGYVSDLYCSPTVKRSIWQAVLISKELMKINGGPPSKVFIEVTRGTDKKQKGKMKSSRRKQIENILDKMPKETSDLTTLKRELAQKKDEKEFRSDRLFLYFTQLGKCMYSGEKIELSDLNNYNLYDIDHIYPQSKIKDDSLTNRVLVKRSANAHKSDTYPIEYSIQKERKDFWSFLRSKNLITNEKYNRLICSQPLTQSIIGGFINRQLVSTNQAVKETTKALRILFGFSTDSRKIVYSKAANVSEFRNTYDLIKSREVNNLHHAHDAYLNIIVGNVWDSVYGRYWSDNFTFNENNALDRLFKYDHKEAWKVSYIEKIKAYLFDNKKYLDKFLITTRPFEKKGEFYDQTIHPKGKAQFELHKGYDTEKYGGYKNANTAYNCLIEYDGKKDERVRGIFSVPVRFAHLKTNELLAQIAEENGITDKKPKVLMPKIQLFSVLEVDGIRYHMRSGISDNKLQCSVTVEWYPDKDIIQIVRDIFKFKKLIDDKNFSKETVEEWKETPHDIEFATRERNKNIKEGKKISRENNLKLYDAIIEQIKKPFYQNYPTGKKVREEKILREKFEILKTFSQMEQLVELLNVITMNKANADTTNIGGVKYDECKYKISGCNNVTSKNIILITQSPTGLFENKIAINLK

SEQ ID NO: 6597 - protein, 977 aa, unidentified
  REGION 1..977: note = Description of Unknown: Cas Enzyme sequence
MKQAKIGNYTIGIDLGVASVGWAVVNNDTEKIEDYGVRTFEQSNDAKGRREARGVRRRKKREKTRVLDILKLLEDNNFYNKITIDNKLIETRLKGLKEKISKQDITNILVFFSKNRGYIPFDDESDKEKALIIDLNGKYPCEYYISQPEYKELKKYRATNKVVNNEDNIREVKAILKTQSKYYSELNDELIDNLLEILMRKRQFWEGPGGIKQTTPYGRFKNQDEIDIYLENKRINPKYEKYLFEDLIGTCSISINEKCAPEVNYYAEYFNFLNDFINLRFNSLENIENKDLVYINDRKEIKLNKKGILSFKEYLNNFEGKQLKKDKMFESVLGTKVNNIQGHRIDKDGKMLLSLFDFYLYVKKSFVDYNREWIEDIETYNKVVYYLTICPGIVELTKMISNDNDIKYKFKEEELNILSEIQSKKKSNLKYHSLSEKTLIMATFDMLDKEMNFMQVSRLLDYEKEKREQIQKEYQKFSKDIPILTTKYVDEIIASPQVKKSLRQAIKVINQIILDRGEIPYCIAVESAKEMNGKETLKKINTEQKANELNRKNAIEYLIKTSGEKSVTENTIERQMLYNEINGICPYCNKPFKQNEAIHIEHILPLSLSADNSFDNKTLAHLECNSNKGNKTPYEYLNPKGEFSTFKDKIYKLNLSEKKKQNFTTIDTLSKYSKKFINRNLRDTAYATKELIRQIDNYNYYLSTILNQDKNKVMTLSTPGQLTSKLRKNYIKEEKDRVGNSHHAVDASIIASIPNTDIGKLIIQMQNDSKFWKMNEEKFEINKSWIEKITLSTSSINQIKEINEENTKVSNQTKKNPQAQLSNANIYKIINKDGKTYKIKQIDNIYEYFTKPEHNKFFEELLDEKQTKSTLLMYDNDKNAFNTLKEAYFKHKNEDGNPYINYAVSKYGIDYKDFDINKHGLKASDKKNSPVIKKLRYYEIINEPYYIEKDNINTRPNTKIAIDSLNQYCIRIFRDLD

SEQ ID NO: 6598 - protein, 1374 aa, unidentified
  REGION 1..1374: note = Description of Unknown: Cas Enzyme sequence
MTYFIGLDMGTSSVGYAVSNEQYEILNFRQKAMWGVRLFDEAQTAADRRMARTSRRRLARRNLRLKLLQDLFSEAINAVDPGFYQRLKDSFFYPEDKDEEQIFSLFADSDFTDKDYHKKYLTIYHLRHELISNPEPHDPRLVYLAIHHILKSRGHFLFTGSFDMQGNGQYIETFKDFQATLSEVFEITLPTELAEPIKNAINDKSLKKREKTEALKKITNWKDANAVAILELLSNRKVRISKLFGEEYEDQSPKDVTFEGAGFEDEKQAELQALLSDDEFSLLLSAYRLHNQLRLDTLLQGYETYSAAKIGLYEKHGADLRKLKKTFRKYFSSDDYKAFFSQSKNKLNNYVAYTGHLKKNKKKVAVNYRCDTISFLDDLRKKLEPVAKAHPEDNALAEILVEIDNQLFLPKQVSKDNSLIPNQIHVEELKAILNNASTYLPFLNEIGEDNHTIKEMIVKLAEFRIPYYVGPLNPAHKVRAEKKDGSRHAWITKRSDEPVRPWNFHRVVDEEQSANDFIANLTNKCTYLIGEDVLPKESPSYARFILLNQLNMLSHRGERLPVIYKHAIYEGLFMAANAKSRFSKKDIAVFLNSQSGDDFNAADIGGMDQQINNVLKAERQIEAIAPNQLTLQDKEDIVRLITVLPDSNKMLVNRLKDQFHTKLNDEQIKRISQLSFKDWGNLSEKLLSGIRAIGPGGVETNILDAMWDNNLTLMELLSSSYGFKEQIDIYNDEIVGEVSTLDYQIVDEYPYLSPAVKRMIWQAIKIVNEIVKIQKSAPEKIFIEVAREEGKKERTTSRLEQLKQIYKEAEIIDEHLLSELNEQSESSMRRKKIYLYFTQLGKCAYTGRPIDFEKLLEQGDASDAYYDIDHIYPRSETKDDSLRNNLVLVESSANRDKGDEYPILPAVQKARRAYWFHLKEKGLISDEKFLRLNRTTELSKEELESFISRQLVQTRQATKAAAEILGKFYPNTRVVFVKAGHVTDFRYNQSDFQFIKVRAMNDLHHAKDAYLNIVVGNVFDTKFTQNVLNYVKSAGKRDYNLARMYDFDVKSRDGKSAWKAGKDGTIQTVSKMMARNNIVTSYQAVQRTRGQSGGLFDQNLLPKGQGQYPIKSTDPRFVGDDGIAKYGGYKNITGTTFFVAEHTLRNKRVRSILPLYLPWVLTNGQSKEALQEYCQNTLNLVDPQIILSNLPFNSILKLNGFPLRLLARTGSSLKVAPALQPFFPAEIEPIIKTFTKDIEDDVDDKVLLRTVTEEDLMLAYQVFQQKLSSPPYNNLSSYTNQARNLESGEEHFVLLSIREKFRALNQILILFTCDGRLSDLSLLLPKDENGNPSTKNKQSGMITISQNIQEGSQLEVVFQSVTGLYEKIIRINLP

SEQ ID NO: 6599 - protein, 1018 aa, unidentified
  REGION 1..1018: note = Description of Unknown: Cas Enzyme sequence
MSSDSDYILGIDLGTNSIGWAMIEKSEAGPCAIARCGVRVFEAGMNLDERGKAESRNAVRREKRLMRRQIERRARRRKVIFNMLMNAGLLPKGDRQQLEGELKAVVVEDPYTLRARALDERLEPHQVGRALYHLAQRRGFQSNRKTETRKKDDDQGKVKQAIAEFEAKMASAGARTWGEYLAKTGCPDKRLRGRYTHRNWYKHEFEQIWQAQSAHHPEIMDETLKARLHKAIFHQRPLKNQKFLIGRCELEPKRPRAPMALLAAQRARYLQEVNHLRYSVDGGEPRELNEEQREALIAELERREKITFGGIRKLLKDRGLPRGAQFNLEAGERKEIKGNTTSARLGEIFGERWERMSEEDKERVVEDVLCTREEGTLARIGRARWGLEPEAAAAFGAVQLEPDYSRHSRGALGRLLPYLRAGMAYTNAVEQAYPDHRASAEAVDRLPPLRKWGQVRNPIVERSLTELRHLVNTLIREHGKPEMIRIELARDLRQGAKERERTTARMRAMEKRHQEAAAKILAEIGNAHPTREDRIKVMLWEECGGQCPYTGQRIASIHELLGEHPRYDVEHIIPFSRCLDNSFGNLTLCEVQENRQRKRNHTPYEAYAGDPERYAAILERVERMRNPGKLWRFKLEAIDGDDVTEEFCERQLNDTRYASLLARDYLALLYGKDWRRHVQAGSGGVTGYLRSAWQLTGKQRTDHRHHAVDAIVIALGSPAWVRQLAEASKRSVRVERFPGVPAPWDGFKADVQEAISTVIVSHRASNRVRGPMHLDSLYGSIRERRKDRPNEYVECFVIRKPVERLSEPEIASEKILDPKVREAIQAAFRECGGNLREFQRRMQDPVEHPALERPDGGRTPIHRVRVKQTVKPVALGSGARERLVDLQNNHHLEIFEGVDGKGRTAWIEKIVTLREAMRRRSAREPIVWQKDEAGRSLVLTLAIGETVSLCWKGEQLLCVVQQLSSRDYVFRELKDARTAKEIKLQGERIRIASPAALRASGLRKLHVTIDGRIRNRDD

SEQ ID NO: 6600 - protein, 1178 aa, unidentified
  REGION 1..1178: note = Description of Unknown: Cas Enzyme sequence
MKKILGLDLGTNSIGWALVNEAENESEKSSIIKLGVRVNPLTVDEQQNFEKGKSITTNADRTLKRSMRRNLQRYKQRRENLIDILKENGFISNDTILSENGNRTTFETYRLRSKAVTEKISLQELARVLLMINKKRGYKSSRKAKGTEDGELIDGMEVAKKLYHNNLTPGQLCLQLLNDGKKHLPDFYRSDLQTEFDRIFDKQMTFYPEHLSPELKEELRGKKRDAVWAICAKTFKEKGFELVGTKRQGNTAEQKHENYSWRAKGLSEKLELEQLVVVLQQINIQLNNSSGYLGAISDRSKELFFNKQTVGQYQMAVLDKNPNASLRNMVFYRQDYLDEFNTIWEKQTLFHPILTDALKEEIRDVIIFYQRRLKSQKGLISFCEFESRKIEVEIAGQKKLKMVGSRVIPRSSPLFQEFKIWQILNNIEVFGKGKKSKKQEGQTLFDQTEDPLEFGGRRELYEEEKELLASELSIKKELKKADILKLLFDNPKELDLNFNVVQGNLTQATLFNAYKKIIELGGHEIDVEKDSASKILKSIEEIFKALGYSTEILHFDSDKSLNQQAMYKLWHLLYSFEGDNSNTGNENLINKISELYGFEKEYAKILANVTFQDDYGSLSAKAISKILPYLKEGHKYDVACDLAGYKHSASSLTREELENKIYKDRLEILPKNSLRNPVVEKILNQMINVINSIIDNYGKPDEIRIELARELKKSAKEREELTKSISETTKLHQQYKDILSKAPFNLTNISRNDIIRYKLYEELKDNGYKTLYSNTYISPAAVFSGDFDIEHIIPQSRLFDDSFSNKTLELRSINIEKGNKTAYDFIKGKYGETGEDKSLDKYLNRIETLYKNGVLKKSKYNKLKMQDKDIPDGFIERDIRDTQYIAKYAKTLLGDLVKFVVSTSGSVTDRLREDWQLVDVMKELNWVKYQQLGLTEEFTNEEGHRIRKIKDWTKRNDHRHHAMDALTVAFTKRQFIQYLNNLNARRISDEQGISNAEKDERNNVSITTNDMKLNTRDVLGIEKKELYRDNRGKLRFKAPIPLQEFREEAKKHLENTLISIKAKNKVTTLNINTIKKAGGVYKKNQLTPRGQLHNETIYGSQKQYVVKVETINAKFDVEKIATVTKPAYRDALLKRLEQNNNDPKKAFTGSNALTKKPIWLDEQQTERVPEKVKTISFE

SEQ ID NO: 6601 - protein, 1044 aa, unidentified
  REGION 1..1044: note = Description of Unknown: Cas Enzyme sequence
MARIFGFDIGTTSIGFAVIDHEPDVERGRILRLGVRVFPEARDPDGTPLNQTRRQKRMTRRQMRRRKDRRRLLNETLAKAGLLPDFSSAEWPAVMAIDPYDLRKRGLTEALSACELGRALYHLAHRRHFRGRDVEEADSSEKPDAEEKEAKTEAEKTSKALKDAGTTLGAWLAERDPHQRRRRCEHALRTNVQDEFEKVWSTQAAHHPALRQDGFKSRVEDAIFAQRPVFWRKNTLGECRFVPGAPLCPKGAWLSQQRRMLEKLNNLALAGGNARPLEPDERAAILAKLQTQASMSWAGVRAALKPLFTRQGEPGTEKKLLFNLEMGGESKLLGNPLEAKLAAIFGAAWTNHPHKQAIRAAVHERLWRADYGEIGDQRVVIRSERERQVRRQAAAESFIRDFTVTAEQAEQLKELSFPTGWEPFSFTALEAFLPQLEAGVRFGELLNGPTWEDWRNETFPERERQTGEVLPKLPSPATAEERQRLAKIRNPTVVRVQNELRKVVNNLIGLYGKADFIRVEVAREVGLSKREREEKQSAIRRNEGRRRAATRDLEAKGIAEPSRTDVEKWLLWKECRERCPYTGDEIGFDALFRENDFQVEHIWPRWRAFDDSFANKTLCRRDVNLAKANRTPFEFLGHDAERWAEIQSRLNGLIARKGGDGMSPGKVKRFLATAMPDEFASRQLNDTGYAAREAMACLKRLWPDVGPQAPVNVQAITGRVTAQLRKLWGLNNILSDDGEKTRADHRHHAIDALTVACTHPGMTSKLSRYWQAKDNQRAEHPDLPPPWPTIRADAAAAVAAIVVSHRVRKKVSGPLHKETVYGDTGEDVTTKTGSYRQFVTRKKVEALKKGQLADIRDPWVRQVVQAWVAEHGGEPAKAFPPYPRLGADGPEIRKVRLCIERQVGLMAPVSTGYAESDANHHIAIYRLADGKAVFDVVSLFEAARRLARREPVVQRQWREGATFVMSLAPGDTVELQEGAEKGLWVVQGISASGRPTLSRLTDARPTSKNEAHKQRVEGVRKDFEPRLGGFMSRRPKKLSIDPIG

SEQ ID NO: 6602 - protein, 921 aa, unidentified
  REGION 1..921: note = Description of Unknown: Cas Enzyme sequence
MKKILGLDLGVSSIGWAMVEEDESSKSIAGMGTRIVPLTSDDIKEFTSGNAITRNQERRTKRMQRRRYDRFQLRRETLKRALMKKKMMPDDDLLQAEKLRLWNLRSMAAKEKVGLQELGRVLLHLNQKRGYKSSRKENQTDKKETEYVAEVKNRYDRLRETGLTVGEFFYEKLLNDRYYRIKNQIFPREAYMEEYNTIMKTQKEFYPELLTDDFIRMIRDNIIFFQRPLKSQKKLVSTCEFEKRKVLVEDGKGGKKEALKGPKVAHRSSPLFQICRIWENINNIKIRNKYNEEYKIPVEKKHEIFEYLQSNERLKFKPLLKILGLKNTSEWTCDALLEEKGIEGNRTMIRIAKCLNDHTQAKELMRFDLVIKKTDKTVEFPDKSTGEIINIPHKFIDPSVEKQPFYKLWHTIYSIADENECKNTLIKNFNLPEETAEKLADIDFVKEGYGSKSVKAIRKILPYLMDGYLYNDACSLAGYNHSGSLTKEEKDARQVIEKLPLIEKNTLRQPIVEKILNQMINLVNAISDKYGKPDEIRIELARELKQSKEERSKTSQNINRRERENNKIKERLENEYGQRATRNNVLKWRLFHAVWEDESKVNNICLYCGKAFGIGDALSGTEVDIEHIIPRTLFFDDSENNKILAHRKCNQAKGNMTAYDYMKSRGDKEFDDFIHRVNNLYSQNIISRTKRERLLTPAEKIPKDFIKRQLRETQYISRKAVEILSMICRDVNTTSGSVTEFLRRLWGWDDVLMNLQIPRYREQGLTEWIDFEKDGHKITKEIIPDWTKRLDHRHHAMDALVIACTKQGYIQRLNNLSSELTREDMYREISDLEDVKAGRRTLLERYLAGKQPFTTSDIEKEAQKILVSFKAGKKVATTGTRKVKFKGHKRIVQKGIIVPRGPLSEESVYGKIRILEKNKPL

SEQ ID NO: 6603 - protein, 1036 aa, unidentified
  REGION 1..1036: note = Description of Unknown: Cas Enzyme sequence
MGGSAERTVLGLDLGANSVGWALVGYENGEPAQIVDMGVRIFEAGTDGDIASGRDESRAVERRGARLRRRQTKRQSERMTELARTLQRFGLLPPGELRKGADRHAFFLALDDRLRADFAAQGFSVDQSDGLREFPYFLRARALDAPLEPHALGRALYHLAVRRGFQSNRKSDKEEKELGVVKASISVLEQAMRESGARTLGEYFHRMDPSLERIRKRWTARSMYKDEFDQILDAQARMGALALSPDDRKTLEYRIFYQRPLKSQKGLVGRCELEPGKRRAPVALLSAQRFRILQKVNDLRLHYLDGTERGLTEEEKKTLAAFMEIHDEVSFAGMRKALKLSKEVDFNLERGGEKKLKGNVTNARLLKVFGDRWNTLGDTEKKAIVGEILGIEDFMALARRGLAWGLGPAEAEAFAKIHLEQGYSALSREALKKLLPLMEEGVPFKTAEDRVYGNRLLGKEARPKLDPVVVALPSIRNPVVMRTLTEMRKVVNAVIAKHGKPDEIHLELARDLKKTREARARHSRDIRGREQDRTDARESIQKKLGQQKISRQDIEKVLLAEECGWICPYTGHSIGMSTLLGEHPQFDIEHIIPFSRCLDDSFMNKTLCYHEENRLRKGNNTPWEAYGGDEKRWEEIIARVERFKGDAARRKLERFQSRDIADFEGFAAQQLNDTRYASKLAARYLGMLYGQDALKHVQTSAGQVTALLRDALHLNGLLGGGDKKTRDDHRHHAVDALVIALTSRAAVKRLSDAAKRQKLEKGRIQGFLKNALLPWDSFPADAQSAVDGILISHRVNHRLQGRLHEDTFYSAPRKDENGKPYHVVRKPLDVNFKPADVQGIEDPAVREAVRAHLAAHGNDPKKAFADPANHPRLPGANGPVPIHRVRIRRACTTFQIGGNDYARFVTADSNHHMEIVEETRNGKTRWTGVMVDRLQAVSRKKRGEDVVQKDHGEGKKLVCTLAPKDTFYLKEENLYGIVRSVSNGNVEFISIFDSRKVLDLKKDSGVWRKRSVDALRDLGFVKVTVSPIGEATPCHD

SEQ ID NO: 6604 - protein, 1474 aa, unidentified
  REGION 1..1474: note = Description of Unknown: Cas Enzyme sequence
MRKIGIDLGSSSLGFVVMEDGRIIKKGVIRFDTGMMKGQSGGYVSPTRERRIARSKRNLIRARKYRKWELLEILVKENYVPLNKQELEIWSKYKKGQIRKFPENELFQKWLACDFTYENGKKYKNPYKLRVNALNKNKKVSKHEFGRALYHILQRRGYKDIGETDSETEKQKERRGESGFQKALNDNENIISKALLNEFLNKNKRARNQYPYREEYEYELEQICKAQGFDISKKENGKYTSEFVEKLWKAIIWQRDLRTQKGKIGKCTLEPKKLRCPISHPVFEIFRVWQFINTIKTINEDGEKEELPLLLKNKLFEFFLKKDDNFKFEQIRVFLDKQFHSKKKYNYPINSNEKNKNENYTDGTYETSVAGMPICKGLIDVFGEDAKNALATIEHQNISQRDKNGGFGSAPKVIANYSINDLWHILFSFDKKSTKEKNFLEIFAKEKLILTDEKQIAKFVKLNNKISQGYADLSVKAMCKIIPFLKEGYLYNEAVVLAKAPEILGKDWEENKKGILSAINEANKEYNWNKVIVGTTNNLIDKYKGDPYFACKDYSYQLSEHDYNEVEKACQGYFGEKTWEKRDDKSEIIEDVKQKYQEFFHDEKRVYREVPTFTDIFNEKLKSKKINLDAYQLYHHSNIENIYLKKCKINKKTGERKLPQATNIHGIKVDILPGVQIDSIKNPMFNKSMSILRKLINELIKEGTVDENTEVVLEVARDLNDNNKRIAIERYQNERRSNREKYREFLTEYKKSKKPDLNIEENIPKFEMWTEQIFEQTIDDEGVEHSNKNRIEILKEKDAITRYELWMEQKGQCLYTGKMIPIGKLFSNEIDIEHTIPRSKLPDNTMANQTICYAWYNRDKKKNQIPTQCDNYYKDEEGWGTRIEPRLNKWKTIRDNWKARYDKSAKPRGNEDEAAKNTRIQEKHYCKMHFDYWNDKIERFEATEIKDSWARRQLVDTQMVSKYAREFLKTYFLKVAVQKGTVTAAFRKLFGFQDEDEIKSRNKHTHHAIDALVLTLIPTNSSHRERILKDYFKYIEENKKDKIKELKEKEIPENFNVQKFISDIESSTLIYNFEKKSITKQTFKIVRKRGKCQYLKDKSGNFILDNEGKKILLISRGSTVRSDLFAQTYLGKIKNVERDEKGKPIREGDDWKYKSGKDEFSFVKREDINKVKSSEKLINSIVDPIIRELVRKQKRNSEIKDYQGNVIRHVRIQVKAGREVKERVNYRSKHDYKNKFYSEAGSVPYAILLQKSEETGVKRELLSIASFEIAKMRRDTGGFDVEKYVEDYNPEYKDWEKQLLKVGQKVFVLNEDSDYEKRFDKSFQTNRLYVITQFSESIWLKHHLCALSLNNIKDAVSLAKDEIMTKYEKELNIPPVVEDHSIIDNNERRNDYLSRKYRFDTINNSFRLTRLQAIVGTKKTKEIKKELDKYKAIPSKIEVEGHTYLLKMSKENWNYLIEGKDFEMRLDGSIEFFD

SEQ ID NO: 6605 - protein, 966 aa, unidentified
  REGION 1..966: note = Description of Unknown: Cas Enzyme sequence
RKPAERNRLLQTLDREIYGKYRNNGPSGGKTAASLDQLPYFLRCRALDEPLAPHEIGRALYHLAQRRGYLSNRRTKKKKKDEGKVEPEIAELARNMAAAGVRTLGEFLSRVDPVNERRIRQRWTARNMYLDEFEKIWEAQRSFHPELLTDALKREVSEAIFHQRPLKSQKGLIGACDLVPGKKRAPKALLISQRFRMLQKVNDLEVIAPDESRRHLTPDERARLIARMDKASAVKFDVIRKLLGDASQEIEFNFERGGEKELPGNKTAAALRKVFRKRWDALSRKEQDAIVGEVMGIERAETLERRGREAWGLDGEAAAALGKVHLETGYAALSREAMKAILPLMEQGTQYATAREEAFEGGWARNVLEELPGVREACNTIRNPVVMRTLTETRRVVNAVIRKHGKPDYVRIELAREMKKSREDRRKMTSDNQKRRKANDALRQRIADATGDPRVTGRDILKARLWEECRRTCPYTQKMIPFHELFSADSPWDVEHIIPFSRCLDDSYFNKTLCYHEENRNVKQDRTPREAYEHTGRWDEIIARVSQFQGDAAKEKLRRFLMKKEDLKEFEEFSARQLNDTKYASREAARYLSWLYGSEAQSRIQVSRGQITGYLRGAWRLNAILGDGGGKERSDHRHHAIDAIAIALTDRATVKALSDAAAAQFRERGRTHGFEKRITEPWQGFLEDVQRAVDAIVVSHRPSRKVSGSFHDDTIYSPPRTDEDGKPYVKVRKPLTDMFKESDIHNIADPAVRDIVWQHFRDHGEDSKAAFSDSSIHPRIPIKDGPRAGQTIPIHKVRLKLTRDVIPIGSGPNERHVWTRGNSHIEIFEALDEHGAVKKWEARVVTLLDAYQRRKRKQPIVDRNWSDDKRFLFSLTQSDIIELDVELANGVVSREFYLVRGITFEGGGRLQCSHVLDARKKADIPMKATDDERIRLLIRPFVNSLKRLNCRKVSVTPLGHVYPAND

SEQ ID NO: 6606 - protein, 915 aa, unidentified
  REGION 1..915: note = Description of Unknown: Cas Enzyme sequence
TGVIIYPKGVGEEKGAEFSLAAQRTQFRSRRRLYFRHKMRKAQLLYILAENNLCPLTKQDIDNWFIYQKGKKQIYPLHNNDFIEWLKINPYEARNNAATKQVEPYILGRALYHLTQRRGFKSNKKDANTDNENAKSAEIKAYEEEKQLRQNLTLGQFYYQKYINNEKIRKTRSNSNANEVNSARKSYEEEFEIIMQYQNNIAPQLPQLKELIRKTIFFQRPLKSQKHTVGRCTLESTKHRCPISAIEYEKFRAWQFVNNLKFCDPLNEDILINPDILIRKDIVNFILSRETLKYADINKLLSKKYPNIKLKLSANLHEDIPIIGSTTIRKLITIFGENYENVNFNYTKKNGSTGNININDIWHALFFFEDQDKLKQWAIDKLNLQPDIAEKFAKIKLKEEYANLSRKAINKILPFLEKGYIYSHAVFLANIPHIINKHRKLTQHETNEIIQQIDNIIKKQSLNFIIDKITNKFLDNKTYYNNFINSGEIPHNDKIINYIKRQYSELFDELSENDLSQIIQNIQNKFLEQITNYLQKPIEQQKKEELFIKSQTIQETIKNYLLFDANQKYNLSLSKKDLFDIYHPSAIEQFKKTENYLQSPYTKSVRNPMAMRTLYQLKHLINELIQTGKINKDTEVIIELPRELNSKNERAAIQRYQREREKENAEYAKKITETTGIQQPSDTDIRKYRLWEEQNHICIYTGETINLTDLIGSQSPKYDIEHTIPQSLTIDNSFENTTIASTFYNQKIKTNNIPSDLKNYNTPSTDPQTGQTYPAIKSTIQPFFDKLYYYAVKLAPHINKKELKEITDIFKKYKKDYDINNVLYPYFSYNSQATNSKKETPKRIADIAQRHYLRLHLNYWKSKCIKFILTKDDINTNFSRSQLVDTSIISKYATLYLKSYFNNVKLVKGQITNTA

SEQ ID NO: 6607 - protein, 1536 aa, unidentified
  REGION 1..1536: note = Description of Unknown: Cas Enzyme sequence
MKKILGLDLGTNSIGWALVEQDFEKHQGSILGMGTRIIPMSQDILGEFDKGNSVSQTAERTRYRSVRRLRERHLLRRERLHRVLNVLGFLPEHYAKAIDFEKRLGKFKEETEPKLAYENKAFIFKKSFEEMLADFQQHQPQLLINKDGKPALVPYDWTIYYLRKKALSQKIEKEALAWILLNFNQKRGYYQLRGEEEEENPNKLVEFHSLKVVDVIADEAQKGKAEIWYSLILENGWIYRRSGKTPLFDWKDKVRDFIVTTDLNDDRSVKKDKEGNEKRSFRAPGEDDWTLLKKKTEQEIDKSRKTIGAYIYDALLQNPKQKIKGRLVRTIERKYYKDELRQILKKQKEFHTELQSEDLYGDCVRELYRNNDAHQLQLSKKDFEHLFLNDIIFYQRPLRSHKSSISNCTLEYRKYKDKDGVEHTKYLKAIPKSNPYYQEFRIWQWMYNLSVYKKDDDQNVTAEFLNSLEDWEKLFSFLNDRKEIEQKPLIKYFLEQKGLKGKILNTEVEKYRWNYVPDRAYPCNETKTLIRTRLEKASDNAEDFLTRDIEQQLWHIIYSVTDKTDYEKALQSFAGKHHLNKDAFVDALKKFPPFKTEYGSFSEKAIKKLLPLLRLGKHWNWNAIDESSRKRIEKILTGEYDENIKDRIREKTIHLAKEQDFQGLQLWLAQYIVYGRHSEAAIAGKWNTVNDLEEYLKNFRQHALRNPIVEQVITETLRVVRDIWEKYGNGIKDFFDEIHIELGREMKNTAEERKRITNQVLENENTNLRIKALLAELSNDDNVENVRPYSPMQQEILKVYEEGVLNSDIAIEDDILKISKSAQPSSSDLRRYKLWLEQKYRSPYTGEIIPLNRLFTPDYEIEHIIPQSRYFDDSFSNKVICESVVNKLKDNQLGYEFIRNYHGTTIDLGFGKPIRILEIKEYEDFVKQHYAKNRSKRNKLLLEDIPEKMIERQLNDTRYISKFISNILSNIVRAEMNDDSINSKNIIPGNGKITGELKQDWGLNDAWNDLILPRFERMQKLRTEKDIANGISFMALNKNNKPIPELLPITLQKGFSKKRIDHRHHAMDALVIACVTRDHINLLNNQYAKSTKRYDLNKKLRVFERAAYNHPQTGDRIERDVPKEFIKPWNNFTIDAKNALENIIISFKQNLRIINKATNHYEKWVEKNNAKIKEPRQQTGINWAIRKQMHKDTVSGKVDLKRIKVPKGKILTATRKSIDISFDAKTIESITDTGIQKILKSYLKAKDNNPELAFSPEGIEDMNKNIEKYNDGKYHQPIYKARIFELGSKFPLGQIGNKKTKFVEAAKGTNLFFAVYSKDNGKRNYETIPLNIVIERQKQGLTSVPTENEEGDRLLFYLSPNDLVYVPTEDERLDTKGADFTDMTKKQIGNIYKVVSFTGNQIFFVQQSVATSIVNKAEFSSLNKMERAIDGTMIKEYCIKLNIDRLGNISPIKKKPYSEIKEQENILSEPEAEYETKKWTLKKFDSFEEMENDQLAYYASLTHEELLKNHKQLSMAAFGIKDESILNNQERKIKFD

SEQ ID NO: 6608 - protein, 924 aa, unidentified
  REGION 1..924: note = Description of Unknown: Cas Enzyme sequence
MKKILGLDLGTTSIGWAFVREAESENEKSSIERIGVRVNPLTTDEQTDFEKGKTVSSNADRTLKRGARRNLERYKQRRKNLINVLLKANIITNETILTENEKNTTHSTYLLRAKAATDEILKEDFAKVLLMINKKRGYKSSRKAKNEDEGQIIDGMAVAKTLYDENITPGQYCYQILKQGKKHLPDFYRSDLKAEFEKVWGFQKQFYPEFLTGELKKAIEGQGKENTRKRILAITKVFTAENKGKDKKLEAYEWRSKAINAQVSKEELAFILTDINNNLNSSSGYLGAISDRSKELYFNKQTIGEYLYNQLKYNPHTRTKGQVFYRQDYLDEFDTIWETQAKFHKELTPELKAEVRDIIIFYQRKLKSQKGLVSFCELESKTIESIENGKVKQKKIGYKVAPKSSPLFQEFKIWQNLHNVKAQNKITKEVLFLNEKAKQDLFFELNIKGNLDKKYVVEFLGYKNNEWELNYSSIEGNRTNKALYECYFKILELEGYGIIDWESYISKNDKEKNIYDYFEFSKSVEKFLDGEFVNPLKKYSANEVKEIVGYVLSSLNINASILEFDATLQGKAFEQQSSYQLWHLLYSYVEDKSATGNEELYRLLNKKFGIKKEYAQMLANISFQQDYGNLSAKAMRKIFPFIKEFEYSEACEKVDYNHSSSKTKKENDERILKDGLTILPKNSLRNPVVEKILNQMVNVVNAIIADSTLGKPDEIRIELARELKKNAKERAEMTTNINAAKVLHEGIIKKLQTEFGIKNPTRNDIIRYKLYEELKGNGYHTLYSNTYISHEKLFSKEFDIEHIIPKSRLFDDSFSNKTLETRFHNDKKGDDTAVDFIERFFGATNLEQYKGRVEMMFKLKENSISKTKYKKLLLKADEIGKGFIERDLRDSQYIAKKAKTMLEEICRTVVTTTGSITDRLREDW

SEQ ID NO: 6609 - protein, 1221 aa, unidentified
  REGION 1..1221: note = Description of Unknown: Cas Enzyme sequence
MKKQKTILGLDLGTNSIGWALIEKEKQEIIGLGSRIIPMSQDVLGKFNSGISISQTAERRGYRGVRRLRERHLLRRERLHRVLNILDFLPIFYKKQIDFDQRFGQFKINAEPRLAYNENNQFIFQKSFLEMIEDFRKSQPHLFYKKENGKETLIPYDWTIYYLRKKALSEKIEKEELAWLLLNFNQKRGYYQLRGEDEEVVPNKKIEFHSLMVTEVIADEPQKGKSELWYNIVLENGWIYRRASKTELFDWKGKIKEFVVTTDLNDDGSEKKDKDDKVKRSFRAPVETDWTLVKTKTEQSIDKSGKTVGQYIYDSLVQNTSQKINGKLVRVIERKFYKAELEQILKTQQKFHAELQNDNLYKLCIEDLYGFNESHRNNISKRDFVYLFLNDIIFYQRPLKSKKSLISDCKFESRRYSRDGVEQVEPLKCISKSHPLFQEFRLWQWIKNLQIFEIENDSNPITEKFISSEDDYANLFDYLNNQKVISQEAILKYLLEPLKLKTKELKIEISKYRWNYVQDKEYPCNETRAMILSRLAKCTENPNGFLTREIEESLWHILYSVNDKDEIKSALEKFATKHSLSDDFVELFRKFPPFKNEYGSYSAKAIKKLLPLMRTGKHWSEADIHPQTRNRIEKILTAEYDETIKNRVRDKAIDLTDISNFKGLPLWLVSYIVYDRHAEETNLEIWKSPSDVEAYLKSFKQHSLRNPIVEQVITETLRVVKDLWTYYGEGKENFIDEIHVELGREMKNPADKRKKMTEQTTANENTNLRIKSLLAEMINDAQVENVRPHSPVQQEILKIYEDGILNSGIEIEDDILKISKMAQPSKADLLRYKLWLEQKYLSPYTGAVIPLSKLFTPAYEIEHIIPQSRYFDDSFSNKVICESEVNKDKSNLLALEYITQNSGKKIELSNGKFVTLFTTEQYEQYIKTSYSKNYSKSKKLLMLDVPEKMIERQMNDTRYISKEVKNLLSKIVRQNENDEGTTANNLLSTNGQITSILKQDWGLNDIWNDLITPRFERLNEITRSNQYGQINPNTGKFLPTVPLEAQKGFNKKRIDHRHHALDALVIACASRNHINFLNNQNALDKDKSRGQKAREDLKRVLCEKKFNADSEKNYRWIFKQPWETFVVDAKQKLDTTIVSFKQNLRVINKTVNKYQRWENINGKMKKIIATQTKGDSWAIRKPLHTPMPYSEKVYQIDFLKIAENLAKSALIINTEIREKVT

SEQ ID NO: 6610 - protein, 1377 aa, unidentified
  REGION 1..1377: note = Description of Unknown: Cas Enzyme sequence
MKKILGLDLGTNSIGWALVNEAETADEKSSIIKLGVRVNPLTVDEQQNFEKGKSITTNADRTLKRSMRRNLQRYKLRRENLISILTEHNLISESTILSENGNSTTFETYRLRAKAATEEISLEQFARVLITINKKRGYKSSRKAKGTDEGELIDGMEVAKKMYEENLTPGQLCLKILETGKRNLPVFYRSDLQSEFDLIWNKQKEFYTDILTNELKESLKGKNEKQTWAICQNPFKIVGIKRATKGEELKKENFSWRVKAIKEKIDLEELAVVLQKINGQIKSSSGYLGEISDRSKELYFTKQTVGQYQMAILAKNPNASLRNMVFYRQDYLDEFEKIWETQSQYHKELTTELKKEIRDVVIFFQRRLKSQKGLISFCELENQQKSVIVDGKHKTITIGRKVCPKSSPLFQEFKIWQILNNLEITNKISGEKILLEKEEKDILFLELSIKEKLSKDEVLKLLFNNYKELDLNYKSVEGNKTQAALFTAYQQIIEASGHGENDFSKMKYADVIEIVEGVFTSLGFNTEILKFNSDLAVNELEKQPHFQLWHLLYSYEGDNSNTGTQKLIEKISAKFGFDKEYASIISKISFQDDYGSLSTKAISKILPYLKDGDEYSKACFHAGYNHSKSSLTREEIENKILKDKLDILKKNSLRNPVVEKILNQMINVVNAVVETFGKPDEIRIELARELKKSAKEREDMTKAINESSAAHEKIKLLLQKEFGLSHVSKTDIIRYKLYSELEPRGFKTLYSNTYISPEKLFSKEFDIEHIIPQSRLFDDSFSNKTIECRSANIEKGNETAFDYIAAKYDDNYLQDYLSNIEVLFKNGNISKAKYNKLKMRGKDIPTDFINRDLRDTQYIARKAKSILEDLVRNVISTSGSITDRLREDWQLIDVMQELNWDKYDKLCLTEIIEGRDGQRIRRIKEWTKRNDHRHHAMDALTIAFTKPSYIQYLNNLNARSDKSSSIYGIEQKELFRDKLGKLRFKPPMEIDLFRTESKKHLQNTLISIKAKNKVVTSNINITKKPGPDNKRKQLTPRGQLHNETVYGQIHQYVTKEEKIGAQFSVEYVQHVAKKTYRDALLMRLSENNNDPKSAFTGKNSMSKNPIFIDEAHSMTVPEKVKLVFKEPVYTIRKEISADLKIEKVIDVKIRNILEARLKEFNNDAKKAFSNLDENPIWLNKEKGISIKRVTITGVSNAIPLHDKKDHHGNIITDAQGRKQAVDFVSTSNNHHVALYKDQNGNLQEKVVSFFEATTRANQGLPIIDKEYNNTEGWKFLFSMKQNEYFVFPNESSGFVPSEIDLLNPENYFLISPNLYRVQKFGSLLSGFWFRHHLETNVDAMKELKGITYKVIQSANNLNNLIKVRLNHIGQIVSVGEY

SEQ ID NO: 6611 - protein, 1540 aa, unidentified
  REGION 1..1540: note = Description of Unknown: Cas Enzyme sequence
MKKILGLDLGTNSIGWSIIEHDAELHQGRILGIGSRIIPMTQDVINEFGKGNSVSKTAERTKYRSIRRLRERFLLRRERLIKVLKKLNWIDDDFDPKISKISYKLNEATGRYEFQFEESYQEMLSYFKSVYQSEMKIPRDWTIYYLRKKALSQMISPTELSWVIMQFNQKRGYYELRSEKEEQPEDNKEFIKAAVVKISETGDKRGRNKILELTLDNGMTGTLSSNSVPDWIGQEKELIATKKELKDGTVNITFSFPDENDWTLRKKKTESLIDSKKKTVGEYILEVLVNNPDAKIRGKEVHTIERKYYVNELQQILKKQSEYHTQLRDKDLFLECINLLYPNNEEHRNMLKLQDFIWLFVKDILFYQRPLRSKKYLIDGCKFERRYHIKNDELIETRVKVIPKSHPLYQEFRIWQLLHNLKVLKIQETDASGKIFYDVDETDNYLTDENKEKLFHIFNESNEVSPARILKTLGLDNNTFKINYEADTKLPGNSTVAGFISGFKKADAFEEGKSFLSNQQNTGKLWHILYSLEKKDFVIKALGNPELRFPKQAISIFAAMPAFKKDYGAYSAKAVKRLLPLMKCGKLWSQKPIEDIIPKFLEWKNTAEYKMLSPKIKGQLDKLEAIEEFQGLSLTLAEYVAYQSHSEEREKLIYNNPEDIKRLKQHSLRNPIVEQVINETLMVVRDIWKKYGKPDEIHLEMGRDMKNPANKRKEMNERRSENEKINLRAKAMLFELQKDNKSINPFSVSQLELFKLYEEGALGSSGIVDDEIFKITRKADPTQSEITKYKLWLDQKYRSPYTGKPIPLASVFTSKYEIEHIFPQARYFDDSFNNKVISESEVNREKGKKTAFEFISSDGGKNIKLSSGEIVTILNKDEYIDLVKKTFSHNKGKLKNLLSYDIPESFIQRQLNDTRYISREIKKYLSPVVRKENETEPTPVGLIPMVGSITDRIKEDWGIKQVWKEILIPRFRRMNEITNSTDYYTENIDNNGNRTFLLTGHKESVKRLDHRHHAMDALVIAAITRDHIHYLNALESEHENYSLIKKLKGYNQHNQPNKNFLKPWKTFTTDAKETLERTVVSFKNTNRVLNQGRNRNQKWEMQNNTLKKVLVTQSPDNLWAIRQPLHKETVFGKICLRQYKKVSLVSALSDHNKIADPFVRKTIHKLFIQFNNDVNRVKSFLKTNPLIINGEELKTVDIYYYDYFSSVRKTLDASFNEKMIEKVSNQRIAKILKSHLEKYDGISENAFSPEGIEDMNNQLRIPIKKVRVFESMGKKFQLGTRDNKSSKFVEAAKGTNLFFVVYENIETGERFFDENSSLPLKDVIELKKNGLPIAAEKPGYRWFVLSPGDLVYVPDCDENGNLLENIEHIDWENLTSYQINKIYIFEKSSGSSAYFIQHHVATLIKEYDAKTKIGEFESQNKSEKSIDGIIIKKVCIKLSSNRLGEVKPAAYDSYSSFKNRTDNNPGEFNESTVNYIGAKIEFFSSIQDENEATFKYMAERTPEENLRAANMIITALYRKELQNNEKPYTNITFLNHGLSD

SEQ ID NO: 6612 - protein, 1068 aa, unidentified
  REGION 1..1068: note = Description of Unknown: Cas Enzyme sequence
MSGYVLGLDLGPNSIGWAMIAADASGAPTNRFFDTDSAGHPPLGVRIFEAGLQNFDTSKEESLNQKRRVARSMRRNHARRNARRRSILRALHEAGLLPPDPGQRDQVFQLDAYEMRARALDEALPPHHVGRALFHLAQRRGFQSNRKSGQAKEDQGILKEIGDLAAAMKESGSRTLGEHLHRLRDEDKHHRIRNRHTRRDMYQAEFDAIIAAQRRHLPDLLTDDVVSRLKHFLFFQHPFEITEERRAKAPSRANLHRAPSVKPCPLEPGMLCCAKGEWIAQRFRLLKEVNNLRIAERYSRERELTAEERQAVLELLGSRDRVKFDVIRKELAKLGTDPDALFNLERGERLALNGNVVEHKLASGFGRSNWKDVPEDRKALLRDAVLHETDPDLLMSLLLEHGMTENKADKLVGWNPPDGYLGFSRIALGKLVPLLETGLNEHEAIEKAYPDRPSAGVFQALPVLDSVDTPMELKSVTNPVVRRALVETRKVINALVREHGAPARIVVELAREMHQGPTGRKEQSRRRAQQEKRREEARDQVAKFGGNPNSRHDVLRWLLWKEQNKECLYTGRAIPVAELFHGAEWDVDHILPHWQSLDDSYMNKVLVHRSANAAKRDRTVPQWLGEDSEDFRGVMARAKRCLNNTLLDFPYPKYKRLLQAVVETDQFAQRQLNDTRYITSAVARYLQLLYPVELRRGEKAVQTCRGGLTSHLRKSWGLNSVLDDLLDKDGKPVLTKNRDGEDVKSRADHRHHAVDAVVVALSTRPLLKKFQDYYKRLGLEGVGMVPFPEGWDLLREDVADEARRIVVSHRTDRKLRGALHEETFYGQARDRSGEAIPGAYVTRKNLSSLSGKMVHNIRDAVVREVVTLHLREKGWDGKDNALPKGWEEGGLTMPDGTAIRRVRVEVPISAPVGLGHRFAISGNNHHMEIVSLPPKRDGEARRMAASVVPMMEAAARARPSQGVAPRSIIQRSYDDGAEFVMSLGRKETVRLWGVPERGPVYCVVQKLAGESVPSTSIDLYLRDVRDSRPASEGNNSPFLRLKSFKAWSSLVIEKIQIDPLGRVSKAGD

SEQ ID NO: 6613 - protein, 1069 aa, unidentified
  REGION 1..1069: note = Description of Unknown: Cas Enzyme sequence
MAKLKYRLALDLGASSIGWCVYLLDSDGLPCGIRRMGVRIFSDGRDPKSLASLAADRRLARQARRRRDRVLKRRRRLMEALIDAGLMPADETARKVLQDKDPYELRAKGLDHPLSLHEFGRALFHLGRKRGFRSSRKDSRDADNEKEHGKVKTAVEALRKRIAEAGCATVGEYLAGQHAKRLPVRARRSTDGGYVLYLQRDMVEDEFNCLWDVQTKAHPAILTPALRGKLLDIILFQRRLRPVQPGYCLFEPNEFRARLCSPLQQRFRMLQELNHLRVREGIGDRALTLDERNAMLALLDGDNSGKPVTWAKLAKAAGLRNAKEFNFSRDVKRTGLKGNIVAALFSDNRAFGEQWHSFPTQTKYALAALVEGADHIEPLRQALLALPANTQPASDLFGKQHDADTVTAGLAGLAASLSEKQATFLANINLPDGYGSLSLKALERIVPELERAVVTYDQAVRAAGYEHHSQFYDGELHLQLPYYGELLKGYTSPMPTASNKDEKQFGRIPNPTVHIGLNQIRQLINALIKRFGHPHEIVIETTREFGLSGKRRQEISREQKDNQDANDKLDAELTRLGHPLSHSNRLKLRLWEELGHEDAMDTYCVYSGIRLSKAMLFSDEVEIDHILPFSRSLHDGIGNKILCTRQANREKGNKTPFEAWGHTLKWEDIVERASRLPGRKPQLFRENALEDFLGDRGFLERHLNDTAYFNRATKQYLSAICPPNCIWTSSGKLTGLIRARFGLSKLLSGSGIKNRDDHRHHALDAAVIGLCDRSMIQRIATAAARAEKDGENRLIERLELPWPSFREDLAHCLDAIVVSHKPDHGVETALHKAGSYGVRTDSDSGDIMYCRHLPVMELRSGNVAPPTGKPGRPAPKVRDSQLRKQLWDLLRDKSEREQKIALAEFSHRTNIRRVMLQQRLGTAIPIKRNDRMTVYRYVQPDENYCRDIMQTAEGKWTSRVIHSFQANQPGFDPDSIDVAAPSKPVMRIRKGDCLALEIDGKCRIYRVAQFTNDGVALAEHHEANESARDSDRKDSFNFLRISPEPLKQHRARMVGINILGYINDPGFRE

SEQ ID NO: 6614 - protein, 1229 aa, unidentified
  REGION 1..1229: note = Description of Unknown: Cas Enzyme sequence
GKNRYNGAIFFQRPLRSQKGLVGKCTLETNKYRCPISHPEFEAFRALSFLNNIQYRKEKNGEWINLSNDLKNEIYDKYFYRQSKAHFNFNEIREYIQKREFKDKSIAWILDYRAKTINYSDKTNVSGCPISARLKDIFGDDWYNYEKTTALKRVNKKTGEEHSIVYNIEDIWHVLFSFDDEEMVFQFATEKLQLDEEKTKKFIIAWKACPDGYSMLSLNAIKKINVFLQKGFIYTEAVLMANIPEIIGEDIWSKEENQQLVKDSITRLITSNRDEKQILNIVNNLVAAYKSLHDDEKYGFRDTTYTLTNSDKESIKQTIVETIGEKTWEEKVINKTEIIDTVNYLYQCTFRAGFETILLGDNRYHKVVFNGKTYYKSTSHQFYKLPRIVDTLKDFILVNFPKVDEKQLSKLYHPSMIETYAPSKPNKDDGKLYLQSPKTGAFKNPMAMRTLYELRKLINYLIKTGQIDEETRIVVETARDLNDANQRWAIETYQRQRQNENNEFADAIKGLLENKDYSTLPNPDSDEDIDKVRIWYEQVKNNQISKGSGEYTQNRWTNQSTDLFQKLSQAKQMVDKYRLWKEQRCICMYTGRVISISDLFNENKVDFEHTIPRSISFDNSLANLTVCFAHYNRYIKKNQIPTQLPNYEKDVPIGGETYTAIKPRLKDWEDKVEHIKTMIEFWKGKSKHASTKDQKDDAIRQRHLWAMELKYWQNKLGRFTIGEVTTGFKNSQLVDTQLISKYALHYLKTAFNTVDVQKGTVTADFRKIVEIQNIYEKKSRAKHSHHSIDALILTLIPHANQRDKILKIFYEYLEEKQIAKDTGKYQKRDWLKSELDKEVSKLELPMLETIIEEIDNNILINNIARDKALVKGKKVVRRRGKVVFLKDKQGNPLLDSDGNPKPKVAKGDCIRGELHKNTFLGAIKLPLKNEQGNYMVEQGKFVYDDTLLYVVREPLLYKKDAASSGFKSLDDIENCIVDKHLFEIIRKQIDGRNFKDALSEGIFMYNRKGEKVNRIRHVRVFVRDKEPLKIKEQVNISQKTLINLNSRNHKRYYYAGNGENYVYALYQGIIKNKIERGFRIVNLFDAASLLRVSKNRELAIESEISYNKRGDKLNLYAMLKIGQKVLFFDKDKSEMLNELSGSELAKRLYKILGFEKDGRIRFALHIDSRDDKQLKELESTHGKGIWQGFSSVNFEKPWPKLKLSVSNFNFLIEGKDFEIKPDGEIRFLN

SEQ ID NO: 6615 - protein, 1550 aa, unidentified
  REGION 1..1550: note = Description of Unknown: Cas Enzyme sequence
WSLIQHNFEKKEGSILGIGSRIIPMSKDVLDKFGSGQSHSQTAERTGYRGTRRLYQRDNLRRERIHRVLKILDFIPEHYLNAIDFKNKPGKFYNDKEVKLTYQPANNNTVLRYEFIFMDSFFEMLTEFKEKHPELFYKKPNGEETKIPYDWTIYYLRKKALKEKITEQELAWIILNFNQKRGYYQLRGEEETDNTKTEEFYSLIVADIQETEDKNANGTWYNVILENGWVYRRQSKDSLENWKGKTKEFIITTQLDENGNPKTDKEGDIKRSFRAVDSEKDWIAIKKKTEQDIDISGKTVGQYIYESILKNPKQKIRGKLVKTIERKFYKDELKQILEKQVQLHQKLQDKKLYKACVEELYHRNEEYKKSIINKGFVYLFIDDIIFYQRPLKSQKTNISGCAYETRTFKKIVEGKEIVDSRAIKAIPKSHPLYQEFRLWQFLKNLKIYQKEAFENGKPVVDLNVTDTIFGKEDAWVELFDYINTRKDVEQKNLIEFLVKQEKINKKEKDNYRWNYVEDKTYPANSTKAQIISRLKKVENADLNNILTEEFEQGLWHIIYSVTDKIEYEKALKKFAIRYNLDVDSFFDNFRKFPPFDSEYGAYSLKAIKKLLPLMRRGKYWKKEDISNDVLQKVDSIRERLDSIGFNKSKIDETVADDEVQKQVLKSFVEFSDKSMIQGLNTYQACYLVYGRHSEAIETSKWNTPSDIDNYLKKFKQHSLRNPIVEQVVTETLRVVRDIWNYYGNGNKNFFNEIHIELGRDMKNPANIREKISKQQQENENTNQRIKQILTELMNDSNIQGDVRPHSPSQQEILKIYEEGIYQNPDSNFNIVSAEEIDKIRKNNSPTSSDIKRYKLWLEQGYRSPYTGKIIPLSKLFTTEYQIEHIIPQARYFDDSLSNKIICESEVNQLKGNMTAYEFIKTKGGSIVDLQHGETVRLLNLTDYEQTCNQYFKKNRTKLTKLLSEDIPDGFIERQMNDSRYISKLVKGLLSNIVKDEDEQSATSKHLISVTGAITDKLKQDWGLHDKWNELVAYRFKRMNELSKTEEFGYFDKTINTFRISVPDELQKGFNKKRIDHRHHAMDALVIACATRDHVNYMNNQYAAKDKKNERYDLRNKLRNVEKKKVTDKETGATKIIEVGKDYLKPWYNFSVDAKKALQKTLVSFKQNLRVINKTTNKTWQWVEKDGKLKKQLVKQSKGDSWAIRKPMHKETISGKVNVRIRKTVSFVNGIKEWEYLVDKDLKGILKRLIAEGKDKIAIDKYFKEHPYQKEGKKVKQVEIYTFTSNASATRTLLTESFTKKQLENVTDSGIKKILEKHLKNYIDEKGNERFDLAFNSDGVAALNENIIELNNGKKHQPIYRVRVFEEGNKFNVGYTGNKVSKYVEAAKGTNLFFAIYWNEEKQKREYETIPLNVVIEHQKQVASLSKEERTLVPINNEKGQFLFSLSPNDLVYVPSEEEIENPKLVNFNSQSNEQVERVYKMVSSTGGECHFIPVAIANLIKSYDSKSKFGEFSSLNKSELAISGERIKDVCWKLEVDRLGNVIRVIGNRN

SEQ ID NO: 6616 - protein, 1121 aa, unidentified
  REGION 1..1121: note = Description of Unknown: Cas Enzyme sequence
LIQAGFLPADPKKFNAILADTKMNPWHLRREALTRELSLLEFGRVLMHLNQRRGALGVEVDPDNPDEGKVKEAIDRTREELRGRTFGQFMADLLDSDTLALKSKPSQHVHNAIRNRRDTFRFHADRQLVREEFERIWSKQKSFGGELAKRLTDDLKQEFDDANQDNTWRHQGLIFGQRATYWDTGTLGRCDLEPTEHRCPKADMYAQEFLSLETVNNIRISKNRGPEVPLDACDIKHARSKVLTALRTQKTASVATIRRALGIHKKELKAFYSLNVERDPDRSLNTDWFYRSFVSGVFGEDAWNALDEQQRDAVNRSILKFDPQTDGAETKLHAGVQRWWGLDEEQADAFIAAWKERPKIDKRINLSRKALKNLLPFLREGKGITEARQEFAKVGAESELQAKRYDLRGRPLTKKERHFVAKHPDLLPPAPKLSNPVVRKAIHEVRRHLNEYLQHPEFGKPDRVVIELARSARQSEKVRNATLARNRKREKQRQEIIDQFELDDLSLNQQNRRIERVLLCRQQRGICAYTGESITEAMAANGTNLEVDHIVPRSRSHDNSMNNKVLVFRDANRDKANRTLKEWLGADSESFQALLQRLHHLGEAKTVESYFTKKDYDRKWENLNRDAPATEEFVKSQLTDTAYASKQVAAYISEALFRDKPEDKRFVFTTKGRYTAALRRDWGLLEGEIDREASRVATEEESEGRGETAIARRSDKDRRDHLHHAIDAVAIAFCTGENIQKLADFAKAQEIARANDGRWPRRETIAPPWGTVESFRQQVQDAAKQLVVCHRPVKRKIIGAFHEETLYGPVLSDLPVHRTEPSDSLFTNRISAGALKPNHLRVPEGWEELSMKLNNSRLKPQEMRQIRRSLAQLVDPPPAKSGIVRDRELRDQIRKCLRRNGVDPDKFSPQDIKRVIEAGKLQLPSGVPIKSVILLRTNTEPVIIPRKKWDEATERMIPDIDDNGEPDPRTRRVYIGGNNHHVEILQDDKTGKWIGVYVDTFTAAKRVRIEKQPAVNRHSRDGNKFVLSLAEGETIYARRKGARPEDESALDYYVVAKLERTRNKIIFVPHWDARSADQKSAIHRDAWEASPAQLKSLGPDRDSPPFKVQVSALGEIRRIDD

SEQ ID NO: 6617 - protein, 1163 aa, unidentified
  REGION 1..1163: note = Description of Unknown: Cas Enzyme sequence
MKRILGLDLGTNSIGWALIEQNFEKKQGRILGIGSRIIPMSQDILGDFGKGNSISQTAERTGYRGVRRLRERHLLRRQRLHRVLNVLGFLPEHYANQIDFEKRLGQFIDDSEPKLAYNNNNFIFQKSFEEMLEDFRKNQPELLNRKNRDGDNVKIPCDWTIYYLRKKALSQKLEKEELAWLILNFNQKRGYYQLRGEDEEENSNKLVEFYNLKVVDVKPEIKYSFTLENGASYYRMSEMPLLDWKDTDREFVVTTYLENDGTPKKEKDGKDKQSFFLKDDLEIITKRSGKKSSSAKNQLVKTEEKKIKITDVNEEKQAEIWYSLILENGWVYRRISKVDLSDWKGKSKEFIVTTDLNDDGTIKTNAEGGDKRGFRAPKEDDWTLIKKKTEQEIDQSKKTVGTYIYENLLQNPNQKIKGKLVRTIERKFYKEELTAILEKQIALQPELFTKDLYNDSVRELYRNNEAHQLQLGKRDFVHLFLNDIIFYQRPLKSQKSSIGNCSLEYRNIKDKDGKDKRLYLKAIPRSNPFYQEFRVWQWLYNLKIFTKKEDNDVTLEFINSSEDKANLFEFLMSQKEVGHKGVIKYLISTRGSKGKTLNDEVAKYRWNYVYDAEKDESKKYPMNETGYEIKRRLEKVENVPTNFLTPEIEHHLWHIIYSVTDKVEFEKALKSFANKFHLDEESFVENFKKFKPFPSEYGRYSEKAIKKLLPLMRIGKYWNWEAIDEKTKVRISKLRTAEFDESIRDRVREKVGKEKLDRNEDFQGLQLWLAQYIVYDRHSEASDINHWQKSFDIQKYLYEFRQHSLRNPIVEQVITETLRVVKDIWEYSAKKNNIPFEMVYDEVKMKNVKSYHKLFNEIHIELGREMKNPADERKRLTSIVTDNENTNLRVKAILTELLNDSSIENVRPYSPTQQEAFKIYEDGILNSGIDIPEYVTEILKKFKENDAKKQPTKSDINRYKLWLEQKYRSPYTGETIPLSRLFTPDYEIEHIIPQSRYFDDSFTNKVICESAVNKLKDNQLGLEFVKNHYGEKVDCGHGKLVSIFSEDTYRSFIEEHYSKNKTKKNKLLLEEIPDKMIERQMNDTRYISKFVSNLLSNIVRKEKDDDGINSKNLVSGNGKITSRLKQDWGLNDVWNELVLPRFERMNEITKTKKFTSKNKEGHT

SEQ ID NO: 6618 - protein, 1520 aa, unidentified
  REGION 1..1520: note = Description of Unknown: Cas Enzyme sequence
MTKILGLDLGTNSIGWAVVDKENEQIIDAGVRIFPEGVEPTTIGMGDKEQSKNATRREKRQLRRHFYRKRLRKIKLLEALIEFDMCPLKIEELRRWKNWKSKEKAEGRVFPCSREFNEWIMLNPYELRAKAICERVSLFEFGRIMYHFIQRRGFLSSRKGEQDPKTLFEKGKPDENILPVNETKEKLKESSLGYYLNSILPVMDAPYKTKTDENGTEIRARGRYTTREMYINEFLKIWYKQNEYYNLEDINVKTTKIREVKGSLKGSRNKRRIDYLKNKFGNENVEIVQNNTKQITKIISIVEKPLKKFLAGEIYYVKNEEGKEILKFRSNESVLFWQRPLKSQKSLLANCRFENNLPVIMANGNVRIDNTGNPVRRSKKPCLLSHPEFELFRAYQFINNIKFGKNNVLTHEQKNLVLQLINSKDTSFDFSNIKKKLNLSYEKFNYEDKFKVLGNPTIKKLAPLFEQNVWERNYEEIWHCFYFYDDNQKLYEKLVKDYNYNGGLEKIEKIILKDGYSSVSLKAIRNILPFLVKGYQYDRAVVLGGVKNAFGKRWEYFKEYHKNLEEEILSIISENNKRGELIEKIKEHLSLPINNYGFTKNDPWFGHLYHHSQEIEVTDSSCDKLPVVENLRNPIVQQGINEMRRVVNSLMEKYRIKYGEKFRFDVIKVEMGRDLKNSKSARQGILYRIKENEEKNEEARVRLAEYGLQQTRSNIQKYLMWREIEEKSGAARCPYTGKTVSISDLLGENNAIQIEHIIPYSISLDDSFGNKTICEAHFNNLKGELTPYQFYLKNPDKKLWGVDSWDSVTERAFQILPYSKAKRFTSKRDFESNTFIERQLNDSRYIAKKSVEILSHICNNVSVMPGQLTAELRHLWGINNVLQTPIKKLDDVVLKETRDNAVSGYLIVDENDNAIEFVKKQNDRPHTSINDLLIPVKIAKNKVLSDIFKLEIDIDGLPDGKYWTKVKVYDEFQVIPKYIRKPVTGENRIVFRGKIEKQVFKNDTLGNIAKTGKEDGIYWANVAIRDKKFIDVKGNKERPKVKSKKQIVLFGNVVNEEFQCYIYNCETTMPDGKYWLIIEVDFNDVIFEKAVNEKPVTDDYKICLNATVNDDSILVLDVDKEFRMKTELNSGKYYTILTVKEYTGESYPVYNEKPKNANSSKIIEGNIWVDKYTGEIKFDPKKNRDDHRHHAIDAIVIALTEQSYLQCLSTYNAKLKAKERGKIDSTEKFPYPWLGFEVDVRKKADEILISHKKKNKTLTKNKKGYSVRGQLHKEFVFGKRQAPQQTTGFHRRIKITDLQNNKHITKIVDKTIQNLIINHLRVNCSVDVKNPKGYNIPKDAFFKNGEWQLYLPNKRGDRVPIKKIRIKEYIGNAAQLKSNINQYVNPRNNHHVLIYIDIEGNMKEDVVQFWTVIERKMKGEMLYQLPNDGNEIVTTLEINDMFLLGLSDEEYSDNKNNYAFLSKYMYRVQKISSMYYTFRFHLASTLAKKEEEVNIQSFASWEKHSPKKVAISTLGKILEM

SEQ ID NO: 6619 - protein, 1544 aa, unidentified
  REGION 1..1544: note = Description of Unknown: Cas Enzyme sequence
MKKILGLDLGTNSIGWSLIQHNFEKKEGSILGIGSRIIPMSKDVLDKFGSGQSHSQTAERTGYRGTRRLYQRDNLRRERLHRVLKILDFLPEHYLNAIDFKNRPGQFYNDKEVKLNYQPMKNNSRQSYEFIFMDSFHDMVAEFKEKHPELFYRKANGEETKIPYDWTIYYLRKKALKEKITEQELAWIILNFNQKRGYYQSRGEEEETDNTKIEEFYSLIVADIQETEDKNANGTWYNVILENGWVYRRQSKDSLENWKGKTKEFIITTQLDENGNPKTDKEGDIKRSFRAVDSEKDWIAIKKKTEQDIDTSGKTVGQYIYESLLKNPKQKIRGKLVKTIERKFYKDELKQIIEKQVQLHQKLQDKKLYKACIEELYHRNEEYKKSIINKGFVYLFIDDIIFYQRPLKSQKTNICGCTYETRTFKKIVEGKKIVDSRAIKAIPKSHPLYQEFRLWQFLKNLKIYQKEAFENGKPVVDLNVTNTIFGNEDAWVELFDYINTRKDIEQKNVIEFLVKQGKINKKEKDNYRWNYVEDKTYPANSTKAQIISRLKKVENTDLNYILTEEFEQGLWHIIYSVTDKFEYEKALKKFAIRYNLDVDSFFDNFRKFPPFDSEYGAYSLKAIKKLLPLMRRGKYWKKEDISNDVLQKADSIRERLDSIGFNKSKIDETVADDEVQKQVLKSFVDFSDKSMVQGLNTYQACYLVYGRHSEAIETSKWNTPSDIDNYLKKFKQHSLRNPIVEQVVTETLRVVRDIWNYYGNGDKNFFNEIHIELGREMKNPANIREKISKQQQENENTNQRIKQILTELMNDSNIQGDIRPHSPSHQEILKIYEEGIYQNPDTNFNIIGIEEIDKIRKNNSPTSSDIKRYKLWLEQGYRSPYTGKIIPLSKLFTTEYQIEHIIPQARYFDDSLSNKIICESEVNQLKGNMTAYEFIKNKGGSIVDLQHGETVRLLNLTDYEQTCNQYFKKNRTKLTKLLSEDIPDGFIERQMNDSRYISKLVKGLLSNIVKDEDEQSATSKHLISVTGAITDKLKQDWGLHDKWNELVAYRFKRMNELSKTEEFGYFDKTINTFRITLPDELQKGFNKKRIDHRHHAMDALVIACTDRRHIQYLNALNNQKENYALRDSLLVKSENNHYTKTFKMPWQNYPAAVKDALEKTIVSFKQNLRVINKTTNRTWQWVEKDGKLKKQLVKQSKGDSWAIRKPMHKETVSGKVNVRIRKTVSFANGIKEWEYLVDKNLKGILKRLITEGKDRKAIDKYFKENPYQKEGKTVKQVEIYTFTSNASATRTLLTESFTKKQLENVTDSGIKKILEKHLKNYIDEKGNERFDLAFNSDGVAALNENITGLNSGKKHQSIYRVRVFEEGNKFNVGYTGNKVRKYVEAAKGTNLFFAIYWNEEKQKREYETIPLNVVIEHQKQVASLPKEERTLVPVNNEKGQFLFSLSPNDLVYVPSEEEIENPKLVNFKSLTEEQISKIYKAVSCSGTQCFFIQESVANTIANKIEFSALNKMEKSIEDIMIKDVCWKLEVDRLGNIIRVIGNRN

SEQ ID NO: 6620 - protein, 987 aa, unidentified
  REGION 1..987: note = Description of Unknown: Cas Enzyme sequence
MERDYYFRNYYLPAQTTSDFIDSVRIGLDLGEWTGGIAVVRGNEILHAESYVDFHGMTIEGRRNIRRGRRTRHAKKKRLARLRSWVLRQKLPDGTRLPDPYVVMHDKKFMVKPEIFGKKGIDPVAAPDWIQKAKNGNIDPSGFVRALALIFRKRGYMWDGAEMEKKSDAELKDFLENSRIPPDAASEIEAIISFRKENPDTPERGKKKVTPDNLLLLLKEATEREKQPRKAEHRDIRKADLDGVIDGAARSFRIPGETTDKWKKELKQILDKPVRKTRFNNRIKTTCAWCDNPTPRKKKVKELSYLAAVGNVRVQEASGQKRPLSDEEKKIFFQWWKEKDDTDKRRIGETGIKNTLKKLNADEEMARQLYDLLRGHNMDGRARLCRKHLEMAAEGKNMYDAGVDWQTMKTRTMHNPCREQHDERIIRRLENILFISGEKGEEAWRYGPVRFISVEAPLPGQDKKKKKGRGKKKEKGEVPERKTDTLKERLIKEIGGKCLYTGKELSVETVEIEHIHPRSMGGPDLQENFTVTSVQANKEKANRTPFMWFGKDQKKWSNFVERVNNAQISDRKKQILLNEEDDYPDNPTPLARTSSRYRQFVRDIQLLFDKYGVEPPVPNYQLGKPHIQRVEGWDTQRLRRSWSNHKDGTENFPEKDRLDLFNHAQDAALAAALPPHTWRARIWRSRREIINEETGEFIRIHEVPRVLAPDWNVFMDNRTGPILQVLGNYGGSWKRGFSDLNFVQLDGPEPMEYKNLKQRIPIGRYVVGKNSLADKSMETRINKTAHLEGIKDGGSIPEDKLDILGPEGRRPRHVTTFKPKGGPVLSFVKPSDGPNRIVQFKGVSEGCILWKKKDGRKGAIEMSRIYSSPLKSLGINAIDPPLEPGSEILGSLHKYQIIHLDEKGDARAGWYIVKEFGKSGVVTFPEHYYPIDVLSEKDKEYLKEINQDKKGKKEKPLKQAAERSIGKTELAEYFEKRRAEKRKRKKG

SEQ ID NO: 6621 - protein, 1373 aa, unidentified
  REGION 1..1373: note = Description of Unknown: Cas Enzyme sequence
MKKILGLDLGTNSIGWALVNEAEIENEKSSIIKLGVRVNPLTVDEQTNFEKGKSITTNADRTLKRSMRRNLQRYKLRKESLICLLKQNCWIDDHTILSENGNKTTFETYRLRAKAVIEAVSLEEFARILLMINRKRGYKSSRKAKSNEEGQLIDGMEVAKRLYNENMTPGQLILELIKDGKKFTPDFYRSDLQEEFNRIWNFQKQYYPDVLSDDFQKQILDKGKLNTSKIFLAKYGIYTADNKGIDKRVRAAQWRVDALNSELTKEELAYVISDLNGSVNNSSGYLGAISDRSKELYFKKQTVGQYLMEQLDENPHARLKNQVFYRQDYLDEFEKIWETQARFHKELTLELKKEIRDIIIFYQRRLRSQKGLISFCEFENRQVELEIEGMKKIKTVGFRVCPKSSPLFQEFKIWQILNSIQVSDKGNTKMNRFLDQDEKDLLFTELTIKDKISKTQALKMLFKNHKDLDLNYKEIEGNRTQAAFFKIYNDILELSGHEKIDYDKISASDAISSIESVFEALGIQTNILFFNSELPGNELDKQPMYQLWHLLYSFEGDNSITGEDNLISKLKERYGFEKEYAKLLTNISFQPDYGSLSAKAIRMILPYLREGNEYSVACFHAGYKHSKNSLTKEEIQKKELKEKLDILPKNSLRNPVVEKILNQMVNVINGVAETYGKPDEIRIELARELKKSAKEREELTNAISKTTAEHEKYKKELQQKFGFVNVSRNDIIRYKLYLELEPNGFKTLYSNTYIQPDKVFSGDFDIEHIIPQSRLFDDSLSNKTLETRSINLEKGNDTAYDFVLKKFGKEGLDQYLSRIDATFKNVSGKLGKLNKLKMKGEDIPDDFINRDLRDTQYIARKAKSMLEEYVRYVVSTTGTITDRLREDWQLIHVLQELNWDKYNRLGLTETIKGNDGQEIRRIVDWTKRNDHRHHAMDALTVAFTKRSYIQYLNNLNARSDKSGSIYGIENKELYRDDRGKLKFKPPMPLDEFRDEAKRQLGNTLISIKAKNKVATININKTKREGGYHKKKQLTPRGQLHLETVYGSMVQPVIKEVKIGNNFDEACILKVTKPCYREALLRRLKEFDSDPKKAFTGKNSLNKKPLFLDDLHLTKVPEKVKIEDSEIIYTIRKYISPDLKVDKVIDKQIKKILQERLDAFEGDSKKAFSNLETNPIWLNREKGISIKRVTITGISNALPLHDKKDKEGNLILDNEGKSQPVDFVNTGNNHHVAIYRDDNGDLQENVVSFFEASARVSQGLPVIDIELKKNEGWQFLFSMKQNEYFVFPNTDTGFNPSEIDLLDPENYHLISPNLFRVQKFTIKDYFFRHHLETNVDMHSVLKGVTWIRSGLNGIDGIVKVRINHIGQIVSTGEY

SEQ ID NO: 6622 - protein, 1202 aa, unidentified
  REGION 1..1202: note = Description of Unknown: Cas Enzyme sequence
ILAGEITYVVNDANEKRLKFKSNESVLFWQRPLKSQKSLLANCRFENEMPVICNNGEFLRDSSDNIVLRSKKPCPLSHPEFEEYRARQFINNIRFGRNVPLTNEQRQAVFNLINKNEQSFDFSKIRKELKLTYEKFNYDDKFKVAGNTTIKQLSSLFDANVWSQSYDSIWHCFYFYDDSDLLHTKLVNTYGLKADIETIKKIKLKEGYSNVSLKAIRNINPFLRRGYQYDKAVILGGVKNAFGRRWQYFKDYHKNIEREIISILSEENKQGEAIEKIKVHLSSPMLNYGFSKDDLWFNHLYHHSQEIVISQTLLDRLPVPENLRNPIVQQAVNEMRRLVNTLMEKYQIEFGNDFRFDTIKVEMGRDLRNSKTARQELTYKIRDNESKNEDARARLVEYGLQPSRNNIQKYLMWKEIEEKYGVARCPYTGKTISISDLLGSSNNVQIEHIIPYSVSLDDSFGNKTICESHFNNLKGELTPFQFYEKNPDRNLWGADSWDEIVDRAYRLLPYNKAKRFTSKREFEKSGFIERQLNDSRYIAKKSAELLSNICQNVRVMPGQLTAELRHLWGLNNILQDQISKVDEKLLSLKQIENVQCYIILDNQNNILDIVEKQNPRPEIKADEILLPITVSKSKIASDGFKINIDVSECPDGKYWVKLIIDENFKIIPKYISKPACDESRVVFRGKVEKQIFKNDTSGNISKTGLDDGAYWADIAIKDKKFIDVATDSNRPITKTKSQIVLFGTVIDEEFKCYIYNCSTNLPNGKYWLILELDLSDVKFTKAINEKPTLLNDQICFNATVNDAKQLVFDEDKTNLYFADADAGKYFTVINVKEVDTALLKMENETPKVENDKKLIEGTIWVDKYTGEIKFDPKKNRDDHRHHAIDAIVIALTEQSYLQRLSTYNAQLKEKQRGKLDSTENFPMPWENFDHDVRRVTDEILISHKKQSKTLTKNRKGYCVRGQLHKENVYGKRQAPNQEQAYHRREKITDIENNKHIAKVVDDTIRRLILDHLRDNCGVDITNPKGFNVPKDAFYKNGEWQLFLPNKRGDKVPIKKVRTKEVFSNAAQLKSNLNQYVNPRNNHHVLIYKDYDGNLKEDVVQFWTVVERKLKGQEIYQLPSDGKEIVTSLEINDMFILGLSDEEYEENKSNKSFLSKYLYRVQKVSSMYYTFRFHTASTLNKKDEEVYIVSFNRWRELNPIKMV

SEQ ID NO: 6623 - protein, 1318 aa, unidentified
  REGION 1..1318: note = Description of Unknown: Cas Enzyme sequence
EQTDFEKGKSITINAERTKKRSSRRNLQRYKIRRDNLIEVLKENQFINENTILAEDGKNSTHNLLKLRTKAVVEKLEKSEIARVFLAINKKRGYKSSRKAKNENEGIAIDGMSVAKKMYNENLTPGQYCYNLLKEGEKFLPDFYRSDLQNEFETIWNFQKTFYPEILNDEFYTKVKGQGQRNTAALFRITYNIFSSENKGNREEKKLQAYKWRSIATNEKIEISELAYVLSEINNNLNQSSGYLGEISDRSKELYFNNQTVGQYLYAQIKHNKHNRLKGQVFYRQDYLDEFEKIWETQRMFYPEMDNNLKEEIRDIIIFYQRRLKSQKSLVSFCEFESQQKEVIVDGNKKIKTIGSRVAPKSSPLFQEFKIWQNLSNLVIRNKNTKREFDLGLEQKQILFDELNIKGNLKKEDILALLVEKPNDWEINYNVIEGNRTNQVFYETFKKILEFEGNEIDFNKLPAEEIKNAVTSIFESLGINTEILSFNSELDGKNFEKQASWQLWHLLFSYDGENEKLYQLLNVKFGFKREYAQIISNIIFQDDYGSLSTKAIRKIMPFIKEHDYSEACKLAGYNHSFSITRDENEKRVLKEKLDLLPKNSLRNPVVEKILNQMVNVINAIIHDTKLGRPDEIRIELARELKKNAKERTEMTQNINKAKVTNEQYRKLLQNEFGIKNPTRNDIIRYKLYLELKTNGFKTLYTNTYIPRERLFSKEFDIEHIVPQARLFDDSFSNKTLAVKQINIDKSDNTAYDFIKNTFGEVSLNDYTQRVEKLYKANEISKAKYKKLLMRSDEIGEGFINRDLRESQYIAKKARQMLLDICKSVVSTSGSITDYLREDWGLINVMQEINLPKYRLLGLTEMIEMKDGSTKERIIDWSKRNDHRHHAMDALTVAFTKHNHIQYLNNLNARKNENNEKHANIYAIEQKETFRDEHGKRHFNLPMPNFRSEAKKHLENILISFKAKNKVVTRNRNKIKGSDKVQIASTPRGQMHKDTIYGSSYEYITKEVKLGTTFDKSLIRCVSKKAYREALLKRLAEFNNDPKKAFGGKNSPSKNPIYHATNATIPEKIKLVTLEQRYTIRKEITPDIRLDKVIDAGVRKILQNRLDMFNGNTKEAFSNLDKDPIWLNKEKGIKIKSVVIYGVNNAEILGEKINHKGEVILSKEGKPIPSHFVSTGNNHHVAIYRDEHGNLQEEVISFYEAVARVNSGLPIINKQHKNGWEFLFTMKQNEMFVFPSDNFEPSEIDLLNPENYSIISPNLFRVQKFTTKDYFFRHHLETDVADRKETKGITWKREGIVGIEGIMKVRINHLGKIVKVGEY

SEQ ID NO: 6624 - protein, 1034 aa, unidentified
  REGION 1..1034: note = Description of Unknown: Cas Enzyme sequence
MGIRLGLDLGTNSIGWCILETKDSVPINLRKAGVRIFSDGRDPQRGEPLAVERRLARGARRRRDRLLQRKRDLRKFLMSVGLFPLDESSQQTLKNLHNPYDLRVSALKEKLSPYDLGRSLIHMSQRRGFKSSRKGDKKEDKVEKNDRDALDLALKENGLTLGQYLKQRHDSGWGTRARPGDGLTTLRSHYYDEFCRIRDAQKPHHSLSDSDWKRIEDILFTQRPLKPAQRGNCQIYYADGEVRAYRAMPCFQHFRIEQNLANLQIIDPQKNKRFLTPDEREKLREKLQNQKTMGFGKIRTLLKLDDDYMLNLETDKRKDLEGDATAALLSRNDYFGKSWFSLDLKKQDEIIALLLEEGESELLIKAAVQDWGLSCEQAENLAKLEDIKLEAGTARFCARALHELIPIMVNQGLSVTEAIAQIRGGYGHNRRGEKELKYYGEVMPDSVVPQPRSSVDDENIYGKINNPTVHIGLNQLRKLVNELITEYGIPDEMIVELSRELKLTQDAKKELNKKQGENKKLNDEAKEKIEGQGLQANTENILRYKLWKELDQNDCNNRRSPYSGKPISITQLFSNQIEIEHILPLSRTLDDSYNNKTLCFVDENRMKGNYAPAEACQKMLWNFDHDEMLERVAHLPRKKRYRFEADAMQRWEEKEGGFIARQLTDTQYLSKVAKRYLESLYPDDGKLHVRVIPGQLTAKLRGQWGLNSILSGEGNNEKNRNDHRHHAIDAIIIGCTDQRLLQHAAKNAEQLDSIEFDPPFGTVEDFRHAVKEQIDPIIVSHRPDHGWQGAMHEGTNYGIIDNQNDYERDNNYNVVYRKPFVLLFAGLEPNKARDKASEIRDARLRNPLMNLLEKAESKEEVTKIVTDFAKEKGIKNIRILKKEATIIPIEHPSENKKFKKGVVPGSNHHIAFWRMPDKSVQALGISFYDMISRKDDLNSLKPHPAAKLVCHISNGDLIRVTQNEADRTLKVVNLSPANKLFWCIDHQEGGNLSKRYKEKDLKYFFLSFSKMADYKVRKIHITPTGKIYDSGSIF

SEQ ID NO: 6625 - protein, 1382 aa, unidentified
  REGION 1..1382: note = Description of Unknown: Cas Enzyme sequence
MKKILGLDLGTASNGWALVNEAESENETNSIVKVGVRVNPLSSDDQSNFEEGKSITINAERTLKRSARRNLQRYKLRREELINILSEAGVIDSSVPLTEEGNFSTFKTYGNRAFAATEKIDLHEFAKVLLMINKKRGYKSSRKAQNKDEGQLIDGMSVAKTLYEKGITPGQFVCSILVDGEKIVPDFYRSDLKDEFERIWGFQSNYYPEILTDELKGLVFGKSLKETSFHFREKFGIYAADNKGKDKRLQKYKWRSDCVEQKMPIDVVAAVICDVNSNYNASSGYLGAISDRSKELYFNQQTIGQYLWKQIQGNSHTRLKGQVFYRQDYLDEFETIWEQQAKHYSVLTKDLKSEVRDVVIFYQRRLKSQKALLSFCEFESKEVEVLVDGKLKKKTIGARVCPKSSPVFQVFKIWSILNNIEVKDIESKTRFKLEIEQKQILFNELNFVQKLSARDALKILFDKYSSGFELNYKDLEGNRTNAAILDKLYEIVNLSGHEITNYSKLNSVSKVAAIMEILCSLGINSSILDFNPLLDGKEFQKQPLYLLWHLLYSYEGDNSKTGNESLIQALNKKYGFSREYGILLSNICFSDDYSDLSSKAIRKILPHLMDGLTYDKACLYAGYNHSKSLTAEESKNRNLEPRLQLLPKNSLRNPVVEKILNQMVNLVNGIIEEYGKPDEIRVELARELKKSAEERKRMTEAINRSKSEHEEYREILIREFGLRYSSRNDLIRYKLYKELEFNGYKTLYTNTYISQEKLFSKEFDIEHIIPQARLFDDSFSNKTLEVRSANIEKGDTTAYDYVLNKYGEEGLERYKSAIDDLYKKDKISKTKRNKLLMTDDEIPNDFIERDLRDSQYIAKKAKQMLEKVFRTVTTTTGSITDKLREDWQLINVMQELNWDRYKALGLTYYENNNEGKPLPRISDWSKRDDHRHHAMDAITVAFTKRNHIQYLNNMSARSDRSSSIYGIEKKELYRDDKGKLRFKPPMPLETLRAEVKRHLEHTLVSIKAKNKVVTTNINKTKKRKGYNTQVALTPRGQLHLETVYGKINRYKTTEVKVGSGFDYETIQKVANKKHREALLKRLSDFDNDPKKAFTGKNSLEKNPIYVNEQHSAKLPTKVKLVEFENIYTIRKDVTPDLNVEKVIDIKVKKRLNERLAEFGGDAKKAFANLDDNPIWLNENKGIKIKRVSISGISNAEALHEKRNQYGELVLDENGKPIPIDFVNTGNNHHVAIYADSKGDWHEKVVSLYEAVERANQGLPAVDKLYNSHDGWIFQFSMKQNEYFVFPDESQGFDPNEIDLTYQANYSEISPNLFRVQKFSTKDYVFRHHLETTVQRRDRKGKPIDEKPLKGVISKRIQNVNALKGLVKVRINHLGIIVHVGEY

SEQ ID NO: 6626 - protein, 1020 aa, unidentified
  REGION 1..1020: note = Description of Unknown: Cas Enzyme sequence
MNTISPLVIDLGANNTGVLMPHFQAGTAVNADRPAGVLIHIPDDKLTFAQGSRRTKRHQKRGVLRRKQAKRLFRLIMLNQFQFDINAQPRDIQEALHNAFNNRGFSYLDEDLDEDALDNPDATAFIVELFPAVFDDESPLTVQLSRMSTDLEAIKRINESEPFKWDKDALKKQVAETTKDTEVKKAITHGFKALTTFVHSVINSKINGHKPRHQYLDDIAHDLSRSDKLKPVWNATGLNAAEAANLIGHISNLQLRVLRKYFNDEKMAGQGDGIWDAARMARLFRAYITSWHAKTDDEKERRNTLLDAIARHGDDITALWRTVDPSVSIPPMEDMNNRHPTRCASLLLDESILSRRLPQWTAISKALLQSDPNQPFAPSSNPSALRRFQALLDRAKKHDPWKLRSLVFFDDSKAGRARQAQDESMDRLNQAVGPEQTAALLSFARDYYTERDAADRGDWSMEWPNRVLKTCGRNCPRKSRIMHLQIGILLRKELTRQEVDQLKALFNSKERIAGNTTLHGIGEKAAEAQKTYGPALKTLLVQAAFKGDKKEKDPFLKLLTQCETAYDRIAGLFGVDTTQTDRFGKPFVLIQIFNLLEKDPHGSSATCRHCTEDNALRTRPYNENIANARRLPADAGRPFDGMLSRILERQAYEIAKAKIKQLEENPPADSRVFMPVILEQNSFEFALGLLSIRKKQIPDARKKAAKKEKGLLEGAETSVQLWQDKDARIRDDCQGICPYTGGKLSAKGQIDHIIPRSLSRDWGGGIYNSEANLIYCSIQGNTDKGERLYSLDQLKTPYLQVQFPEQQGDRNQIAAYLRASLPDLLKEEKQAISGFHGLTPQERKIIRHALFVEDLRGDVLNALQMQKKTRVNGTQKWLAKHIARNLRELARKQLPGLELDIRTYRIKAEDVHTLRTILADKYTALKKTAPQPAYSHLVDAGMAWAVWLATSRDAQERIPIEENSLDTPDWLHALLPEGILIQTLAAKSKANKRKPHSQPLFKDGIFGNRFLSLIVHKDGT

SEQ ID NO: 6627 - protein, 1544 aa, unidentified
  REGION 1..1544: note = Description of Unknown: Cas Enzyme sequence
MKKILGLDLGTNSIGWAVINAKEEESGENKSLIPNGIEAAGSRIIPMDAATLGNFESGNTVSQTKERTGFRGTRRIRERNLLRRERLHRVLDLIGFLPSHYAEKLTRYGKFENESEPKLAWKLNAEGKFEFIFKDSFDEMLNDFIEKYPELKDKKVPYDWTIYYLRKKALTQKITKEELAWILLNFNQKRGYYQLRGEEEDEEKKEKQLVEFYALKVVSVEDSEEKKGNDIWYNVHLENGWIYRRSSKYPLDWVGKTKEFIVTTDLNEDGTPKINKDGNIKRSFRAPQENDWTLVKKKTELDIDNYINRFDQTVGAYIYDSLLKNPNQKIKGKLVRTIERKYYKNELKAILEKQKEFHKEFNDTELYHKCLDELYAINEAHKNNVLNRDFTYLFKDDIIFYQRPLKSKKSLIDNCPYESTFDNKGNEYPIKCVAKSNPYYQEFRLWQFISNLRIYEREKEINGKLETDVDVTNEFFKNEDDITNLFDWLNCKKEISQSDLLGKFFKIKKPKGKDTNYPYRWNYVEDKSYPCNETRYVIISRLEKIGFDLQNLTKDFEYKIWHILYSVEDKQEIEKALTNFASKNHLSEDFTNAFKNCPPFKKEYGAYSEKAIKKLLSLMRVGKYWSEENIDQTTRQRIENIITGEVDETIQDRVRDKAITLKNINDFKGLPIWLACYVIYNRHSEAKDIQKWEKPEDIDTYLKHFKQHSLRNPIVEQVITETLRTVRDIWKQVGSIDEIHLELVRDLKNPADKRAKMTQKVLENENTNLRIKSLLAEFKDPEFKIENVRPFSPSQQDILRIYEEGVLVSNEIPDDINSILDKFKQTDDKKRPTRAEFSRYKLWLDQKYRSPYTGETIPLGKLFTSAYEIEHIIPQSRYFDDSINNKVICESEVNKLKDNQLGYEFIANHPGEKVELSGGKIVELLTVDSYETLVKKDYSHNRKKMEKLLMADIPNKFIERQLNDSRYISKVVKTLLSNIVREKDEQEAISKNAIPCQGSITDRLKKDWGMNDVWNSIVLPRFERLNQKTGNTCFTSKNAEGHTIPNMPVELQKGFNKKRIDHRHHAMDAIVIACCTRSMVQYLNNENAKSNNYKLRNGLAQKLCNYENKTFYKKVKNAQGIWVNSSESTTKPVPTTIKKPWNTFTQDAGNSLKDIVVSFKQNLRVINKTTNYHQHYNDEGKKVLIKQEKGDSWAIRKSLHKDTINGKVALQQKKTVRLNDALNNINNVVNKDLRSKMKELLALGYDEKKMEKYFTEDKTVWSDVDLKKIEVYYYTNNTYATRFMKDLVSYFSKITDMSVAQEKIKNITDTGIQKILLNHIQDEISKGNSVKTALSVDGFDRMNKSIKELNGGKDHKPIYKIRVYESSDKKYAIGESGNKKTKFVETDKDTNLYFAVFETSIIDKKTGEEKKQRSYFSIPLKLAIECQKKKGKNWKEEIDSIYKNNKKEAKLIFILSPNDLVYLPTKEQVTNNHINTFLDKSRIYKMVSSSGTQCFFIKQNVANVIIDKYESKMEKAITGEMIKETCIPIEIDRLGNIKISQKTH

SEQ ID NO: 6628 - protein, 1129 aa, unidentified
  REGION 1..1129: note = Description of Unknown: Cas Enzyme sequence
MTQAVNGALPTHGFLTLGLDIGIASVGWAVLNETRIVDIGVRCFDKAETAKEGESLNLARRLARLLRRRLYRRSWRLTKLARLLKQQGLIENAAFFKQQPPTSVSTWKLRVDALDRLLSAQEWARVIYHLCKHRGFHWASKAEEIQAEGDAKGEGGRVKKGLADTAAKMAAKNYRTAAEMVLAEFPHAQRNKRGEYDKALSRVLLDQEFALLFEHQRRLGNPHASAEFEVRVRGNGDRKSGLFWNQKPALAGTDLLKMLGHCTFEKAEFRAPKASFTAERHVWLTRLNNLRVAVDGASRALTQDERALALLLPYQTEHFKYKTLKTALVKAGHLPDTARFGGLAYPSEAQKEAGKTKDPEDQLLVKLPAWHDLRKALSKAGLQDAWQQISVAALDGQPQWLDSIGWVLSVYKDDTEVERELATLALPQAQAVIPVLLGLRFDKFHALSLKALHQIVPHMERGLRYDEAVAQIPAYGHHSQRVVLGTGTRRYLPSFYKNERSEQGSMMFRDDIDVPRNPVVLRALNQARKVVNAVIKKHGSLSAVHIEMARDLSRPLDERREVKKLQEEFRDRNDKARESFESDHGYRPKGIVFLKWMLYREQQGKCAYSLGGLDIDRVLNDANYAQIDHALPYSRSYDDSKNNKVLVLTRENQNKGNRTAYEYLTSFAGGEDGDRWRNYAAWVNGNKSYRMAKRNRLLRKNYGAEEASGFKDRNLNDTRYICKFFKNYVEEHLQLAPRADGNANKRCVVVNGQLTAFLRARWSLSKVRSESDRHHALDAAVVAACSHGMVKALADYARNKEVAYLKEGFPDPETGEIINPEAHARGVLHFPEPWAHFRHELQTRLYTDDVQALREDLRRLGTYSEQDLLEVRTLFVSRAPQRRNDGAVHKETIYAQPEALRKQGGVVQKVPLTGLSLKVLDNLADPHRNSKLYAAIRARLEAYGGKADKAFGPDQPFYKPDKDGNPTGPIVRTVKLVIDKLSGIPIRGGIAKNDTMLRVDVFTKAGKYHLVPVYVHHRVTGLPDRAIVAFKDEDEWTLVDDSFEFLFSAYSNDLLEINLKREQYVGYYSGCDRSTGALNLWAHDRASHVGKDGLVRGIGAKTALSIRKLNIDVLGTIHPARPEKRHGLA

SEQ ID NO: 6629 - protein, 1380 aa, unidentified
  REGION 1..1380: note = Description of Unknown: Cas Enzyme sequence
DIWRIIMTFFIGLDMGTSSVGYAVSNEQYEILNFRQKAMWGVRLFDEAKTAADRRTARTSRRRLARRNLRLKLLQDLFAEAINAVDPGFYQRLKDSFFYPEDKDEEQIYSLFADADFTDKDYHKKYPTIYHLRHALISNTEPHDPRLVYLAIHHILKSRGHFLFTGSFDMQGNGQYIETFKDFQATLSEVFELTLPSELAEPIKNAINDKSLKKREKTEELKKITNWKDVNAVAILELLSNRKVRISKLFGDEYKDQSPKDVTFEGTGFEEEKQAELQALLSDDEFSLLLSTYRLHNQLRLDTLLQGYETYSASKIGLYEKHGADLRKLKRIFRKYFSSDDYKAFFSQSKSKLNNYVAYTGHLKKNKKKVAVNYRCDAINFLDDLRKKLEPVARDNPEDTLLAEILVEIDNQLFLPKQVSKDNSLIPNQIHVEELKVILNNASAYLPFLNEIGEDNHTIKEMIIKLAEFRIPYYVGPLNPAHKVRPEKKDGSHHAWITKRSDEAVRPWNFHRVVDEEQSANDFIANLTNKCTYLIGEDVLPKESPSYARFILLNQLNMLSYRGERLPVIYKHAIYEELFMAANAKPRFSKKDIAEFLNIKFGDDFNAADIGGMDLHINNVLKAERQIEAIAPNQLSLQDKEDIVRLITVLPDSNKMLVNRLKNQFHTKLNDEQIKRISQLSFKDWGNLSEKLLSGIRAIGPGGVETNILDAMWNNNLTLMELLSASYGFKEQIDAYNNEIVGEARTLDYQIVDEYPYLSPAVKRMIWQAIKIVNEIVKIQKGAPEKIFIEVAREEGKKERTTSRLEQLKQIYKEAKILDEHLLSELNEQSESSMRRKKIYLYFTQLGKCAYTGKPIDFEKLLEQGDSSDAYYDIDHIYPRSKTKDDSLRNNLVLVESSANRDKGDNYPIPLDVQNARRAFWFHLKEKGLISDEKFFRLNRTTELSDEELESFISRQLVQTRQATKAAAEILGKFYPDTRVVFVKAGHVSDFRYNQRDFEFIKVRAMNDLHHAKDAYLNIVVGNVFDTKFTQDVRNYIKTAGKRDYNLARMYDFDVKSRDGKLAWKAGKDGTIKTVSKMMARNNIVTSYQAVLRTRGQSGGLFDQNLLPKGQGQYPIKSTDPRFVGDDGIAKYGGYKNITGATYFVVEHTLRNKRVRSILPLYLPWILTNEQTEENLQNYCLNTLNLLEPRIILNDLPFKSVLRLNGFPFQLLGRSDNRLQIAPALQPFFPAEIEPIIKTFTKDIEDDVDDKVLLRTVTEEDLLLVYRVFQKKLSNAPYNKHSNFNNQANNLKNSEENFVLLSVREKFRVLNQILILFTCDGRLSDLSLLLPKDKNGKPSTKNTQVGMIRIPQNIQEGCQLEVVFQSVTGLYEKTNRISLP

SEQ ID NO: 6630 - protein, 1239 aa, unidentified
  REGION 1..1239: note = Description of Unknown: Cas Enzyme sequence
MTKILGLDLGSASIGWAMIEENEGNIKNKTQILGMGSRIIPYEGTEGKDFAKGTGESRNSLRTKARTIRKGYDRYQMRREFLIDVLLKNDMLPDEGLKKLPKLQLWELRNKAASSEISLKELGRILLWLNQKRGYKSCRSDANLDKKDTDYVAEVKSRHDKINELHLTIGQYFFKELEKDNSYRVKENIFPREAYIEEFETICKVQQQFHTGLTTQLIEKIKNEIIYFQRPLKSQKGLVSVCEFEGFWIKKDDKELFTGPKVAQKSSPIFQLAKIWENINNIKISSKSGENIIISLEQKQSIFQHLDNNERLTLTDLLKILNLKSNNCYVNKQLAKGLQGNITKCAILKCFDDSSKYDELLKFDIKLENGKGEAYLYDRKTGEVLNSKPLKFINPDIEKEPFYQLWHTIYSINDQQECSKALQLKYKIEELVADRLAAIDFSRYGYGNKSLKAIRKILPYLMEGDVYSDAMSYAGYDHSNSLTKEQNFQRKLLDQLKPVKKNSLRQPIVEKILNQMVNVVNALIEKYGKPDEIRIELARELKQSKEERNDTDRIMSQRQRENETIAKRLAEYGLRATRNNILKWRLYEEIDNEDKKLNAMCIYCGQPISLLEAIKGNDVDIEHIIPKSKLFDDSQSNKTLAHRHCNSNKNDRTAFDFMKSKPEHIFTDYIERVNLLYSNKIIGKAKRDKLLMTESNIPNDFIDRQLRESQYIARKARETLQSICFNVWTTSGKITSELRHLWGWDDITMNLQFEKYKELGLTEIKEWESEHGRNHHEKEVIKDWSKRDDHRHHAIDALTIACTKQGFIQRFNTLSSCKTREEMQFDIDSRSIEFKEKLSLLEKYIILQQPISVNEVEKAVSNILISFKAGKRVAVTGTRKVGKRGNKRVIQSGIIIPRGSLSEESVYGKIKSLEEKKNLKFLFENPQLIFKPYIKKLVEDRLSQFDGNSKMAIASLKKEPIYIDLEKKKQLEYATCLKEEYVIKYTVNTSFNKVDKVIDYGIKNILLSRLEKFNNNPKEAFKDVKTVDDRLIRWYEDEGLKQPINSVRCFTGLSAVVPVRKDENGKEIGFVKPGNNHHIAIYVDSEGCYIEHVCTFWHAVERRKFGIPVIINDSNKIWDKINDSPEGTYPESFLKMLPGANLTLKLSMQQNEMFILGLPEQDLTTAFENKDYKTLGKRLYRIQKIGVSDYTFRHHLETQIIDDKSALQSNRFYRIQSIKALFSLQPIKVKINLLGEISF

SEQ ID NO: 6631 - protein, 1092 aa, unidentified
  REGION 1..1092: note = Description of Unknown: Cas Enzyme sequence
MTTLVISPDVSFSFDIGDASIGWAALSSTSPSEFPEIFGCGVLLFPKDDCQNHLRAQYRRQRRHIAATRNRVARIRRLLVEMGAMSEEDAKAQKTAASGVMMPWLLAARALAGAPLAWPELWQVLRFYAHNRGYDGNARWARPGEEEKDDTEKVQKANALMEQYGTHTMAETICAYLNVKIDDANPHLGEKAPYFKGESVAFRREIVREEVNRLVRNQFGKLPGCDAAFLSLLLGRDLTREEKKRFRLPARYAGGLLFGQMIPRFDNRIITTCPVSGEKTPLKHCTDYYRYRWARLLANLRVADPSTGEKRVLTPSERVELTRRMETSGGKTKKDLKKALEEITHASAKSLDDQFFSPETEKALVLDPVRDALSGAPFENVWPLVPEAMQRKIAGEFFKSGRLSLADLVAVVKKSGADTAEMENAIQLDYAKAAKRKRREPLTYEAYLADVKKLAEASGRAPFSRTVMRKVYEEALSGMDPAAIADSQPPSAPERRDGCIAITNEILDRETEKRLDDLTNNHLVRQRMGMFRRLFKDLFEQYACGKAAKVADVTIEVARDLQEYAGKNAKEKAALFSEKAKPFQKAEAKLIKDFADIPINIRPTYSMIRKARIAMAQNWLCPYTGRHFSASDIAYDRVDFEHIIPHASRRSDALEGLAITFRDINKRKGKRTALEFIRSGAEGLMTETRFRDYVAGLYPKFRPGRDASDEDKINWRRKEWFLKEGYDERDAEFTKAALTVTSHLNKLAALEARKILRASAKEAGLGESLPEHRVGHMVGAITGEFRKDRNWDLLGCIAPVCPEIIDPNSPEKKHLPKGEIRNITHLHHAVDAITIGIARNIFPGHVVKRDYCEAILSRRPNPQQRAILESMGVFQFYTDGSAHLCDMPEELRENIIAKLAECRVVQHVPKSMHGLRAELTQWGVQHYDAEADRVKLVQYTRDPANGNARKRKEAWENPRKLLGYNPVGDSKLKPRKAVVVISDNFGIALLPEPVVLPFHKVWERLQELAEKNGGKIPTVLRQGDVIDVPGGRYKGRWKIHSTKDNATGVAVDMAWPHLVKAENKKAGARINVSLKTLIKDGMTIVQQSLLGS

SEQ ID NO: 6632 - protein, 1265 aa, unidentified
  REGION 1..1265: note = Description of Unknown: Cas Enzyme sequence
NDLNFTDKDYHSQYPTIYHLRYELMVNPQPHDIRLVYLALAHILKTRGHFLYSETGEFKLGEQFSNVFSEFVSLAGEVLDIFIPDTLNAPFHQVLTQKTTRNSEKQASLLELLQNKDKVTKTLTRLLTGYEIKFTDLFGDQYKHTTPAKVKLSKIEDETLDQLEMVLSEDHFELIQSASNVYNLVRLESLLQGADSLSQTKINIYEKHRKDLLSLKQIFKNQLSKEDYHRFFSESEKGLCNYPAYSGHFTINKKKQPVLQKCDQEKFLEHLKKIINSLPEKAKTSKEVELVMSEIENGTFMPKITDRDNSLIPHQLHHIELKKILENAATYLPWLNEIGSDGYTKRQMIELLSDFRIPYYVGPLNPAHSIEKESNSSSHHSWVTRLSNEPVRPWNFNRVIDVEQSATDFIANLTNKCTYLIGEDVLPKESPTYAKYSILNILNTVNIKGERLSAPLKQEIFQHFFIDSKRIGKPTKKNIAEFIQSKTGQLTTESDIAGMDLEIPGDMKAEKAIEKIAPGKLTLVEKEKIVRLVTVFPDSIRMLSNRIEREMGAKLTSSEISQLARLKFTGWGRLSNKFLNEIEAPNDKAEFKTIIGMMWEDSLNLMEIMSDRFLFLSIVQHINDDLLVSNLSFDYHLVENYPVSPSVKRMVWQALKIIKELIKVNHGQPPAKIFLEVAREEGEKVRTKSRKSQLLELYKDLKKQQEGLINELESRSEAELRSKKLFLYFTQMGRCMYTGESISVDSLNNKGADGHDIYDIDHIYPRSLTKDDSLLNNLVLVKSKANRDKGNEYPIVEEIRKARIGLWAQLKESELITEEKFHRLIRQSHLSEDELAGFIKRQLVETRQASKAAADLIKQFLPETHLVYVKAGHVSDFRYNQGGFKFPKVRGMNDLHHAKDAYLNIVVGNVFDSKFTQNPLNFIRSKEGRNYNLARMYDFSVKNPFGEIAWQPGPEGSLTMVRKMMKRNNILVTYQTHHQHSGRNGGIFNQTILPKGQGQFPIKTTDPRLNTQTGIDKYGAYTDETGATFFLVEHKAKKKVCKSIISLGLAWFLKHPLTEEALLQYCEKDLGLIEPRILAKDVPYNTILSIDGYPLRVLAKTGSSIKMANVIQPVFSDKQEQTINQVFVQLAKEDSDEEDEIIENVALQADFLQLYDGFTHKLSEPPFSKLSSYTRQVSNLQEGRIKFQALTLREQARVLNQVLTFFLCDHQLSDISLISPLKNGKTQNTQVGMITISQNLPWEEKEFSIIYQSVTGLFEKQVRVS

SEQ ID NO: 6633 - protein, 1256 aa, unidentified
  REGION 1..1256: note = Description of Unknown: Cas Enzyme sequence
MKRILGLDLGTNSIGWALISTDEKGKPSKIEGMGSRIIPMSQDVLGNFDKGNSISQAAERRRYRSTRRLRERYLLRRERLHRVLNVLGFLPQHYANEIDFKVHLGKFLDNHEPKLAYQNQCFIFNKSFKEMLVDFSKNQPQLIANDKKIPYDWTIYYLRKKALTQKIEKEELSWILLNFNQKRGYYQREDDEDINSDKREYVIELKVIKIEKGDVDKKNKKRSWYRIYLENGWEYSATFGNEPAWLNMTREFLITEDLDEVGNIKLIKDRRTDFDGTPKRKITPLPSFEEIDLMTKQEQDRIYKKIKVKTESVINHSGKTVGSYIYDTLLQRPHQKINGKLIRTIDRHYYKNELTSILITQQQFHPELRNVDLYNDSVRELYRNNESHQLLLSQKDFVHLFIDDIIFYQRPLRSKKSSIGKCSLETRMYTDEKGIKRIESLRAIPKSHPLYQEFRLWQWLSNLKILKKENDQDVTMQFISNNEDKENLYDFLKGRKEIEQKSLLKFLLGQRGLKGKSFSSESEKLRWNYVEDKIYPCNVTGTMITTRLAKVEKVPPDFLTSDIEILLWHIIYSVNDKTEFAKALKTFANKYNLDEKSFLNNFKNFPLFKSEYGSFSEKAIKKLLPLLRIGKYWTWDAIDVNTKERIGKILTGEFDEKIKNRVREKAINLIHESDFQGLQLWLSQYIVYDRHSESVASGKWNSVTDMEKYLEEFKQHSFRNPIVEQVVTETLRIVKDIWCKFGNGEKDFFSEIHVELGRQMKNTAEDRKRLTNQISESEITNIRIKALIAELKENSDGKLFVEDVRPYSPSQQEALKIFEDGVLNSNIEIPEDILKISKTAQPSKSELQRYKLWLEQKYCSPYTGQMIPLNKLFTEAYQIEHIIPQSRYFDDSYSNKVICEASVNQKKDKQLGLEFIKNHHGEKIDTGFGSTVEIFSIEEYQDFVKRHYSNNRSKKAKLLLEEIPDKMIERQLNDTRYISVFISNLLSNIVRSSENDDGVNSKNFVPGNGKITSILRRDWGLDGVWNELILPRFERMNQLTDSKSFTSITTNDKVIPTVPLEFSKGFQKKRIDHRHHALDALVIACANREHINLLNNQFAKSKLRFDLNRKLRKFEKVSYKDLETGIIKSKDVPKEFIKPWEDFTKDAKTELGKIVVSFKQNLRIINKTTNKFERFVEKDGIKKKEILRQTKGEGWAIRKPLHKETISGYVKLPGIKVPKGKILTATRKSIDTSFDAKAIESITDSGIRKILLNHLS

SEQ ID NO: 6634 - protein, 1107 aa, unidentified
  REGION 1..1107: note = Description of Unknown: Cas Enzyme sequence
MSWPYTLGLDIGIASVGWCLLGDNRIIDLGVRAFDKAETAKEGNPLNLTRRMARLARHRLAQRAWRLKKLTRELKRHGLIDDKHFFQPANPALVSPWQLRVEGLQRKLERNEWTRVIYHLCKHRGFHWISRAEEKQAAGDIKGEGGKVKQGLAGTKRLMDKKGYRSIAEMVLAEFPDAQRNKRGEYTKALSRVLLGDELKKLFAEQRRLGNAFTSESLETALLGNGDLKSGLFWVQKPPLSGAALLKMLGKCTFEKGEFRAPKASFTAERHVWLTRLNNLRIIYAGETRPLNAQERALALPLPYQQASDLTYKQLHSALVKSGQLPESFEFAGLRPAKDGKDPKSEKLIKLPAWQELRSTLKAAGLETEWEGLAGAACCGQPEILDEIARVLSVYKDDDKTRSELNKLALPNHQETVEALLDCPRVSFSKFHALSLKALYRIVPHMEAGLRYDEACIEAGYHHSQPHKPGEGQSRTLPPLYAGRDPDGRMRFAEDEDIPRNPVVLRALNQARKVVNAIVRRYGSPMAVNIEMARDLSRPLDERNKIRKEQEEYRARNERDKAFFAEEFGQAPKGGEFEKFRLYREQLGKCAYSQEAIDLARLLEPGYVEIDHALPYSRSFDDSKNNKVLVLSKENRDKGNRTPYEYLGGTENSPRWQQFVAFVESTKSYRLAKRSRLLRKDFGAKEAEEFKERNLNDTRYICKFFKNYVERHLKLAESSDAKRCVVLSGQMTAFLRVRWGINKIRSESDRHHALDATVVAACTHGMVKRLADYSRTRELALVHTGFVDTTTGEIVDPAMFRQLKQHFPEPWPHFRHELEARLKIDNSALLREEMTHLGTYDATALDEIRPLFVSRAVQRRNGGAAHKDTIYGQPEKMREKGSVTQKVPLTSLTLKDLDKLIDPHRNARLYDAIRERLEAHNGKGNKAFPADNPLRKPDREGNPTGPVVRTVTMLIDKLSGIPVRDGIAKNDTMLRVDVFTKAGKFHLVPVYVHHKVTGLPNRAIVAFKDEEEWTLIDDSFAWCFSLYPNDLVRIAQKGKSPILGYYASCHRGTGNLNIWAHDRSVSVGKDGMLEGIGVKTALSLEKLHVDTLGQIHPAKPEPRRGLA

SEQ ID NO: 6635 - protein, 1042 aa, unidentified
  REGION 1..1042: note = Description of Unknown: Cas Enzyme sequence
MILGLDLGTNSVGWALLDSQKILAAGVRVFEAGMEGNMQDGTQTSRNATRREKRMLRRQHDRRARRMKSIMRILQETGLFPEANNIAKEIEHIDALALRRLRLSVDIQHLAHVVPYRLRAEALDKRLDDFELGRALYHLAQRRGFLSNRKSASGEDSEETGKVKPGIHELESKMKASDARTLGEYFSFINPEEERIRSRYTGRKMYADEFKAILAAQRKLGNRRITDDFEKRLYRAIFHQRPLKSCRDLIGECPYEKGQKRAPWYHPLAQKFRVLQAVNHLRLVFDSGDARPLSAQERDRLLNLLLRSSSIKISTAKKALGLNSKKNPCSFSIEEGKETALPGHAVNAKFIPVFGEDRWMNGLSEREQVDAILDVNSYTSIDGLKKRGMARWGLAEEQAEEFAEIRLPEDYAGLSLAALRKVIPLMEKGADYMTALIAVYPDVHRSDKVYAELPMIKGHLKDLRNPAVERTLTQLRKVVNPLLRKYGKPDEIHIELAREMKKSKLEKGRLIKKMREQERIRQEAVFELQAQFPEFQKDTPNRRDIEKYLLWKECKGKCPYSGRTIALTNLFGDTPEYDIEHIIPYSVSLDDSFANKTLCHVQTNRADKRNRTPFQAFGERRDDYEAMLDRVSQFESPYRVEKLRRFKLENTDEFADFANRQLNDTSYASKLAKVYLASLYGGTYDDSKQRIMAVSGNITAVVRNYYRLNRILGEGDRKTRSDHRHHAVDAVVLALTSQGTVQSISNTAAEFATRSSRLMYQGDSEPWNGFTNELRRAVGGIKVVHAASRKARGQLHEDTNYGLVKGEQGLVAYRRPLESLTDKDLENIADPVVKQCVRAKLIELDILNDANGKLDARKLSLLGDPSNLPRMKTKDGAPGPVIRSARCRKPLAVIKLGSKENPRAVVTGNNHHMEILEVDDGKGGLKWEGVCVSMMEACRRKREGLPVVQRDHGPDKHFVFSLAKGDIVECALSATQERELFVIRSLSSAVPPLSFVRLNDARDKKGIVEAKALFRPCLDPFRKMNARKVTLTPFGEIRYAND

SEQ ID NO: 6636 - protein, 1027 aa, unidentified
  REGION 1..1027: note = Description of Unknown: Cas Enzyme sequence
MKKILGLDLGSASIGWAIIAESNENGKTKCDILGMGSRIIPYEGTEGKDFAKGTGESRNALRTKARTARKGYDRYQLRRKYLVDVLVKNQMYPDDETRNLPKMKLWELRDKAVRYPISLMELGRLLLWLNQKRGYKSSRSDANLEKKDTEYVATVKSRHEKIKELNLTIGQYFFKELKDNEFFKVKENIFPREAYIEEFDAIFMTQQRIYPEILTNELIDKIRNEIIYYQRPLKSQKGLVSVCEFEGFWRIGKDGKEYFVGPKVAPKSSPLFQLSKMWENINNIKIGSRTGEDLTLTTEQKLAIFQHLDNNEKLTTTDLLKILNLKKDDCYVNKQLAKGLNGNITKHAIRQCFGDSDKYENLLNLELKIEEKEEEGYLYDRKTGEILNNKPIKLVDPLVEQEPFYQLWHTIYSIHDQEECSRVLQSKFNIEKPIAEKLAAIDFSKHAFGNKSVKVIRKILPYLMEGDGYSEAMSYAGYDHSNSQTKEENLQRKLLEQLKPIPKNSLRQPVVEKILNQMVNVVNAVIEKYGKPDEIRVELARELKQSKEERNEADKAMSKRQRENDAITKRLEEFGLRASRNNIIKWRLYEEIDNQEKKLNAICVYCGQPISLTEALRGNDVDIEHIIPKSKLFDDSQSNKTLAHRHCNKNKNDLTAYDFMKGKPEAVFNEYIARVNQLYANHIIGKTKRDKLLMTESKIPDNFIDRQLRESQYIAKKAREILQTICHNVWSTSGTVTAELRHLWGWDDVIMNLQMPKYKELGHTEMVEWESELGKNKHQKEVITGWTKRDDHRHHAVDALTIACTKQGFIQRFNTLNAAKTREDMLFDVEQRSLEFKEKRSLLEKYIIGEQPLRVDEVEKVVSNILISFKSGKKVAVWGTRKIGKRGNKIVVQEKIIVPRGSLSEESVYGKIKKQEEKDYKYLFENPQLIFNPNIKVKVEERLLMFDGDVKKATASLKKVPIYLDNDKTVVLEKATCLKDEYVIKYSVDTNFNKTDKVVDPKIREILQKRLDKFGGKEKEAFKDIQL

SEQ ID NO: 6637 - protein, 1001 aa, unidentified
  REGION 1..1001: note = Description of Unknown: Cas Enzyme sequence
FKERTEIGKTGKSSIQNFLKKYLKSVSVDSVVFEKLCNDFANYPKFDSNYGTFSVKALAKLLSVMRTGNNFLLQAKGINNWQNKIFDRANTILEKTKQIDWNAKDVDYSKAVVTDVNQRKGELPFPKGLFNTFKDFSTINDFQFLNLTQASYLIYGRHSELAVAKFWDSPQKIREEINKELKHHSLNNPVAEKVLKETMKVVADIWEYHGNSAKNFFSEIHVEVARELQKSNEEKKEINENQKNSRSENERLRNLLEDFLCNSPYNAKKGNQDHFERLKIVEEGARIRSFFDKQFYTEHQNKFLKKDIDDLLKKQRISKTDFEKYKLWIEQGYKSPYTNKTIKLSDLFNGSKYNIDHILPRAAVTNDSLNNKIVCEKEINKEKLDFTGRAFVANFQGRKFHTMAHGEVTIMSEEEYVDLVKKQFAGGKRFILLSKDVPNGFTDSQMNNAKHIARKAMEFLSHIVRKQGEVEFRAKNILPVTGAVTDRLRKEWRFHQVWTALLTLRFERLNKLFETSEYGKYVLSENGHSYFDINTKYVLEQNKNFELKRIDHRHHALDALVIALCTQNHVQYINNVNSGITNKKKEKLAAIKKQRAGIKRQIIYSEKNNENPNETTWSFMLPGSFRQENTEGSGKESVCNVKWSNASIEQDTSDYKKVILDSLEHCIVTFKNDFKLVSKSSNKYESYYDEDGNLRTSKSGKPIKAFISQKNEENKHWSIRKSLHTDNPSGKIELQFDQLKITDNLGKIELIKDENLKDSVKEILGIHDNKIGEAKKYLEKNPIKVNEVPIIVTDFKIVNFKFRKKQPILNLAIRTGQGALTILDQVKDRIYKVVDLKLRDELLIHLRSNEDDIDKAFSIEGIEAFNANRKIPVKRLPICESSELKFAIGKKFDNNHKWVETGGNYHFKISQEGDKRIFETIPLRESIEIEKRNIIDKKGKIEERDIIILSPNDLVFIPTEEELENPNLLNFDDLNKEQLKRIFVFNDSSGKTAYFRPNSIS

SEQ ID NO: 6638 - protein, 908 aa, unidentified
  REGION 1..908: note = Description of Unknown: Cas Enzyme sequence
DFEKRTVSEIIESIEEIFNILNINTKILYFNSDNEPNKQPMYQLWHLLYSFEGDNSKTGNQNLINKIIEQYRFDKEYAGILANVNFQDDYGSLSAKAIRKILPYLKAGHKYDVACEYAGYRHSASSLTKEELDTKIYKDRLEILPKNSLRNPVVEKILNQMINVINLIIDTYGKPDEIRVELARELKKNAKEREELTKSIAETTRLHEQYKDILSKSPFNLSNISRNDIVRYKLYEELKENGYKTLYSNTYISPSTVFSGNFDIEHIIPQSRLFDDSFSNKTLELRSINIEKGNNTAHDFIKKKYGETGVDNSLDNFLVRIEDLHKKGIISRAKFNKLKMQEKDIPDGFIERDIRDTQYIAKYAKTLLGDLVKFVVSTTGSITDRLREDWQLVDVMKELNWEKYKSLGLTEEFTNEEGHRIRKIKDWTKRNDHRHHAMDALTVAFTKRQFIQYLNNLNARRTNEEQGISNSEKDEQEKISITSDDIKLTTRDVLGIERRELTRDDWGKLRFNPPLPLDDFRAEAKRHLENTLISIKAKNKVTTQNTNNTKKAGGLNKKIQQTPRGQLHNETIYGSQKQYLVKEEAINAKFNAEKIATVTKPAYREALLKRLQQFDNDPKKAFTGTNALSKKPIWLDELHTKQVPEKVKTVNFETAYTIRKEVSPDLKLDKVIDNKVKEKLKERLQQFNGNAKQAFSNLDENPIWLNLVKGIAIKRVTISGVSNAEPLHDKRNKEGELLLDENGKKQPVDFVNTGNNHHVAVYRDAEGNLQEKVVSFYEAVSRRNLGLPIIDKDFKSSEGWTFLFSMKQNEYFVFPNEKTGFNPNETDLLNPENYHLISPNLFRVQKISTKNYLFNHHFETKAVDGDMLKNKKELHGITYYFIQTPAKLDKIVKVRLNHLGQIVSIGEY

SEQ ID NO: 6639 - protein, 950 aa, unidentified
  REGION 1..950: note = Description of Unknown: Cas Enzyme sequence
MKKILGLDLGTNSIGWAVVSTDDNGNPNKIEGLGSRIIPMGQELSKFEQGQAQTKNANRRIARGTRKLNKRYKQRRNKLIYILSQLAMLPEQIRMTEPFTNPLKLDRISILPIEKHQKQYSAYDLLKLRVKALNSQVTLQELGKIIYLFNQLRGYSGGGTEPEKEESPDENTENENKKSKESYIAFGNILTLSNPEKVIFNGKELNKYNISFETEDGIITGDTFLDLLKVGESLELQINKTQSKKYGVTTTFKLPQKTNWRKKMENLEKELTDLSKDWGREVHLSEYFLSILAENKWRKIRNNVILRSRYQTEFDAIWKSQSKYYSFLDNCSQEKLLEILNFLFPGKKESQQRYRQEGLAKGLKHIIRNQVIYYQRDLKDQSHLIANCRFEKGEKAIAKSHPIFQEYKIWEQINKLTINTKIEVGKNRKGETKYKYIDKPIPSLLKEWIFDELQVKKEMSFGVVINKLRKEHHLREGIDFLNGMNPKAKLKGDDTKSILKKNLGEDLWNKLGLEEKNKQIELWSILYNEKGNEYDLTSDRTKKVLEFLNKYSFNNESYDQIAIKISKIKFNRDYASLSLKAIEKILPLVKCGKYFDNQLSDSLNEKIIYLTNENVSDPFEKAAQEYLDNNIDVLIHGGIMNAYAMILVYGQHTAKEYSKQELINNYNQIHRLNLGELRNPLVEQLISETLMVVKDIWRHYGKKPDEIRIELARELKNNAERRAKIYKNNIENQKSNEEVKSILLEINQEITNANIEKFKIWASQSNIEDKYINSYKDPTKSEVEKMKLWREQGHISPYTQQPIPLSELFDRERYDIDHIIPQSRYFDDSFNNKVICEKAINREKKNRTAMEYFEAGSTIPSVLSKENFIDTVNRMYQGQGAKRKNLLATKVPEDPVARQMKETQYISVKVKEELSKIVGNDKVKTTTGGVTDYLRNQWGLTDKFKQMLRP

SEQ ID NO: 6640 - protein, 1067 aa, unidentified
  REGION 1..1067: note = Description of Unknown: Cas Enzyme sequence
MNKASDGVMLGIHLDIGHKSIGWAVNEVTTPIVFKGCGTLLFEKDGCLASARRANRRQRRHVRSIRQRIERMKQLLLHLKVLTAEELDRPGGAWPWKLAAEVLAGKRILAWQELWDVLRWYAHNRGYDGNIAWAGSKEENGEDKEERESVENASSLMKEHGTSTMAETVCAVLGVKPEGDKSSSQIRFKGKKASFPRRIVEDELRRILEAHKGKLPKVDDALIRTLLGAPAKDADAWKAVPCPALNLPRRYRGGLLMGQLVPRFDNRIIGKCPIEDKNLPSKKRPEFLEYRWAMQLANIRVLRPDEKEYSPLNAGERKALTNLLRKAGYFTKTTIKNALDSVCTHIDSNVSDMLLHPDAEKALVLYPALAAVTRGDAEKIWPVIPAMKQRLILRLLNKGKELSFGQIRDMLDDKAAFDKILGEFTGKSKAKKKNTDTKSDNPLDKKIKAVFPSGRAPYSSDVMMKAVKTVMEGGDPREEGGVLYAASKPLALSENEVDKRTNNHLVRHRLKILRRLLEDIVRDYANGEKSLIGHVTIEFNREVQEMSGKTSQDIAKEINARLRSHKKAVDYIEEKKLPVTGSLIRKVRIAQELDWTCPYTGKNYDIYALQNGSVDLDHIIPRSDRQSDSLDSLVVTFKAVNAWKSNSTAVEFIEAHEGQPVPGMPNLSILTLQGYKALVQRFQKIPVPHRSEPNERDTDDERRRANRCRRLLQKSTGKKKANRDGFTPGDLTVSSHLVSLAAGVVRDYFQDGDSCPRVISIPGRITKEVRMTHNLLGLLATVNPEVLDAENKLKTKTEIRDITNLHHAVDAVTLGIAANVIPVDGSVWGLMLKRNLRPNERAALEKTNAFIFDADGKPHLRDLDQETLDTIQACLKECRVATHIPANKGGASLEQTIWGIVCQDGDMVTLKQRTRDEKEDKISIKETTENKKKLLGVEPDGESKLQRIKGAIVINQNYGVALNPEPEVIPHHQVWQRIGKIKESNERKLPRILRNGMLIQIPQGRYKGVWKVFSVKNNANGVNLDMGKPDSIKANRVNVLLKTLIKDGMEICEGSYTGVSTHGTPSD

SEQ ID NO: 6641 - protein, 1504 aa, unidentified
  REGION 1..1504: note = Description of Unknown: Cas Enzyme sequence
MKKILGLDLGTNSIGWAYVTEGETQSESEIKQIGVRVNPLTVDEQTNFEKGKSITTNADRTLKRGARRNLDRYQLRRENLIEVLFKNNIINADTKLCEDGKQTTFQTWALRAKAATEKIELNEFARVLLAINKKRGYKSSRKTKNSEEGQPIDGMGIAKKLYEENLTPGQFVFQNLKNGKKVIPDFYRSDLQNEFDKVWNFQKQYHPEILTDEFYKELHGKGQKATSTLFWKIHQFNTADIKDIDNDLKNEQTIKLHTRDQKKLQAYKWRSDAVSKKLEKEQMAYVLTEINNNLNNSSGYLGAISDRSKKLFFNKETVGQNQYKQLLKNRHTALKNQVFYRQDYLDEFEKIWTTQAKFHSQLTDKLKEEIRDIVIFYQRKLKSQKGLISFCEFESKEIEIDGKKKTVGMRVAPKSSPLFQEFKIWQNLHNVLIKKAGSKKRTIKKENQPSLFEEEKEIFELDLAAKNQIFEELNIKGNLKANQIIDILGYKPKDWEMNYTQLEGNRTNQALYNAYLKILEIEGYNEDLLKLSDKDDINIEELKTPASEIKSMVKAIFKVLEINTEILEFDAELDGKDFENQVSYQLWHLLYSAEDDTKKYSQEDILLYGNDNIGLKKQLCSKFGFKPDHAKILVNVAFQDDYGSLSTKAMRRIYTYIKENKYSDACAYVAADYKRLSQKDDDNFDKLVKKYRHSKWVDKAENENRILKPKLDLLPKNSLRNPVVEKILNQMVNVINTLIEKENDKLANEGKARDFQFDEIRIELSRELKKNAAERAEMTTNINAAKIAHEKIVKLLQAEFGLANPTRNDIVRYKLYEELKNNGYKDLYTDTYIPREILFSKQVDIEHIIPQSRLFDDSFSNKTVVYRKDNLEKGNQTAIEYIENKFGETGLTAYQERIEALHKLWNKNNPENGISKAKYQKLLKRSSEIGEGFIERDLRDSQYIAKKAKEMLFGITRSVVSTSGQITDRLREDWDLVNIMKELNLPKYRALGLTEMEERKYEQKVEVIKDWTKRNDHRHHAMDALTIAFTKRSFIQYLNNLNARTEEGGQNRIKNIKGTNELKISTKDVKGIEAKETIIKIDDQGNKKRVFKDPIANFRQVAKEHLENVIVSHKAKNKVVTKNINKAKNNVTSVVKDKDGNNKTIKGQVVLTPRGQLHKETVYGKYQYYEQKEEKIGAKFDKATIEKVGNPLFKKLLLQRLEENGNDPKKAFTGKNTLEKTPIYLNAEKTEELPEKVKLVWLEEDFSQRIEVISLTKDGNKKRTKESAEKKINKVLDKKVQEVLLDRLRMFDNDPTKAFSDIDKNPIWLNKEKEISIKRVAISGVSNAEALHYKKDHFGNAILDRNGKEIPVDYVQTGNNHHVAVYRDEKGNLQENVVSFYEAVARVNLGFDIIDKTYKQSEGWQFLFSMKQNELFVFPNEKTGFNPAEIDLLDPKNKKQISPNLFIVQTISVVKYGNNTVRDFKFRHHLETTKEDKRELYGTTYHQIKSLAPLDKIIKVRTNH

SEQ ID NO: 6642 - protein, 1381 aa, unidentified
  REGION 1..1381: note = Description of Unknown: Cas Enzyme sequence
MKKILGLDLGTNSIGWALVNEAETADEKSSIIKLGVRVNPLTVDEQQNFEKGKSITTNADRTLKRSMRRNLQRYKLRRENLISILTEHNLISESTILSENGNSTTFETYRLRAKAATEEISLEQFARVLITINKKRGYKSSRKAKGTDEGELIDGMEVAKKMYEENLTPGQLCLKILETGKRNLPVFYRSDLQSEFDLIWNKQKEFYTDILTNELKESLKGKNEKQTWAICQNPFKIVGIKRTTKGEELKKENFSWRVKAIKEKIDLEELAVVLQKINGQIKSSSGYLGEISDRSKELYFTKQTVGQYQMAILAKNPNASLRNMVFYRQDYLDEFEKIWETQSQYHKELTTELKKEIRDVVIFFQRRLKSQKGLISFCELENQQKSVIVDGKHKTITIGRKVCPKSSPLFQEFKIWQILNNLEITNKISGEKILLEKEEKDILFLELSIKEKLSKDEVLKLLFNNYKELDLNYKSVEGNKTQAALFTAYQQIIEASGHGENDFSKMKYADVIEIVEGVFTSLGFNTEILKFNADLAVNELEKQHHFQLWHLLYSYEGDNSNTGTQKLIEKISAKFGFDKEYASIISKISFQDDYGSLSTKAISKILPYLKDGDEYSKACFHAGYNHSKSSLTREEIENKILKDKLDILKKNSLRNPVVEKILNQMINVVNAVVETFGKPDEIRIELARELKKSAKEREDMTKAINESSAAHEKIKLLLQKEFGLRHVSKNDIIRYKLYSELEPRGFKTLYSNTYISPEKLFSKEFDIEHIIPQSRLFDDSFSNKTIESRSANIEKGNETAFDYIAAKYDDNYLQDYLSNIEVLFKNGYISKAKYNKLKMRGKDIPTDFINRDLRDTQYIARKAKSILEELVRNVISTSGSITDRLREDWQLIDVMQELNWDKYDKLGLTEIIEGRDGQRIRRIKEWTKRNDHRHHAMDALTIAFTKPSYIQYLNNMNARSDKSSSIYGIEQKELFRDKLGKLRFKPPMEIDLFRTESKKHLQNTLISIKAKNKVVTSNINITKKPGPDNKRKQLTPRGQLHNETVYGQIHQYVTKEEKIGAQFSAEYIQHVAKKIYRDALLIRLTENNNDPKAAFTGKNSLSKNPIFIDEAHSMTVPEKVKLVFKEPIFTIRKEISADLKIDKVIDVKIRKILEARLSEFNNDAKKAFSNLDENPIWLNKEKGIAIKRVTITGVSNAIALHDKKDHLRKPIHNANGKKQPVDFVSTSNNHHVAIYKDQNGNLQEKVVSFFEATTRANQGLPIIDKEHNITEGWKFLFSMKQNEYFVFPNESTGFNPSEMDLLDPDNYHLISPNLFRVQKISTKNYVFNHHLETKAVDGDLLKNKKTLHNITHNFVQTPQKLNGLIKVRINHIGQVVSVGEY

SEQ ID NO: 6643 - protein, 1462 aa, unidentified
  REGION 1..1462: note = Description of Unknown: Cas Enzyme sequence
MKKILGLDLGTNSIGWALIDSDDKKILGMGSRIIPMTQDVLDIFSGGKPLETQTAARTHFRGVRRIRERQLLRRQRLHRVLNVLGFLPEHFAHGIDFKKHLGQFIDGTEPKLAYKNKEFIFKDSFEEMLQEFKQAQPQLFYTKTNGDKTKIPFDWTLYYLRNKALNRKIYKEELAWIILNFNQKRGYYQLRGEEEVENLNKLVEYHSLKIVDVVADEKPNSKGDIWYSLYLENGWIYRRSSKTPLNDWKDKVRDFIVTTDLNDDGTVKVDKEGNEKRSFRAPGENDWTLLKKKTEQEILLSNKTIGSFIYESLLAKPNQKIRGKLVRTVERKFYKTELKAILQKQVELQPELFSTELYNDCVRELYRNNEMHQLSLSQRDFVHLFVELQIFYQRPLRSQKSAIGNCTLEKRPTTDVNGNILRDEKGKPVLIPIKVIPKSHPLYQEFRLWQWISNLRIYRKADDNDVTADFIKGSEDIVNLFEFLMTQKEAGHKDILNHLLTPILKEKYPNVKPSVFNRELEKEVSKYRWNYVFDDSKEKEDEKSKKYPCNTTGYEIRRRLEKVINVPSNFLTDQAEQHLWHIIYSVTDKNEFKSALGKYALKHSLDVDSFVSNFEKFPPFESEYGAYSEKAIKKFLPLLRMGKYWSWQAIDPKTKSRIDKILTGEYDETIKHRVREKAILLTEHNHFQGLPIWLASYIIYDRHSEADIAGKWNSAADLDQYLKDFKQHSLRNPIVEQVITETLRVVRDIWQFYGHSAMDYFSEIHVELGREMKNTAQDRKSMTDYINNNEATNLRIKALLLELKENSDGKLQVADVRPYSPIQQDALRIYEEGVLNSKIELPEDILKISKTAQPSKAELQRYKLWLEQKYRSPYTGQSIPLSRLFTEDYQIEHIIPKSRYFDDSFNNKVICESAVNQLKDKQLGLEFIQAHHGEKVECSMGGVVEIFTEEAYLTFVKEHYAKNRTKRQNLLLDEIPEKMIARQMNDTRYISKFISATLSNIVREEKEDDGINSKNLIPGNGKITTLLKKDWGLDAVWNDLILPRFERMNQLTNSNAFTYWNEQYQKFVPIDSSPFDFKRIEKKRIDHRHHAMDALVIACMSRDHVNLLNNQSAKSEKSRYDLQNKLRNKVKESWIDRRTNELIERDVFKEFKKPWENFTIDAKNAIESIVVSFKQNHRVINKATNHYEKWVDKNGIKVKGTVEQKGINWAVRKPLHKETVSGKVELSRIKVAKGKILTATRKDVDSSFDAKTIESITDTGIQKILRNYLAAKNDNPELAFSPEGLEDLNANIKQYNGGKAHQPIRKVRIFEQGSKFSLGESGNKKQKYVEAAKGTNLYFAVHIADDGKRTYDTIPLNIVIERLKQGLPPVELKGEDDFYLMPNDLIYVAYEDELNIDYQLDKKKNIFKIVSFTGNRLYCIPHSVASTIVNKFEFTQLNKIEFTKEKDLMIKLKIDRIGNVSI

SEQ ID NO: 6644 - protein, 1414 aa, unidentified
  REGION 1..1414: note = Description of Unknown: Cas Enzyme sequence
MGKYEGDYYIGLDMGTGSVGWAVTDTSYHILRAKGKDMWGARMFDEASTAVERRTNRINRRRRAREKARISMLQELLEDEIKKVDPGFYHRLEESKYWLSDRTGDNEGQKYAIFAKGTSGDKEYTDADYYKDYPTIFHLRRELIRSTEAHDVRLLYLALLNMFKHRGHFLNETLGIDGGAGIDDAWDAFIDAYSKLETGDDEEATVGSNVFESVDRNLFVKTILKKGVSKSQIREDALKVLKISKKNKKEYEILSLICGLSGNLENIFGKESLESITEKSKKTINFRKSSYEEDIAAVQDVLSEENMSFILALKEVHDVLLLDQIMQGHKFLCDARVEMYEQHKEDLMMLKKVIKRLVKCEKLSKQTYSNLFRKMQDGNYSSYVGSTNSDKENGKVRRYVADHATAKKNFEPDELYKTIKGLLTPYKEDDDVANILAKIESESFLRKQLTSSNGVIPNQVYVREMKEILKNAEQYIPSLKEKDDSGLTKSEKILKLFSFHMPYYVGPVGGLTKNNGNKWAVRISDKPITPWNINDVIDMGKTRQAFIENLIRHCTYLKGEKVLPKKSLIYEKYMVLNELNNLTIAGEPITVAEKQDIYDTLFMKGKTVTAKQICDYFKSRGKIIDKSLIGGIEDRFQNSLSTIGKFNGIFETPYLDRKHICLIEDIVLLGTIYGDSKKQFREMIQTKYGKANETDIILSEKQIQRIAGFKFSDWGRFSRAFLEMEGASRDDGVVRTIINALWETNDNLMQILSADKYTYSDELQDIVKKEEKKLSDWSIDDLSDMYLSAPVKRMVWQTLRILNEIEDVMGRPPKRVFVEMTRENREKGVRTKSRKSQLIELYKNPELKKEQRNWLSELESHTEQEFRIKKLYLYYCQMGRCMYTNEPIDLEQLLTDNNKYDIDHIYPRHFVKDDSIENNLVLVKKEKNAHKSDEFPIEASIQQKCYGLWKSLFDKKLISKEKFERLTRKTGFSLDEKVGFVQRQLVETGQGTKAITQILQESLPESSDVVFSKAGVVSQFRHDFDIYKCRSVNDFHHAQDAYLNIVAGNVYFTKFTKNPRNFIKEAMVNSKDEKYQYHLSKMYEHSVQRGNEVAWIAEKDGHNNTINVVKKQVFKTTPIISRRSYVATGAITNKETIWGKQKTEGSAAGVYFPMKTADKKLADISKYGGKSGVSTGAYSLISYHEGEKEIRSIEPIPSFLMKDGVLDDKGKEKFIEYCSLIISQNSKKKCSEFKIIYPVIKFNSLMRIDGYYYYIGGKTDNSYYLYNAVPLKLSAIDMQYVKKIEKAIKNNDYCEMDNLGELFITKEKNIVFFETIINKICHGIYLNRKGKVFMNIANSKEQFDSLNISEQCNIIQKIVLLFASNTQTVDLSPIGKTHEGKVTLSKYIESLKECVLINQSVTGLFANEVDLLHI

SEQ ID NO: 6645 - protein, 1046 aa, unidentified
  REGION 1..1046: note = Description of Unknown: Cas Enzyme sequence
MDYIMGLDVGATSLGWCILQLDKNERPVKLERMGVRIFSDGRDSKSQEPLSVTRRNARVARKRRDRLLRRKKSLMKLFIEYGIWPAAEAERKQLEITTDPYEIRYRALYEKVALAELGRALFHINQRRGFQSNLKLNKKEKNKSALKDAIKVLRARLEEGNYETIGEYLYKMNPSDVHPGKRQPLRIRVTQEGNKATYNFYANRDLYKHEVDKLLKKQQAFHPSLTDELCNKIKEIIFYQRPLKAQPVGKCCFESGETRAPIASPLYQKFRFLQQLNILAPDDLINGESLTDAQRSVIKNLMLKQKTVKFDAIRKKIKMPVTFNLEDERRKELNGDETSAVLSKSALLGSGWHTLDDDQKEEIVNVLLNEHDEQKVANYLLSKFNLSNEQLDNIIDAELPDGYGSLSIKALRKIVPHLECGEDYSKACTLAGYNHSKPEGDNTWDTLPYYGVILEKEVIGSNRSQEEDPDKLPKPEIADYERYWGKINNPTVHIGLNQIRLLVNELIKTYGKPTRIAVEFARELKMSHKQKEILSKEQSENKNRNAHINEMLQNAGIKENYENRMIVKIWQDQARNPLERMCPFCGKSISFEQLFGGEFEIEHLLPFSRSYNDGHNNKVISCRSCNRIKTNKTPYEAFGANPEKWNDILERIKSLPMRKQRFFKEDALQEEEEIIARLLNDTKYLARSAKKYLAAICQDKKINAIPGQLTAQLREAWGLNTILSDSHEKNRTDHRHHAIDAFVVACTSRATLQAISVASEKGWVEKRRLFIGAPLPFAGFSNAVMQDSVNKIVVSHKPDHGNALRAINENKTVAALHEDTSYGFVKDSDKRGYAIFATRKPLIDLTEDKKIKEIASNRIRSLVAINLEGITNEKDREKILQDISRKHNIRNVRIHEQKSKETMAPIKDRKNGRIYRYVAFGGNYCAEIYQPNRGRYKNKWQVEVIPYYYAHQKDFVPNWRKAEPEAKLIMRLFKDDLVAWNVGDDRAIMRVRKFDRRPRLYFEPHSVAKSEKAPKETSALQLQRRNARKVKVDILGRVFDSHYPRG

SEQ ID NO: 6646 - protein, 1141 aa, unidentified
  REGION 1..1141: note = Description of Unknown: Cas Enzyme sequence
MNYLGIDVGSNSVGSAWVDLNNKQIYMGVSVFPAGVEETDEKRGAPKNQARRETRGQRKALARKAIAKAKLRKFLMDAGWMPSEKELIAKWETREDDNPWLLRRKGLDEPLTPYEFGRILLHMLNGRGAWWSDILEEEEIEGQDKEEKILKEKTKATKQLMKEMKARFFGEFMAFQYEKRKVENKNDKGTFRRTRIRNHTNALGEVEYEFCADRPMILQEFLRLWDTQKKCNSPLSAQLTDERKKQLFNPERTKTWKCQGLIFGQRNTYWNITTLGRCDLEPTDRCCPKCDMYAQKFLVLQDVNNIRITKCGEEQRPLKKEEREKVIAVLCQLKTAKPETIRKALKINKKEDLNHYYLNTDKMNNINTNWFYREVIINAIGEEFWGKLDDKTKDTINTAVVKLNPDTEKDRIKFKAGCTVWWSLNEEQAEKLFQTWLKRPKTTNRINLSQKAVRNLLPYMREGYTVTEARQLFAEDATNGASDLQRKRYSLDISFPNRKIRHFVEKHPDLLPPAPKEISNPVVRKTINEVRRHIVEHMRQHGRKPDRVVVELAREARQTAKVIGDKINKDAAIQRYKDKITKEMFPQYFEGKSKAQQARILDRIRLCFQQKGACAYCNGPNSISPTNAAIGDNLQIDHIIPRSRGGHNGFSNKVLCHITCNQGKKNQTPLEWLGKEKFELLEQKFSHLKTKQSADANNPDMLDRNKWENLHAKVKDLQGFTEAQLKATSYAATQITEWIKNILYDGDTGERHVYATNGQYTSLLRNDWGLHFNGKTEDEEQKKKDRSDHRHHAVDALVIAMTGPERIKEVAGIWEKYELDKDEKPTWNKRDPIPTPWGDSTSFHNQVKEIYDLLIVSHKPQKRKISGALHKDSLYGYIPDSPDKYVKSVSSVNLSPNHLRVPDEWELLKEKYEQCCDKKSKNIIRRQMLNTKDVMPAKSGIVRDRWLREQIRQCLRNNGIDPDNFKPLEIKTLIKEGKFVINNIEVKRVRILWTLNEIKVIPRKRYNPITRKKEYLLGDGNKKSPRVYQTQNNHHIEIRQDNKGNWSGKVVTNFDAVLRLKPAKSSRLSSASAVDRTDNKDGKFVMSLSIGEMVKMKHPVTQIPGYFVVFKIDSTKTIHLAPHNDAGRDKEMANCPAREDI

SEQ ID NO: 6647 - protein, 950 aa, unidentified
  REGION 1..950: note = Description of Unknown: Cas Enzyme sequence
MKLLGLDIGTNSVGSAWVDTDTQSIQMGVSVFPAGVEESDDKRGAPKNQARRAYRSQRRSIARRARRKRDMRTWLLGNRWMPVEPDARKRWLEMNPWILRAEGLERELSILEFGRILLHMAQRRGAYGFDLEEDDEEAGKIKEAVDRTRREMKEQDAQTFGRFIAAKFNQRRRKVGTKGKEVRQPVRNCMNAAKEPNYEFCVDRALLRDEFLTLWERQRSYHGELAKQLTDGRRAELDDPASDRVWRCKGILFGQRATYWDSGVLGRCDLEPADLKCPRPDMAAQEFLVYETVNNLTIIPPGEAKRALNDQERAAVVGVLRKQKTASAATVRRALGIHKGPNKTLYALSLDADPKRALNTDWFYREIVCNAVGESEWAAMSTEHRESINRALLKFHPKEQSDRMRLEKGCRVWWGLSEDQAKALVEAWQHRPRTDDRVQLSRRAILNLLPYMRAEGLTVNEARKRFAEDPNSGATNEQRQRYGFGGTLPNRAIRQFQGKHPGLLPPAPKALSNPVVRKAIHEVRRHVQTYLRQFGRPDRIIIELARDARLPAKVRDRQLAENRAREKQYNEIKEQFRLGRLTKTEERKAVKRVLLCREQKQQCAYCGNGNNTITEHAAAEGSGVELDHIIPQSRGGDSGLNNLVLCHTACNRGKTNRTPKEWLTQEQFAGLEQRLRHLKNANPPKWENLHKDVADIQGFAESQLTDTAYAARQVADWLRQVLYDGEIKGKRHVFTTKGRYTSWLRRDWGLYSDRGASGQGTKNRGDHREHALDAFAVALSGPEQLQDLAHAVEAFEYAQSEGSAVARREPLLPPWADRETFRAQAMTAFEDLIVSHRPSQRKITGSFHNDTMYGPILDAQGKLTRYATIRKAAIDLTPNHLRVPKGWEELRRQLDAAPTARARKTIRQKMLAMEDEKPTKSGIVRDRWFREELRQCLRDNGLDPDGFTPK

SEQ ID NO: 6648 - protein, 1726 aa, unidentified
  REGION 1..1726: note = Description of Unknown: Cas Enzyme sequence
MKKILGLDLGTNSIGWALVEIDHENKIVKILGLGSRILTMDAAEIAKFESGTKTESGAAKRTTLRSPRKLNERYLLRRDRLHCVLNLLNTLPVHYKLSIEFENPKGKRSGKFKKGTEEKLAYYKDDSGKFQFLFKDAYHQMENDFRKKYPEMFYQKRNGNQTKIPYDWTLYYLRHKAVTDKDFELTKEQLAWITLSFNQKRGYEKVIGQDEKVQKEGELTDSFVGKVQSINKIENEDAYEIILVDNNNDAIELFRYKEETKIPITEIGDLKEVEIVSKYDDEGTIDSKKTEYIINEVREFLITDVRNTGRKIKENFVFEVELETGWIKEQQSKFTPKWKDTKRDFIIKTKYDERGNRILKGADKGRNINIPKEEDWTLMKLKTETSLTSFNTKNKTKGVASFVYYNLLQNPKQKIKADLITVIERDYYRDELDVIYKNQEQFHPELKNRNLYEQAIQLLYPNNNSHQKTIKELDFNYLIKEDILLYQRDLKSKKSLIADCVYEKENYERTDEKTGKKYKNPLKAIHKANPLYQEFRLWQFIKRLKIIKKEDIVNDEIKINNDVTSQLLTNNIKEELYTFLNDKENATEKDILGFLNKKHKDLEVNSENYKWNFASEREPCNPTRYNFILRTKRIKGFEYRAFLTPENEYSLWHFFYSVKKKDEFTKGLGNIINRLLDKSGLSKEFHADLVKNFSSFGGYTNDYGTYSEKAIKKMLPFLRLGKYWNEKEVENILSKANQEVKQKVLDIEEINGELKDFQGLWVSSACYLVYGRYSEVGEVQFWQSPYDIENYLKNEFRQHSLNNPTVEKILVETLHVVKDIWKYYGEEIGTDEEGRVVYKKLFDRIHIELGREMKKNNKQKEKDDKNNKENRKANERIVELLRELKKTNTSLQEKSPFQQEKLRILEEGLLSSIEYDKDTTEYKLSNGKITKKEIKDITSKELSKISRSDFERYKLWLDQRYQSPYTGKFIKLSDLFDRKKYEIEHVFPQERITLNALYNKVICETEINKEKKASTGYGFITNAKSKKVFCAAHDTLVEILSIDSYEELVKSNFTGRKRDILLSKEIPQEFTNSQLNNSQYISKMAMKLLSNIVREENDDDNYRSKNVLATNGTITSTLKKHWQLNDAWNEIISPRFKRLNELTNSNLFGDYREINGHQVFINTVPEEANKNFDPKRIDHRHHALDALIIALTTENHVQYLNNISSQEKNDEEKLKTRKGIKFQLTNSRKGFNDEKEWYFLPPAQIKTKDGIDVFEYQFGETKSKVFKDIAQNALENTIASFKQKNRVIRQRWNKYFKPIDGKLKVETQKGLKEVVNYNVRKRLHEDTFYGKVKLQNKIITISLEKALIEKFDLVDAAIAKEIENLIQNEGTSTQKIIETLKIKYPKVNVYEKYVATRFGNDLAAFSIIPYSKIRIDIKKAICEKYDIIDENLRQKMKELLYQNKTIEEILLITGEVKVDVFDNKINKAIETITDSGIQKILFNHLENYKWRTDEDNQIIAPQTLAFSQDGLIDLNNNIVKLNNGKFHHPIYKVRTSDAMGTKFSISEEGQKSTKYVVTAAGSNAFCGFYQNGTDRKYYIPTLRETVESLKQGLEPCLATHPDDPNFKLIFVLNPSDLVYVPAEEEIENPNLVDFSKIKKEQMNRIYKFTDGSGIDINFISVNIATVLFNLNKEKQKKAGIDLPIQNEIGVGSQGSKNQNTLEGIQIKSVCWKIEVNRLGNITKVIQ

SEQ ID NO: 6649 - protein, 1447 aa, unidentified
  REGION 1..1447: note = Description of Unknown: Cas Enzyme sequence
MKKILGLDLGTNSIGWAVVDEATEENEKSSIIKLGVRVNPLTVDEQQNFEKGKSITTNADRTLKRSMRRNLQRYKLRREALIEILKKNLFITDDTILSETGNRTTFETYHLRAKAATEEITLEQFSRVLLQINKKRGYKSSRKVKGTEDGTLIDGMEVAKKLYNENLTPGQYCLQLIQTGKKYFPDFYRSDLQAEFDKIWVKQKAFYPEILTGKLHEELKGKKRDAVYAICAKHFIWEETHTVWNEIEARNEQVIKEHTIVGFKRNGNTNDQKIENLHWRVKGLTEKLQLEELVVVLQEINTKINGSSGYLGDISDRSKELYFNNQTVGQYQMAVLAENPNVSLRNMVFYRQDYMDEFDKIWETQKQFHPELNEDLKHEIRDIVIFYQRRLKSQKGLISFCEFESRQVEVDIDGKKKIKTVGNRVIPRSSPLFQEFKIWQVLNNMEVYGKGKQSRRNTRNSQITLQIDNFERRALNQEEKELLAKELFVRKKMSKTDVLKLLFEKYQEFDLNFKTIDGNRTGFALFQAYSKIIEFSGHEPIDFKKSTDDILKYVIEIFQAFSWNTDILSFNSDKELDKQPYYKLWHLLYSFESDNSNTGNQNLVNKLMLDYGFDMDSAKILANVTFLDDYGSLSAKAIRKILPYLKEGNGYDVACLYAGYGKHSKQSLNKEEIATKILKDKMDILPKNSLRNPVVEKILNQMVNVINTIIDTYGKPDEIRVELARELKKNAKEREELTKSVSEFTKAHEEIAKILTKPLAEGGQFGLSHVSRTDIIRYKLYQELKAIGYHTLYSNTYISPAKLFTGEFDIEHIIPQARLFDDSFSNKTLETRDVNIRKGNRTALDYVKEEYDEAGLQDYLNRIEILYNEKSRENLDEDVKSANTISKSKYNKLKMEEKDIPDGFIERDLRNTQYIAKKALSMLGEITRRVVATSGSITDELREDWQLVNVMQELNWDKYQKLGLTEIIEVEDKQNEGRVHKIYRIKDWKKRNDHRHHAMDALTVAFTKDVFIQYFNNKNASFKANSNEYAIKNKYFENGKAIPPMPINEFRAEAKYHLENTLISIKAKNKVITTNINTTKKRGGTNKKVQQTPRGQLHLETIYGSQKQYVTKEEKIGTTFDETKILTVTNPKYRDALLKRLYENDGDPKKAFSGKNSLSKVPVFIDDAQMEQLPEKVKTVNLETIYTIRKEVSPDLKIDKVVDVGVKRILENRLKEYNNDAKKAFSNLNENPIWLNKEKGIAIKRVTITGIAKGEPLHDKKDKDGKLLFDNEEKKIPVDFVNTGNNHHVAVYRKPIVDKNGEIVIDDQGNQQYELEENVVSFYEAVTRKNLGQPIIDKEYKQSEGWQFLFSMKQNEYFVFPNKETDFDPNEIDLLNSENYALISPNLFRVQKIATKDYFFRHHLETTVEDNSKSKGLTWKRCGLSAIEGIIKVRVNHIGQIVSIGEY

SEQ ID NO: 6650 - protein, 1451 aa, unidentified
  REGION 1..1451: note = Description of Unknown: Cas Enzyme sequence
MKKILGLDLGTNSIGWALIDQDEKRILGLGSRIIPMGTDKQDYEKGVGISKNADRRTKRTIRKMNKRYKLRRNKLLYILHELEMLPEQFQFKNGIPEANKIQVLELHPIKKGTLQLDSLQHYQLKVNALKDSISLAELGKVLYSFNQLRGYSGGNNDEDSKKKKDDESDDENESVKRYDVFNQKVIIQKVEQSETKFQGRGKNKGQEFNKFDVTILLNDEELKGETELQNLSEKINQEEELEIRIRRNKKGETTSIVFALPQKTNWRKQMEKTEEDLKQYNLYISQLILQDLEQNKWTKVRNRVFLRHRYQAEFDAIWDTQSKVHPILNNCPIETIEKIANYIFPGKSKTQENLRQTAIKNGLKYIIKEQVIYYQRPLKQQTELISKCQFEKEEQVLSNTHPLFQEFRCWKQINNLYITSKQEVYDEKKKKKVFKYTNRFLNTDEKQKIYDKLQIQKQLGFGEVAKIVNLKNEITEYLNGLNVKAKLIGCDTQITIKKILGEYFDTIYSRDNGIIEKIWKAIFDNANNGSEYDPKSIKVSSIKELLKPLNDETLETELALKFAQNVKFPRKYAAFSEKAINKILPLMQINPINIAKEIQAKFDDIEDGFERLNNNQIVNTETGEIIENLEDYVIDFIKNNPNILKTGGIMETFAVSLVYGKHTAEKISAQFKDYHEILRVDRNLRNPIVEQVANETMQVVKAIWKQYKFNPEELEIRVELARDLKNSSKERDKIYKSQIKSQKINETIKKKLIELKQELSPKNIELYKLWSSQNIEAFPAPKKATEPTKDEIEKLRLWEEQGCISPYTMKPIPLSMLFSPERLYDIDHIIPKSRFFDDSASNKVVCETNINEEKSNRTAWEYISQQNSTFKICSIESYIEHINRIFYGKKKKNLLLEKIPTNPVERQLKDTQYISIAVKNELAKIVGSDHVKTSTGEVTSFLRSRWGLKKLFMELTESRFRQMELWDWNKEINQPNSEWVKKYFDKEKGKHIYEIKNWSKRYDNRHHAIDALVVALTEQSHIQRLNNLNKYLQDELAKRKDEFKLEVKEDETILEAFFNLEEKRREEIQRQIESSRYFEKPFEDLVNQAKTLLESMIVSIKPKDKLGIKKDDSGKIQLKIKGALHQETNYGKTKDPKTGLLRDTKTVSISNLKAKDISQIIDQAVLAKEIDKHRKNYDSMKEAFTGEGLKTFNENRFQTKSSDKLKPPVYKVKVWYSSKETNESTLQRLYSDNNKLSVITGDNYLFIVMEKAGKRIFDIASLYDSADIAKRALRENYENYKERICEDYKLKHKENPEKVLFTLKQNDLVYHPESEDDPLLNFNNDEIKEWLNNIENKSKFCKRVYKVVMFTGKDCKFIPHNYANAITVKKELTEEQLNDIRYRNEGKKSIPKNELNFVEFGSYRDCSPYPIGEAFIKNMTASNKIEKQELKKIQDTCIKLEADWLGNISKA

SEQ ID NO: 6651 - protein, 1271 aa, unidentified
  REGION 1..1271: note = Description of Unknown: Cas Enzyme sequence
MKRILGLDLGSASIGWALIEENNNKTTIVGLGSRIIPYEGTEGKDFAKGTGESRNSLRTKARTARKGYDRYQLRRKYLVDALVKANMFPDETLKNLPKIELWALRNKAVHSQITLKELGRLLLWLNQKRGYKSSRSDANLGKKDTEYVATVKSRHENIKELNLTIGQYFYQELSNDPFFKVKENIFPREAYIEEFDAIWKEQEKHYSELSNCPKEILTQIANSLFKGANQEYLRQEIVNGGLCHTIRNMIIYNQRPLKSQKGLVSVCEFEGFWRTGKDGKEYFVGPKVAPKSSPIYQLSKMWESVNNIKVGSRTGGDIVITKEQKQAIFHHLDNNEKLTVTDLLKILQLDKKNCYINKQIEKGLVGNITKHAIRQCLGDSAQYNHLLSLNLKIIENDKKGYLVDKKTGEILNEKSTQHIDANIEYEPLYQLWHTIYSIQDKQECSNALQAKFRIEPTVADKLADIDFGKHAFGNKSAKAIRKILPYLMEGDKYSEAMSYAGYEHSDSLTKDENLKRKLLDSLKPIEKNSLRQPIVEKILNQMVNVVNAIIEKHGKPDEIRVELARELKQSKEERNDTDKAMSKRQRENENITKRLAEYGLKATRNNIIKWRLYEEIDNEEKKLNAVCIYCGQPISLTEAIKGNDVDIEHIIPKSKLFDDSQSNKTLAHRHCNKNKNDMTAYDFMKSKPTEVFEAYIERVNSLYANYVINKAKRDKLLMPEDKIPDNFIDRQLRESQYIARKSREILQTICHNVWATSGTITAELRHLWGWDDVTMNLQFEKYKQLGLTEMVEWESEHGKNKHKKEVISGWTKRDDHRHHAIDALTIACTKQGYIQRFNTLSAEKTREDMKNAVEERSVVFNEKRSLLEKYIISEQPISVADVENAVANILISFKSGKKVAVVGTRKAGNRGNKKVVQTGIIVPRGALSEDSVYGKIKTIDEKKPLKYIFENSQLILKPLIKQLVEERIEAHKGDVKKAIASLKKEPIYLDKENEIVLEYASCYKTEYVIKYSVDVNFNKVDKVIDSKIKDILQQRLDKFGGKAKEAFKDVQLGDKSIIKWYEDEGLERPIKSVRCFTGLSAVVPVKKDEEGKDIGFVKPGNNHHIAIYTDNDGNKFEHVCTFWHAVERKKYGIPVIIKDASEVWDKIQLQPEGTYPESFLEKLPDVQWNLQLSMQQNEMFVLGMANEDIQIAIETEDYKTISDKLYRVQKMSIIPSSGQLDITFRHHLETQLTDDANAKSSKRFLKAQSVNSLFSLNPYKLKIDRLGNIAI

SEQ ID NO: 6652 - protein, 930 aa, unidentified
  REGION 1..930: note = Description of Unknown: Cas Enzyme sequence
MTKILGLDLGTNSIGWALRVNDSYERKRYYSLYKSKRYDTVQQNTNSIEISLDNEIVDYGVVIFKKGVGELKKQEFSLAADRRIHRSKRRLYNAKRYRKWELLKVLIENGMCPLTIEELRLWSIGSWKEINGRWKNLGRIYPINNENFQQWLAFDPAIFGVKGLSENGKSIRKNPYDIRCELIENEELDINLKKIKTGRALYHLAQRRGFKSSRKNGQSAYAKNEDIEKRKTENPHFQIAALAKEKLDNETRFRSSGVIQRKYFEDEFYAICKKQRLDDELSSKLHRAIYFVRPLRSQKGLVGNCTLEKGNPRIPISHPKFEEFRALQFINNIKWRKEGEKEYQEIPLSLKKRIFEDLFFKRKKTGVIDERSSFKFDEIIKYYSENATYKFNFRNLPNVSTCPTIASLMNVFANDWTEKFIQKDDSYGINWDGLVIKYKTQDYKGSCKRLKRKIINGTVTYIAVPLKDEKILKIDEIWHLLFDFLQTNDKQEDLEKFSKEVLGFGEDKAKAFSNIDIPQGYGSLSYKAISKILPFLQSGYIYSEAVLFANLKNVLGNQFEEKQEDAKELIAKAIKETAQTKEKLNIVNGLIQKYFADAETSHAKGVDDTIKELAWQDTLDRLKNYFGQADWNKKPEAAREKLTQEVFDLYLRFLNGEQTKEEKSSAKDNHVPEIDYYKLPRLDEAIKCSLKDEYNVSDKDLKHLYHPSDIEMYPVSKTEKELIINESITAIKLLESPQPPSKGWKNPMAMRTLHELRHLLNYLLKIGKIDKDTKIVVEMARELNDANKRWAIQTYQRYREDENKEFAKAIVGVVKEKYPNLNENDIENINKIRLWWEQVENNEEVYRQIKALKEDVEKYRLWKEQDCVCMYTGKLINITNLFDGTQTQLMHTFPASISFDSSLANLTVGDAYYNNEIQGNKIPTQLPNYK

SEQ ID NO: 6653 - protein, 1124 aa, unidentified
  REGION 1..1124: note = Description of Unknown: Cas Enzyme sequence
MTKKILGLDLGTNSIGWALIEVDSEKKLLKILGLGSRIIPMDGQELSKFNAGQKITSAAGNRTALHRARITKERYLIRRDRLHLVLNFLEALPEHYKIEIDFERNGKKCGKFKDETEPKIAYLPIKNNENKQAFYYEDAFEEMVKDLKKVNPEIANIKGKRVPKDWTIYYLRHKALKEKISLEELAWVLLSYNQKRGAELDEVENDNEKSDEIKELLDLKVISSEKKSDKNGTFYEITLNDAENFTYKEYTNKQLTFKDEIKEVLKISKLDDAGNIEKGKVVYQISDLYNLTLSKIEHKETEDKKFRHIYYFIYSNGWIKELKKEKPNKSYHDLASKIENEGKIVQDLFVISNKYNYKGEPETLIPNIKTPDFNSEGSKDWTLLKKKTEKDAIKFNIEKGYVNKETNLVNYFISPKIYDVLKNDAKTGNRTKIIGGLFQTIDRKFYREELQQIITTQRQYHKTLKDQSVFEQCVKLLYPHNEEHAKALFQNKNTIVHLLVEDILLYQRPLRPKKSEIEDCKYEIDYWKEDVDTTTGEVTERPIYKKAVSTSHPLFQEFRIWDKIHNIRLIQLEAIDAEGKTETNVDITSQYFKPEDYQALFKHFNKRSTVAIDDFLDFCKKQFGLDVGKKGERKILWNFPEEEIFKGNETRKIFENKFKQSGFSEFDSFMTQEKEIELWHYLYSVSPKERTKQSETNDKSHPKFGRTSIQNFFRKYLEGQKIEEKNFESLCRSFETFPKFPSKYAAYSSKSLRKLLSVMRVEDIFLTKEKFEESWQKKYLQRANTILEKCRIIDWTAKDIDFSKSIEITVDTKRGELPYPKGLLNTFKDFTKKEDFRFLNLTQASYFIYGRHSELAQAKYWDTPQKIRDEINKELKHHSLNNPVAEKVLKETMKVVADIWEYYGESAKSFFSEIHLEVARELQKSNNEKKEIADRQKSSRTDNERLRSILEDFLSQSPYNAKKENQDHFERLKIVEDGAKARSYSEKNFYDNNSGMFDKKEIEGILKKQKISKTDFEKYKLWIEQGYRSPYTGEMIKLTDLFNGNKYNIDHILPRASVTNDSLNNKVVCEAFLNRFKSDKTAREFIAQFGGKSHTIFDENLNKKITFELVNEDTYVSLVKTQYR

SEQ ID NO: 6654 - protein, 1012 aa, unidentified
  REGION 1..1012: note = Description of Unknown: Cas Enzyme sequence
MTKILGLDLGTNSIGWAVVEKNDNTYTLLNKGVRIFQEGVKIEQGIEGSKAAERTGFRSARRLKYRRKIRKINLLKVLSDFGYCPKLKEEDLKNWRYKKIYPTDDEFINWWRTSDLDNKTPYAYRNKAASQKLDLTNTDDRSIIGRAFYHIIQRRGFISNRLETTKESEGAVKKNIEELSELKGDMTLGQYFYSKYQNGEKIRDQYTHREAHYLEEFEKICTLQQLPDEFIQKVKNAIFYQRPLKSQKGLIGKCVFEKNRSRCSVSHPLFEEYRMLCFVNNIKIKTPYDEKLRFLNEAEREKAIERFYLKSKPHFDFEDIAKQLAPKNQYKYFKQGNKNSEDYLFNYKMNTTVSGNPVSTRLKELFGDDFINYRKEYVREKDNKKSYIDIYDIWHVLYTFDNEKNLRAFAEKRLCLNEEQIKEFFDIKLKKDFSSLSLNAIKKILPFLRQGLIYSHAVVMGNMGSILADEVWKNDNNRNEISLKVLEIITNQNKEKSIIEIVNGMIKDCRDNGESFSEKAEIYYRNDLLNRIFKFYGENKYNSFSMEERNNIENEAFDLFKKQMNKKLYRGEFLKVETIDERVKAYLKEKYYILDNKVSKIYHPSAIETYKPAIRGNDGKKYLGSPMVSAIRNPMAMRALHQLRILINELIKNDMVDETTSINIEMSRGLLNANERKAIQAWQREREKKRKEYADKIMEHYKEQGFNSQPTADDILKYQLWEEQKNICLYTGQQIALAEFLGASPKYDIEHTLPRSLTVDNSQENKTLCDNKFNRTVKLNKIPFQLDNHMEILARIEHWKEKIETFEEEIEKATRQSRMAGDKESKDRAIQKRHKLIYERNYWRGKYQRFVMKDVPQGFKNSQLVDIGIITKYSRLFLNTLFEKVYTVKGSIVADFRVMWGIQDEFEKKERVNHIHHCIDAVVMACINKENYEKLAAYYHEQEERYKKNDYSKPDFKKPWETFTVDVKELEKDVLISHHTPDVLPKQSRKKLRKAGKIVFKNNKPVYLQGDT

SEQ ID NO: 6655 - protein, 1078 aa, unidentified
  REGION 1..1078: note = Description of Unknown: Cas Enzyme sequence
MALSVAEPYRPFILALDIGVESIGWAVLECEGEDQSDPTGIRRAGVHLFQAAIEGDFESGRDEPKAAVRRQKRQSRRQFERRARRNRKVFRLLQRSGLLPGEPIGRLAEADGVLKELDAALRARWTTAGEHRSQQVMVYRLRAAALDQPLEPFELGRALYHLAQRRGFKSGRKTQAREDEKESGAVKAGISELRAQIAATGKRTLGEYFASLDPDLVRIRSRWTPRDLYEAEFIAIIDAQRQSHASVLTQDFIASLSNAIFFQRPLKSQAHLIGRCSLIPGARRAPVAHRDAQRFRVLQKVNDLRVVDQEGRERDLAPAEREIVIGAFEKTADVKLATLRGRKYLKLPEGSALNLEAGEETKLPGMRTDLKLAEAIGPRWSAMDDRERGRVVGVLLREDDYAEASKALQHHAGLSAAESERAAAIALEPGYLGVSLEAVRRLLPHLESGIRYATARKAVFPDSLQSGQPQPLLPAVVYWQRDLRNPAVIRVLTELRKLVNAVVRRWGKPHLVRIELARDLKRSKEQRKVLTRRMRTREAMRDDARAAFRGEGSAGGTGDDATQFQALRDLAIGNPSQADIEKLLLAIECRWQCPYTGRRISAAGLFGRNPEFDVEHILPFSRSLDDSYANKTLCYHEENRSRKRNRTPVEAYGGNQQTWGEILQRVHAFGGEHAAEKLRRFRLAEIPADFTSRQLNDTRYASRLAADYVALLYGGRADESHKLRVQVSTGGATAFLRGEWQLNGILSKGSEFKSRDDHRHHAVDAITIGFVGPRWVKALSDAAEEAVRTGRRRFGAVPSPWPDFVGTVRSAVESIYVSRRAEHRVRGALHEESNLGRERKERDGTCERTFRPFRKPVESLSISEVERIIDPAVRAAVKEALERSGASVPAKAFVNDASKPRLRTKDGRTIPIRRVRIAKSDKPVAVGRGERERFVVPGANHHVAIMAVVHATSGKVIRWEGQAVSLLEATKRVARGASPFNIDGHDHTQFIALLHPGDQIILRQSPFGTEGPFTVRSISGDLVEFALSTDARPKKDIARAREWQGRRANGLRTMGLTRVEVSILGDLHPCRLPDESST

SEQ ID NO: 6656 - protein, 1292 aa, unidentified
  REGION 1..1292: note = Description of Unknown: Cas Enzyme sequence
MAAHKTLGVDLGTNSIGWAIIEQGNGEKELTASGVVVFHEGVAREKGNEKPATQDRTKARAQRRGYFRRRMRKQLLLEELVKLNMCPLPMEAVVAWRKEDAYPLGHDAFQTWFMMNPYELRAKGLTEKLTLLELGRVFYHLAQRRGFRSNRNDGEGELEGLKEGSEDRGIKGLNDTAHLIAMYGTLGKAGVALAEQHEAIRRRYTMRTDYIDEFDAIWAVQAPHHGLNDAVKRQIGDPKDGLLFFQRPLRSQKGNVGKCTLEPKKPRAPISSLQAEVFNVLQIMNNLRVNGIPLNAEQRDLVLGKFLLKSSTLKAGDLRKALKKAKLGDELNYKDDVQFQSAHTIPVLADLFDAEAKDIFNTVCTKRTDDPELKQWEDRWAVIYNAEETDELSKLEAEGRDVGKKRDLLKYAKEGWGFDEDKLKALKKVRWKAGYHSLSRKALSKIIPFLANGTRYDEAVLFANLGEVVVGWKTMGREDQKALMQGLLDRMAEWDMERWRVDLLNGLVKRYRDELSPKGGAEDFWDEGWTAALDQAVQAMPKDLQPQADQAWKQALTHDFIERTRANSRPEYFTKQALRDALKIFLTDQFCPDGVRFDRMYHHSAIERYPVAKGERLGSPRVPGLKNPMVERGLHTLRHLVNELIATGKVDRDTRVNLELAREMDSTNRRQAWEKWQKDRFERRDKAIKRLREHYKKDEHWTPDEFLIEKMWLYMEAEEIWGKGLCVYSGAVMSVEQAMGNSVDVEHTWPRAETVDNSKANKMLCFADYNRTIKRDRLPATLPNYEVEAQGYTPIAPRLEPIKALMEKYEKEMRRARWFAKQKTTKDAKDREIQKAEVARFHFNYWRTKYEHLSSAEIRPNFLNRQIVGTGMITRMAREYLGSYFRRDDRPQVYSYQGEATAAFRREWLGESMEKPKDRTSHAHHAKDAAVLAAIDRSEFDRLARHYRENDTKHTDKRLDEPWTGFGKKVNTLQEHLLVYHASHDRVTSQSRYKLGKVNGTMRTATGDAVRANLHKDTYYGRILRPVEGTEEFTEHTVVRKPLKDLKDADLLKIVDPELREQVKRYGLARIAEQGYMPVQVKEGEKKVVHKIRRVRIFDTAPVAKNPIKVKLHRDRVEGREHKHHLYAAGGDVYGMAFYINAKGKRTFLNYSAMDLTGLMHGRGVSRPEQAWPEVHPDKAGYTLVRRNGKPVILISGTHVIMYKEAPEEVDVKNVQDLYRRLYVVRNVEGDGRINLTHHMDARPIDQMKKSMLSTWDPENPENWLRVSLGNFHALIEGVDFKITTDGSIELE

SEQ ID NO: 6657 - protein, 1139 aa, unidentified
  REGION 1..1139: note = Description of Unknown: Cas Enzyme sequence
VGEYLFEQIKANPHSSLKNQVFYRQDYLDEFEKIWSVQSKYYSELTDELKEEIRDVIIFYQRKLKSQKGLISICEFEEKEVVINKNGKSISKKIGPRVIPKSSPLFQEFKIWQNLGHIILRNKNVSTKTLIDNSQSDLFEEKPQDFILDFEAKKILFEELNLKGNLKINDIFKILGHNPKDYQANFTEIEGNRTNQALYNAYLKILEIEGYNEELLKLSDQDSIEINSLKTSASEIKNMVKSIFEVLGINTGILEFDAELKESEFEKQASYQLWHLLYSAEDDNKKYSEEDILMFGNSDIGLKKQLCSKFGFKPDHAKIIANVSLQGDYGNLSCKAIRKIYPFIKETEFSEACVMAGYRHSKNSLTKEENESRVLKDTLELLPKNSLRNPVAEKILNQMVNLINTLIEKNSEKDATGKIIRYFKFDEIRIELARELKKNAKERAEMTANINAAKIAHDGIIKKLQNEFGIKNPTRNDIIRYKLYEELKNIGYKDLYTGTYIPQEKLFSKDIDIEHIIPQSKLFDDSFSNKTIVYRTINLDKGNQTAFDYISSRYSEEKLKEYQSRIEELYGLGSEKGISKAKYQKLLKKESEIGDGFIERDLRDSQYIAKKAKELLFQISRNVVSSSGSITDRLREDWGLINIMKEINLPKYRSLGLTEMEERKYGQKVEVIKDWTKRNDHRHHAMDALTVAFTKHSHIQYLNHLNARKNENNKYHKIIDAIEQKETKVIVDDTGNKKRVFKEPIENFRQIAKEQLEQILISHKAKNKVVTKSNNKVKGSDKIQQCLTPRGQLHKETVYGRYQYYSSKEVKVGATFDHKLIDQVSNPLYKMLLLERLAENNNDPKKAFSGKNSLAKNPIYLDREKKSIMPELVKLVWLEEDYSIRKSVTPDNFKDSKSIEKIIDPIVRRVIADRLQQYEGDSKKAFSDLDQHPIWLNKEKGIQIKRVAISGVKNAEPLNYKKDHFGNYILNNEGRRVPVDFVSTGNNHHVAIYRDGNGGLQEKVVSFFEAVERVNQGLEVVDKIYNSSLGWQFLFSMKQNELFVFPNEKTGFNPAEIDLLDPRNKSLISANLFRVQKIATKNYMFNHHLETLSISGEILKNKKELSGIIYYFIQTPNNLNGIIKVRTNHLGDIVSVGEY

SEQ ID NO: 6658 - protein, 304 aa, unidentified
  REGION 1..304: note = Description of Unknown: Cas Enzyme sequence
MEKTNKKILGLDLGTTSIGWAYVIEDENLLQSEIKQIGVRVSQLDNFVSTKTGKESKDPLKDFNSGKGISPNSGRTLKRSARKNLDRFQLRRKELFEVLKKANIIQNDTTLNENGKSTTHETWRIRATAAKNKIELHEFARVLFAINKKRGYKSSRKAKNEEEGQAIDGMGIAKKLYDEKITPGELVFQRLLIGIKSIPDFYRSDLQQEFDKIWNIQKTYYPDILTDTFYHEIKGKGQKATSTLFWVRYQFNTADIKGLDDNLKTEKTIKFSKREQKKLQAYKWRRCSSSATRKRTNCIRTCRY

SEQ ID NO: 6659 - protein, 1508 aa, unidentified
  REGION 1..1508: note = Description of Unknown: Cas Enzyme sequence
MNKIIGLDLGTNSIGWALRNPDLTENQIEKFGVLTFNKGVGNGKTGEYSYAAERTKKRSTRRLYQARKYRLWATLENLITEGYCPLTTEDLDKWRKYDKQEAHKNNNAGRVYPVWNTAFDAWIKLDFDNDGKPDYTSPYQLRKELAEKKSDFTQEKNRFKLGRALYHIAQRRGFKSSRKGAEDVKEKETNDNEVMDLQYSEKKKNKVITELFEKYSNAKTIGWLFALLENDKIRVREAITQYAIRENYKDEIKHIFQLQGLKFGDALYTKLVETGKNKNDGSIFYKRPLRSQKGLVGKCTLEPNKYRAPISHPSFETFRAWSFLNNIKYKENNEWKQLPLELKQEIYSELFFRKSKGYFPFSEIVTFLKKKGKNWELNYKPKTTVTACPVSARLKDIFGYKWNETITKKDVEGKIIHITHKDHNGNELGRIPLEQPFYQDAWHVLFNYEDQEYVYEFAKDKLKLSEERVNEKEKTKVDKFVIAWNACPVGYGMLSLNAINKINVFLQKGLIYTEAVLLANIPEILGKELWQQNEQLLLASINGVIVENRNQKSILSIVNNLISKHKNLGENKFGHKDNSYKLVDSDLKDIQIAIEEQFGATKWESLPDEEQQNILGTVKDCYQAYFSKQGIVRDNGSEERIVTIQSNGKNYHKTDTGYYRLPKLIDTLKVFLQDNFENLDEKQLSKIYHPSEINIYPPAKEDKDGIIKLGSPKTGSFKNPMAMRTLHELRKLMNYMIETNQIDNETRVMVEVARDLNDANKRWAIEAWQRQREAENQEFAEAINQLLNDDKTIKANATNNDDIDKLRLFYEQNTEQTLPEVVVMEEDENGKKKKSTEKDEAVRWNGHGKKLIEKYRLWKEQGHQCIYTGKFIKLTDLFNENVIDFEHTVPRSISFDNSLANLTVCFADYNRTIKKNQIPSQLPNYSEDSGGYTAILPRLDAWKEKVERIKQQIDFWNLKSKRGSKSVMIAKGSNISTKDDAIRQRHLWQMELDYWKNKVDRFTITEITSGFKNSQKVDTQLISKYALHYLKTYFDKVDVQKGSITAEFRKIYQLQVADEKKDRSKHSHHAKDAAVLTLIPVAAKRDEILERYYKAKELNPKASFTEDPYKGFKREFVWRIDDNVLINNITNNQELTPAKRKVRKRGKEVIVNGKNRWATGDCIRGQLHQETFYGAIKPARRGEKGNIEKDENGKFVQEDNIKYVLRVPFNADFTGVDKIVDEGLKRQIQEHIKRAGNFKKAFEEGIYLLDQNGKPHGNKIRHIRVYASVSEPLAIKKQTNLSDKEYKQHYWAGNGENIVCAYYKNDHLDKKGNIKKDRELEIINLFEISEFKKHNLFDANGQLELYRKDKDNKTIIDDNGNKQTPYAILKAGMKVVFYDERIEELKQQNNEKDCDYNKRISYRTYRIVKFTGGRLTFQHHLEARNDKELENAYPENIVFKTDEKNKDVAYGGRGTSGFTEKVSDALKFNGHNNYEPFPKLLYSVNWLDFVVEGYDFKIEMDGSIKWLK

SEQ ID NO: 6660 - protein, 1519 aa, unidentified
  REGION 1..1519: note = Description of Unknown: Cas Enzyme sequence
FKSSRKDLKTTNVLPYDEFIERKNKNDFGEDGIETQFVSITKIKSVTFIEVKKDKKGNVTNTYLIEAEDQRLHKWEEIRKKEPDWAREVNDKGEKIEKKEFTFLVTQKIDKNGKFTQNKPQLPKESDWALCTTALSEKIQENNQHPGEYFYEQIKEAYKVGRNFKARQYPVYRWRYEKELKDIWEKQCELNPELQKINSDQSTLIKLAELLYPTQTKYNMPKLAEFKIHDLLHIISKDIIYYQRELKSQKNSISECRYEKRKGIDGETYGLKCIPRSSPLFQEFRIWQDIHNIRVFEREVKIEGKTRLDVDVTNADINDNVKEKLFELFNSKASITEKDILNTLIENRPESNIKLDIDKKEKIHSHRINLYVRRDDLKGNETLARYRSLFKKADFNGQEVLSDKDNLIKLWHIDYSITSSDEEKSKKGITTALSKLLPDKPNKAKVIELFTKLSELKKEYGSYSACAIKKLLPIMRSGSYWNEQEVSDTTKQRATQIKERLENINHNIRRLNEIADDDVQKQVLKSFIGNEDLTKSLNTYQAGYLIYDKHSEKDKTPINSVEEFGKYIQKEIPNNSLRNPVVEQVVRETMFLVRDIWNKYGEINEIHIELGRNLKNNSDERKKISDIQEGNFKEKQRIKKLLYELMNEGFEQHIDKDEANPFTFENGNFEWKTQIENTTFEVKPNPESPIDVEKFRIWRNLSKQSEIDWAKKVKDEKIPTEQEIKKYALWLSQNCRSPYTGKIITLSKLFDNTQYEIEHIIPRAMMKNDSFNNLVISEWGVNKAKGKKLAANFIDECKGKCKYGDKEYTLFTYQQYEAHCNEAFKFQKAKRKNLLSHEVPEGFVERQLNDTRHIGRKLAELLAPVAKNENGIIFTGGSITSELKNNWGLNKVWKELMKSRFERLEAITGNRYVIHDKDEHGNPIIHFNVKENEQLDLKRIDHRHHALDALVIAATTREHIRYLNTLSAADTDEEIKNFKRTLVKGKIRDFKTPWESFTKDTKDKLEETIVTFKTNNKITSTPKNRTAYLKVENGKAKRDYKEQQLNNKWMAVRRSMFKEPLGVIWIKQIKGVSVKEAFATDIERQISFNDLAKRKTASYIYDKIARQIIKSIIQQCNAGIDEKDVLIKEIESYLLKNSKKVETEKVNKKGKPQNKTIYILNGTEYETISVASFVACKTKRMALTKKDYIEKLTIEKMKNDFPYFSENEKRNNAFNNLFLQHIKEYGNEPKEAFNAEGLEKLNKKAVENPKIGKEIKSVTRLDGTVDLDDMFNGGFYETDKGAMAYFVMYENQKTKERCGFESIATHKAIEKIVKGYKIAEDKEGFDKIILSPGDLVYVPTKEERECSELIDWKNIKTLLKRIYKIVSFSGKDLLCVKADISDPIISTNIKEKVKGEIDWHNKSTSTMEGDVTIKSVCIKLSVDRLGNISPFSNTKFYPNPSHQPDEAKDGSTSYFKTAKISSPKQSEERMLLHTSKMNPEERMAYLQQLRETTQNSNLSEEEKISILSKFKINPSDENS

SEQ ID NO: 6661 - protein, 1330 aa, unidentified
  REGION 1..1330: note = Description of Unknown: Cas Enzyme sequence
MRTLGIDIGTSSLGWAVAEKDGYNAEPRLAEHGIMVFPEGIDRDQTGEKPKNQQRNKSRASRRRYFRRKRRKQMLLEVLIENGMCPLSKDELMLWVKEDIYPTDQAFRNWFKMQPYELRAAGLERPLTAYELGRALYHMDQRRGFRSNRREGDGEQKKFHSGDEDRGIRGYDKTQELLKEHDTMGAVAVHLSKLPKVEAVRRRFVKRDDYVREYDLIWNKQLELHGNDALGAKLTEKLHDEIGAPFDGILFFQRPLRSQKGNVGKCRFEPKKRRAPQASLTAEVFEVLQTVNNIKIEGQPLSDELRQRVVTDLFLKKDRFTADDLNKALTKWKVEGRSNYAGEEAKKVKFKGAEVIKDLAKLFGGKNWEPLALEIFNDPDNKIWLDRWAVIKDAEHFSEISELREKGKDTGKKKDLKQYAIEHWGYDEKQLKALKSIAWPQGYANMSHKAMSKMIPWLRQGVIFSHAAFLANIDEAFGEGWMTMTNTQREKVVGDVQAIIESMRVEKGRAELINGLVKQYRRHWDETKNPHGFWSDVRRKEFDRAFNNWSQRELGDQLSESEREALRTELVRKFDAHIDEFGVKAPFIKLERADERIANYLCKEWDLGFDAIGKLYHPADIEIYPEARGDLMGSPFHPALNNPVALRALHALRFLINALLKSGAVDKDTRIRIELARELNSANERRAWQWFQNDMFERRRKAEEECKKWFDQHMPGTPITEDAIQRVWLMQESEEVLGQAKCVYTNRALSMADVLGGTANTDVEHTWPKWRSLDDSMANKMLCDREYNRQVKRDSIPAECENWDTPRVYKGAEPSAILPNVEKFREKMEHYEMLVKIRKQDSKQAQDPGAKNSAIVQKNYYNYWYRYWKTKYEHFALESIPLGFTNRQQVEVGMITRYARAYLRTFFPRVDCVKGELVSFLRKEWMGQKQEQKDRTNHFHHLVDAVTLAATNKETTDRVAHELRQQEERNSTMTPTKPWPSFAEDVKRLKDRILVYHYNTDPLGRTSRYRVKGRKSAATGSTVRGSLHKDTFYGRILWKDPQTGSKVLRTVKRSRIHDMSDSDVDYIVSEPLRKLIQSPEWAGIEKVKAAGGLPVSVKNGDGNNTHVVKKLRLFTQQLKRDKNGVPQAEVDSLLEVKSHRDRVEGREHKHYLLAANDDNHFMGVYVNDKGDRSFHILTLFDLTKALRRGERQGFPYNQLPPSIERAVRGKKVLYELWRRNGHPVVIRKDQMVLLYNESPEEINWKDPSDIAARLHKVRSFEPDGRLVLVHHMEAQPMSKLERKGAFVPGATGVRLRLSLNGLSALFEDVDFKCHPNEVVVRMDGRLAAVN

SEQ ID NO: 6662 - protein, 1108 aa, unidentified
  REGION 1..1108: note = Description of Unknown: Cas Enzyme sequence
MSTTYTIGLDIGIASVGWCAFGETHILDLGVRAFDKAETAKKGESLNLARRSARLMRRRLFRRAWRLKKLARLLKSEGLIADAKQFKPERPFSTSLWQLRVDGLDRRLNDEEWARVIYHLCKHRGFHWISRAEARQADGDSTSEGGKVKQGLAGTAKLMADKGYRSAAEMVLSEFPEAQRNKQGEYRKALSRELLAKELALLFAKQREFGNSHSQCALETAILGNGDQKSGLLWQQKPALAGADLLKMLGTCTFEKTEYRAPKASFTAERHVWLTRLNNLRIVTDGITRPLTEQERQLALPLPYRQAGEFTYKQLGGALTKAGLLEPGSFKFTGLAYPTEAQKADGKAKANDPESATLVKIPAWHELRQTLTKAGLTDEWEKISGTALCGQPELFDKIAWVLSVYKDDDEVRAELAKLPLPNPEALTDALLNIRFDKFHALSLKSLHALLPHMEKGLRYDEACVQAGYHHSQLHKVGEGEHKYLPPLYDGRDKNGRMIFAEDADIPRNPVVLRSLNQARKVVNAIIRRYGSPTAVHIEMARDLTRPLKGHRNSQGKYIEGRQDIQKEQLEFQTRNQRDREQFIELFGHSPKGLEFEKWRLYREQNGQCAYSQNPLTASGNVADIFLDGSTEIDHALPYSRSFDDSKNNKVLVLTRENRDKGNRTPYEYLGGVENSERWQRYVAFVEANKAYRLAKRTRLLRKDFSAKEAEEFRARNLNDTRYICKFFKNYVEQHLKLAESSETKRCVVLSGQLTNFLRARWGLLKVRSDSDRHHALDAAVVAACSHSMVQRLSNYSRTRELEQVRDGFVDIETGEIINPAMHQQLREHFPDPWPYFRHELEARLKIDSPELLREEMARLGSYSEEELAALKPLFVSRAVQRRGSGAIHEETIRSSKRLANSQSHVRIAIQKLKLASLQNIVGAHDPRNASLMDLLQKRLIEFGDDGKKAFAEPVLKPSRNDDGPPVKTVKLISTQKGGMKVRGGVAELGDMLHVDVFQDGKRFLIEPAYIANNSARVTPSCLPETAEFLFSLTKNDLVAITLGDTTYQGYVVMYESDGRLTLRSHDQPKPDKDYFRKSVASAKRIQKFHVDVLGNTYPALPEKRRGLA

SEQ ID NO: 6663 - protein, 72 aa, unidentified
  REGION 1..72: note = Description of Unknown: Cas Enzyme sequence
MSRILGLDLGTNSIGWALLDDEEQFIIDSGVRIFQEGVNDMNTAKEESKNAQRRIHRLTRRQLKRRKQRRGL

SEQ ID NO: 6664 - protein, 948 aa, unidentified
  REGION 1..948: note = Description of Unknown: Cas Enzyme sequence
LRKYLTELGLYPDKESEMEKFLNMEPYGLRKKALYSKLSKYELGRVFYHLCQRRGFKSNRIADVDDKEKGKVASSISELQKEIDSSKSKTLGEFLSSLDAHTDRIRGRYTSREMYENEFGQIWAKQKEFYPVLLSEEAEKAIKDGIYYQRPLASQKSIVGKCKFEKNKKRCPASDPAAQEFRMLQEINNLKISGGDRLQEEKQVLTKAERDVLVEHLNSHENLELKKIPSLLKLPKNQEYKTNFDEKKKIKGMMTIVGIKKALKKEFDRLTQENIREIWHTLYFSQSNDWLVAHLMKKWNFSEECAKNLSKIKLEKEYSSLSYKAINNMLPYLREGEKYHEAARKAGYHHSQVDEDIVMTDYLPEPKNLRNPIVMASLYQLRKVVNALIDRYGKPDIVKIELARDLKKPKQERIAITKRNNEMNARHNEIEDILKNEHGIAQVSREDIVKYKLWEECNRICPYTGKSISKSQLYSEDVEIEHILPYSRTLDNSYMNLSLCFKAENARKGNRSPYELYSNEPERYAAVLERVKDFPSPKARRFAQKEIKTDDFINRQLNDTRYIAKEALSYVKHICSEVIVSQGQLTSTLRALWDLNCILPKLTEDEEQYESQEAVKNRGDHRHHAIDAIITAVMTRAFLKRISTEHGKNVRDIKLLRSKFPAPWDGFKEDVKEAISNIIISHKVNRNLRGSLHDETLYGQIRDIDGETLVGENKKPFYRVRKPLESLTANEVKNIIDPVVKQTVIERLEKFGFNENDNKPVVDKKAFVEPLYLKGSKTGKETIIKSVRIKITSSSMKKLRDYNVWAEPGSNHHIEIFANEDGELSFRTVSLFDAVKSKDKKESVIDKKGGKGEDFLLSLMKSELIMVGGMPEGLDLDDKSMYNKILKKIYRVQKMDVLGNVVFRLHYVTATDQKVKRGLLRRNYNTLIAANPVKVDIDLIGYLKISED

SEQ ID NO: 6665 - protein, 1158 aa, unidentified
  REGION 1..1158: note = Description of Unknown: Cas Enzyme sequence
MNDIEKKYVLGLDLGISSVGWALMIKDNEDNYRRIENLGVRIFPILEDKSGKLENEKRREKRSQRRMRRRKQLRLEDARNLFLSYLNVEFEKLVFKDYRNPYELKIAGLTTKLAKEELAIALYHYIKYRGFQSNRKVEDKKSEGELLNQLSFIENELEETGKTITEYFYSQYLALDPASRRIHNVDQNSSLYNKKDPNKTIRNKDDRYIFAANRSMYLKEISLLLEKQLSFGLINQEFIDEFIKLFTRQRSFSLGPGRGSPYAAPEGMSLISKMIGVCSFDKLPRAPKAAFSSESFVFLSFLNNLQFKEKQESNYRSLTKEEINAIYNFALEKDKLTYTNMFKAIGLEVYRIKGHDLSRKQFITLMKKYKDENKITDTLNATQYEEFSLYSRQKLLDQEVRSLSNYHEQKKAFINYAKNNISTKKEIEAFIKVDTNFDIISEILLHNKVDTEIEKACQKNGFSKAITSVIVSLPSVEKVINLSLDLCRKLIPLLKEGKRYDQAMTELGYQHSVTASNIEKHELLPEINECVAMLDESLTNANVRHTLVEMRRVVNAVIKKYGFIHEFNIEFARDLARTFEDRAKIKNMQKDNLIENMQLKQDLILKFPNFFKKHSDIKGDTLLKYQLYKEQNGKCAYSNKPISINEVFDSTATQIDHIMPYSRTFENRNFNKVLVFTSYNQEKKNKLPYEAFKGEKWQNIIDFINDPNVRISDKKKETLLLKEINDEEWLERNKNDTRYACVLAKKIIESFLKPNRCRAVAGGITAKVKTSYGLINLTHSFINQEYKRYETFKIIKASFKVNGISFLLKDNHNNEHTCDILIKKAVGKNPLSYNDSELNEALNYILSNPSFLEKYLEDNDLDIDKLLEATVDKLNASNDINQSTLYEFLVRIITEIKQETIEIANIKDRSNHLHHILDAAVIAITDDKMIFRIQNFEKLKETKFDEETGEQITSARFGLPYPEFRKEVILRIYERNYDVLIKKLRELDNYKTYNFDSNNCYVTYPSRSPNKNISGPFTKETILGYNKKLNVITKRVSVNSINEKNIDSILNVSGGSNAQIEAIKEWLKNDKPTQFPVLPQKGTYIKKVTLIESTDVRKRVQIRANAFAENDTVIRVDVYRKKIDDGLIYFVPVYYYQIEQEKLLLKGYNVRNVLYEMM

SEQ ID NO: 6666 - protein, 1122 aa, unidentified
  REGION 1..1122: note = Description of Unknown: Cas Enzyme sequence
METRYTLGLDIGIASVGWCLLGEDRIVDLGVRAFDKAETAKEGDPLNLTRRQARLARHRLAQRAWRLQKLARELKRHGLIADKQLFRPENPAVVSPWQLRVEGLDRLLAPVELARVIYHLCKHRGFHWISRAEEKQAEGDAKSEGGKVKQGLAGTKRLMEEKGYRSIAEMVLAEFVKQSMNADGTPLFDRKSQPIPAGSARNKRGEYTKALSRVLLGDELKKLFAEQRRLGNPFANESLEAAILGSGDRKSGLFWMQKPPLSGAALLKMLGKCTFEKGEYRAPKASFTAERHVWLTRLNNLRIVVDGETRPLNEQERAVALPLPYRQSKDPLTFKQLHSTLVKNGLLPEAFEFAGLRPSKDGKDPKAEKLIKLPAWQELRTTLKAARLETEWEGLAGAACRGQPQILDEIARVLSIYKDDDEARAELNKLSLPNREAMVDALLDIRFDKFHALSLKALYKIVPHMEAGLRYDEACIEAGYHHSQLHKPGEGTSRTLPPLYAGRDPDGRMRFAEGEDIPRNPVVLRALNQARKVVNAIVRRYGSPMAVNIEMARDLSRPLDERNKIRKKQEEYRTRNEKDKTFFTEEFGQPPKGGEFEKFRLYREQLGKCAYSVEAIDLARLLEPGYVEIDHALPYSRSFDDSKNNKVLVFAKENRDKGNLTPYEYLGGAENSPRWLHFVESTKSYRLAKRSRLLRKEFGTKEAEEFKERNLNDTRYICKFFKNYVERHLKLADGSEAKRCVVLSGQMTAFLRARWGINKIRSESDRHHALDAAVVAACTHGMVKRLADYSRTRELAQVHTGFVDTTTGEIVDPAKFRQLKQHFPEPWLHFRHELEARLKIDNPALLREEMTHLGTYDDAALDELRPLFVSRAPQRRNGGAAHKDTIYGQPEMMREKGSVTQKVPLASLTLKDPDKLIDPHRNAKLYDAIRERLEAHGGKGDKAFPADNPLRKPDRDGNPTGPVVRTVTMVIDKLSGIPVRGGIAKNDSMLRVDVFTKAGKFHLVPVYVHHRVTGLPNRAVVAHKEEDEWNIVDNSFDFCFSLYPNDLVQVTQKNLTSLGYYGGSDRGSGNVNLWAHDRNQAIGSDGLIRGIGVKTALKVEKFHVDILGNIYPAPPEKRRGLA

SEQ ID NO: 6667 - protein, 1229 aa, unidentified
  REGION 1..1229: note = Description of Unknown: Cas Enzyme sequence
YHKAFPTIFHLRKALIEKKERFDIRLVYLAIHHIIKNRGHFLFEGQSMSNIPSFSEAFQYLQQSLRDELELDFSCLSVEEVEKTLLSREMRKSDKKAELIRLFDANARDDESKQKQAFISLVLGTPVKIDALFPELDLEEADTVKIDFSSGKFEEEYDQFAALLGDKISCVDKFKAIYDWALLAEVRKNARYLSEGKTRVYDEHKSDLQTLKLLVKTYLPKKYSEVFKNPAVADNYCSYAGVAKKGGRKIVVEKRCDQDAFYKFIGKILKELPKDVNQPVLQEIENRTFLPKQVTTDNSVIPYQMHLEELSIILENASDHYPFLNQVDNTGFSVRQKIELLMQFRIPYYVGPLNTYHKENGGHCWAERKQSGPVQPWNFEQMVDVDKSAEAFIKRMTGKCTYLTGADVLPKNSLLYSEFMVLNELNNLKINGSSMPVVLKQRIFNELFLAQKKVTMRRLREFLENAGEITSTDDLSGIDGDFKASMASYHDLKRILASKAGDVNMVENLIRWIVLFGDDSKLLKRRIESFYRDKLSESEIRQLAKLRYSGWGRLSKEFLVDVVHVDKTTGECVSIISALRGDLGENLNLMQLLSGRFDYLQAIARRNEKTSGPISGIGYDAVKELYVSPAVKRGIWQTMLIVAEVAKIMQHPPKKVFVEVAREEGEKKRTRTRQSILLDLYKKCRDDSREWAKELQGKSDAELRSDRLYLYYLQMGRCMYSGESIDLLSLFDEKIYDVDHIFPRSKVKDDSLENRVLVKRVINAEKSDVFPLPEAIRQKNSAFWRSLYEKGFIGKKKFDRLTRATGFSDDELADFIARQLVETRQSTKAVAEMLKRVFPQTEIVYVKAGNVSDFRHKFDLVKVREINDFHHARDAYLNIVIGNVYNTRFTHSPLNFIREREGKNYNLRKIYDSDVVRNGVIAWKTTGDETITRVKRVMQKNNILFTRYAIARHGGLFDQNIMKKGKGQLPVKGSDSRLTIEKYGGYNNVAGACFMLVEHDTGSGKKARRSRTIEVLHIHIARKISSDKKNGLDYCVNELGLCNPRILLPAIKINTLFIFEGARMHLAGRSEDRLEFRGAHQLCVCNDSERYIKKILKYQNRCREARRPLTIDSHDGITSDDNLKLYDVFCRKLNDTVYRKMFPTPADVVKKGREKFVALSLIDQCGVLENILCLFKCGKNRVDLSSIGGASNTGTIRRPKKLDNLSVVLLNQSVTGVFEQIVDLQKIGA

SEQ ID NO: 6668 - protein, 1053 aa, unidentified
  REGION 1..1053: note = Description of Unknown: Cas Enzyme sequence
MLEKKYRLGIDLGSTSLGWCMLELGDDDIPKGIIKMGVRIFSDGRDAKSKEPLSVARRGYRGQRRNLDRYLQRMRSLINYLNQHGFLPEDEVKRNEVFQINPYLLRAKALDEALTPAEFARALIHLARRRGFRSNRKVLSDKKTQYTEAINNLKANLEQSHARTLGEYLWMRYNHTPEDKAHTRSPLKFRYEKNNEQPEPIFPLREMVEHEFQTIWEQQSQYNAQLTDEHKQAIQDIIFFQRPLKPVPKGKCQLIPEFFRAPKAHPLFQEFRIRQDLNNMNLINVFTNAITELSDEQYAILYELLSHKEKVTFKTMRKALFAKQADDYRFNLETNDRKELLGDLTYHELHKDKNAHLSEMWDALDSDTQAAVIETVISDLDDIEAAEQLVSLGIPQDNTDDFLNLRLPSDYCHLSLQALGKILPYMRERQKYHAACQAAGFSHSGEYDGTVYQDGHLPYYGELLKRETIELNRKTGDHDADLFGRINNPTVHIALNQLRLLVNALCKKYGPPSDIILELGKEIKLGEKEKDRINKIANQNKKINQEVDQILADHDLPANHNNRLRVKLWKELAANEIDRRCVYSGIQISFTDLFSSKIEIDHILPKSRTYDDSTANKILCTRDANRYKKERSPFEAFGQSQEGYTWGDIIARAKHLPENKQRRFLPDAMERYENKEELLGRMLNDTRYMSRVAMKYMQYICGDRHVWTVTGLHTGLLRGKWGLNSALGDGDSKDRSDHRHHAIDAFVIALTTRSMIRNLANNIEASRERFIENLDPPYPGFDHEGFKTQVQNIITSHKPDQIHPQRLKGRNQTGGALVDETAYAFEGIDPRNPKYSLYSVRKSISAITDKNYDSIAAPEYVQEIGRFAESCRGEDFKARVKQWAAQRNIKKVKLIFSMNPQNMVPIYDKDGRAYKYMSSGENLFADIYLKDPTSPDCKWSIEIVNSYNAHQPGFVPQWKKDYPKARKIMRVFKNDVVAVDNLEGIREYRRVKMMTKGRLFLREINVAKKEKHLEDIGEQYPPNKLMELRACKAGIDILGRCFDPLMHGNEQRS

SEQ ID NO: 6669 - protein, 1212 aa, unidentified
  REGION 1..1212: note = Description of Unknown: Cas Enzyme sequence
KEGFEKINDYLSTNSLTNFVFSADKILGFERIVKDERGINDTKKALKVLFNTKEKIVVNILDFIANGKVKLKKMFDNLELTEEEEKFEIDFSVEDFEAQYVEVEAIIGEEHIVLIDAVKQLNDYLIVARLMNGEKYVAHGMVKKYNKHKEDLRKLKKLIKENCGQEQYNSFFKAADQEYNYPAYIGMTKIKGTRHKTKKIVKPSEITNFFTNIKEIIKNIKSDSANNIREEIEKGIFLPRITSVENSQIPYQFNAFQLEKILNNSAKHYPFLNKKEDGLTLKEKIIKLLTFRVPYYVGPLSDKHNVDNKEGGFSWVVRKNNKEVLPWNLDEVIDLEKTAERFILNMTNKCSYLIGEDVLPKQSLLYEEYNLLNHFNVMRINGERLSKEEKEALIENVAKKRVNITYQTIAKYFDNRLKKDVTITGIDENVKLSLSSFHKFNKIFPGRINNEPQNANLMRYLEKIIFLGTIYSSQVDFTNRVKSDKKFSKFFSTEEINKMASLRFKGWGSFSRLLLTGFDELSNSENNDKALTYQDEKTGNELSIIEIMREESLNFNEVLSHEKYQFSKLIGKFNYTGKSELSVDELIENYYISPAVQRSIRRTLKIVDEVIDTNDGIIPDKIFVEVSREDEKTRKGKGRTDSRLKRIRKIYEKAIKDAEEFRILHDEISKDDKNDVYLRPKKMYLYYLQNGKCAYTGEPLDLKIASIDHIIPRSLVKDDSFDNLVLVKDTTTNLRKTDEYPLNFDIIQKQKPLWSKLKRNGLMSNVKYEKLIRTKELTPEDFENFVNRQLVITNQANKAIAEILKVKYGRATIVYSKASNVSDFRQKFKLIKGREINNAHHAHDAYLNIVVGNYFNTRFGARYYYRDDKKIKWNPKTAFNFSVKGCWDKDKDLGTIRKMLKRRDILFTRMPIIESGQFYNQKASKAGDNLIPIKETGPLSDTTKYGGYSDKRSAYFAIIEHTAGSKRERIFIQVPVIINQKIKQGQTTLLEYLKTQLKLVEPNIIYSPIPINTVIKRGQSLQFISGVQGKDANQLIVRNMVEPYFDDFTSEYLCLINKYIERKKETKKTNKDEQLTEENIEKIQVIFTFNGEGRTRKNDRLRYITRDKNKRAFECLIKQIEKPLYEKSHSDRRKKILENKEKFYDLKLVRQVEIVRALHELLKSGVPPSKINLEELGVKSGKLTMSYKLKDMVIVKQSITGLYQKEIHIEEV

SEQ ID NO: 6670 - protein, 1428 aa, unidentified
  REGION 1..1428: note = Description of Unknown: Cas Enzyme sequence
MKYFKIKNFFKLKFVLPLGKHKKTNTMKKILGLDLGTNSIGWALINHSFEKQKGEILELGSRIIPMGADKLGDFEKGNPISATAERTSFRSTRTLWARDIQRRERLHRVLNIMGFLPQHYAEEIDFEHRLGQFIKDKEPKIAYRKNSDGKFEFIFQESFKKMVDDFRKTQPQLFYIKPNGEETKIPYDWTIYYLRKIALSQKIEKEELAWILLNFNQKRGYYQLRGEDEEIEESKNKSFEILKVAEVVDSGDKIRGTDTILYDVFFENGWKYDRQTTKPEDWIGKTKEFIVTTTTLSSGETKLSFKAVDSEQDWIAIKQKTEQDISNSDKTVGEYIYDTLLQQPNQKIRGKLIRTIERKFYKKELSKILEKQKEFHPELEDRELYNSCLIELYEYNDAHRNSISNRDFTYLFVDDIIFYQRPLKSKKSLISNCSLEFRTFKVDDVERREGIKCIAKSSPIYQEFRLLQWMKNLKIFKIDDKQDIDITDELLPTITDREKLYEWLNDKTEIDQKAFLKYSNFKLDERIKEEIGLEQFRIFKKDKEQGLHTYYRWNYVADKKYPLNETRGEIIKRLTKLGISSDFLNRKNETHLWHILYSVEDKNEIIRALNKFANKHNLPETFVDIFKKYPRIDKEYGAYSEKAIKKLLTLMRFGKWWDFSAIDENTKDRIDKIQTGEYDEKIKNRVREKAINLTENNHFQDLPLWLASYIIYNRHSEASEIKYWRTADDIELLKQHSLRNPIVEQVINETLQTIRDIWNHYGEGKENFFDEIHVELGREMKNPADKRRKITERVTENENTNIRIKAILTELLNEGDNNVRPYSPMQQEILKIYEEGVYHNENRADELNEIDKIRKKSQPSSSDIKRYKLWLEQGYKSPYTGEIIPLSKLFTPAYEIEHIIPQSRFFDDSLSNKVICESEVNSLKDNQLAFEFIKNNKELTIELSHGKFVKLLHPDAYEENVKRYFAKNKPKMRKLLLEDIPDSFIERQMNDTRYISKVVKMLLSNIVREENEEEGTAKNVVVSNGGITNTLKQDWGLNDVWNTLITPRFERLNQMAGYEKYGSWENKEGKQVFQINTIEPELLKLNKKRIDHRHHAMDALIVACSSRNHINYLNNAAAAKNKQSERFDLRAKLRRIENFTDKDGKQRTTAKEFLKPWDTFTQDAKKELNHTVVSFKKSNRVINKTVNYYQKWVKQPGGSMKKMLVKQEKGDSWAIRKPLHVPMPYGLKEYSFDNLKIAENVGKKDFIIDDYIRNEVEKHFDLNNRKITDTQKFLKKNPIKDKYGNIILTTDFNIRSKKFRKRMPILKLADRSSGRGITSLDSMIKFLNKISDKTLKNDLFSHLKDNDNDINVAFSIEGIERFNSKRKTPVYKLPITESGEKRFVLGNSIGSKHKWVEAEAGTNLFFAIYVDNEGNRNYETIPLNIVIE

SEQ ID NO: 6671 - protein, 991 aa, unidentified
  REGION 1..991: note = Description of Unknown: Cas Enzyme sequence
MQYTLGLDIGSTSIGWALLSSGKAPKLINAGVRIFPEGVDRDTQGTEQSKNAVRRAARGARRTRSRRTLRREQLVRTLTVSGMLPNDATTFRTLLTKEPYSLRAKGLDEQLSLDEFGRVLYHINQRRGFKSNRKSGKEKDGVVNKEATEIQKRIDEKGCRTLGEYLSTLDPNIQRIRAHYTFRTMYEKEFDLLWEKQAVFYPTVLTKELQKKIRDEIIFYQRPLKPTEKMIGKCELEPDKNRCPKADWYARIFRLLQDVNNLLIRNPGGMEIPLTPEQRTALLKELGSKKTMTFANMRKKLGLLETQKFNFEENGKKESMAGNSFVAEMQNKKLFGKKWDELDVAVKIKLNEDMIELEDDELVKMAKEKFNFSDEQTQVLLKISMPQGYMSFSRKAIQKLLPLMEQGIRTDQAKASVYPPTAKSKDDARQSLDVDLLPQLRNPIVQKALYEVRKVVNAIIREYGKPEKIQIEMARDLKNSKARREEIQQQNWANKKENDYARKRLMEDVNIANPTRDDILKYKLWKECGGVSPYPYGDKSKSIGLWELFGDHPVYQVEHILPYSRSLDDSFMNKTLCHVDLNREKGDMTPKEFFGENEELIKRIAHLPWPKRRRFTQKEIELDKCIERQLNDTRYICREVVAYLGSLGAIVKGTRGEATAVLRHQWGLNETLDGSLVKNRDDHRHHAIDAIITALTSNLHLRNLARVRYAPVREKLAEPWTGFRNEVAAKINAINISHRVTKKVSGQLHEETSYGPTGRKDEKGQDIFVYRKPLEALTPAMAGKIIDPVVREIVQKRLEKFGIDTSKGSAKISKEVWKEPLYMKSLNSKQVPIKKVRIGDVFNNMIMIKDAEGKPYRAVASGSNHHIEIFEHRDKKGNIKRDGRVIMMFDTVQRSQKGEPVVCRDYGDGKKFVCSLAINEMFMLELEDGSKALHRVQKISQNGTVILRPHTYAGKPSDSDRPPLIQRKSPNTLKGSKVTIDPLGRIWPAKD

SEQ ID NO: 6672 - protein, 941 aa, unidentified
  REGION 1..941: note = Description of Unknown: Cas Enzyme sequence
ARILPKKEDEFSDLMSKNPYELRARGLDKKLSLTELGRVLYHLAQRRGFKSNRKSEKDKEDGKVKTGISELQAKIDAEACSTLGEYLHKFRAKNTEDRLRGHYTHRNMYENEFGKLWEKQSAYYPGILTEKLRENAYGAIFFQRPFDIRERWGKNLERLPKGANAWRAPEVGACEYEKDEKRSPRATWYAQRFRLLQDVNNIRIIDTKSGELLNLTKEQRVKVIECLGSSEAKPFDELRKLLGLGEHFKFNLEEAGRKGLKGNQTEWNLRVSFKKGGKDYAGLSVDARDEIIASLIEEEDPEALRKKAVEVWGLTEEGAERLLKSKLEGGYLNLSVKAIKRLLPHLEAGKNYMEAVEAAGYERRDQRKVETAAALSINDVPAHTNPLVAAALYQTRKVVNAVIREYGIPEKIRVELVRGLKSSKEKRKQMIGDQRDNEKKNADAKERLQEGDFGTDRPSAEEVLKYKLWEECRHTCPYTGRTIPKEALLTSDVEIEHIIPYSRSLNDSYMNKTLCFTGENRLKKDRTPFEFYGHDEELWGQILKRIKGFPDGKRDKFYLKGEKLEEHLADFNNRQLNDTAYIAREARAMLEKAAGKNNVQIGAGGVTAALRNLWGLNSVLGGKGTKNREDHRHHTVDAVCVALTTAEVIKRLSAAAEHGRRLRKEDFPEPWKNFREDVKKRIDSIVVSHRVRRKVSGPLHEETNYGILDRKDEKGQPLYAVRKALSALTQSEVMEKIGDKKVKAVIIAHLKKHGVDIDKKVAEKTSEWKKAMHPDTPPHLPNKNGQPVPIKRVRLHKPMGKAIHLGYRAVDPGNNHHIVIFEYTDGPKKGRWDGDVVTLFEAAQRLKDEKPVIRRDLDDGKKFVMSLSIGEMIKIGKDADARYWRVQKMDAASNNITFRLHTASTIDNNEERLFKYPNGLKELGAAKVVVDPIGRIRDAND

SEQ ID NO: 6673 - protein, 988 aa, unidentified
  REGION 1..988: note = Description of Unknown: Cas Enzyme sequence
MADAKKLTLGLDMGTNSIGWAILTHDKDGEPSGIEACGSRIFLEAVDAKTKVPKNQMRRDARGARKLTKRRKMRKDAVTGLLLRAGLLPLDTTERSSLFNAHDPYVLRKRGLDELLKPFELGRAIYHLSQRRGFLSNRKKKATDDGEVKTAISALRTEITNANCRTLGEYLASQPAKRKRYTDREMYKEEFDRIMAAQKAHFPDALTSAFRVELHNAIFYQRPLKIQKNLVGKCTFEPERRRAASASLEAQRVRFLQDINHLKVKNPITLDFRKLEPDELHKLKNILEYKEKLSWTGAKKALGLHKNEVFNLEENEIKKDLTGNRTAYSAIKAIGERWKEMTETERNNLATDMLTIDNVAGFLKRMKTHWGFDEATAIKLAETELEKGYARLSTRAMRRILPHLEAGMIYSEACAAAGYDHANPGRASATGALSEPGNLRNPVVQKALYEARKVVNGVIREYGMPDVIRVEMARDMKTTMKEKKRIQKEQNDRKKKNEAARGRLRAEWGIENPSGDDVDKYNMWEECNQTCPYTGESISREALFSANVDVEHIIPYSRSLDDSYMNKTLCMAAENRSVKKNMTPYETYAADEARWQEINQRIKALPYPKRMRFEQKEINTDECVTRQLNDTRYISREVQTYLKQLGTAEVEVTKGQATATLRRRWGLDRILAPPGEAIKNREDHRHHAIDAVVVALTSRRLFSKLSRLSARYGGASLSERGFALENPWATFYSDICEKIGGIVVSHASARKISGALHAETAMGYLEGREVFAYRKPLDAFNKEKQLEDIGDRKIREIVKARLNEHGGDFKAAFGNLTEKPLLHLDGKTPIKSVRVHVTVRKPEMSLCAIKRDGKPYKYFELGNNHHVEIIEDTKTGKRKGIFVTAIEAAKRARIDKTKIVQREHGNEWRFVMSLCINDTLEIIDNDGVVKQYRVQKMSGANNRITLRLHTVSGVENNTGMFECSPNTMPKNAKKVLVDPIGRVWPCND

SEQ ID NO: 6674 - protein, 1044 aa, unidentified
  REGION 1..1044: note = Description of Unknown: Cas Enzyme sequence
MNSVENPHSYVLGLDIGVASIGWARIGLNEAGEPSEILSAGVHTFDAGVEGDVESGRDEARGAARREARLPRRMIERRQRRRRKILRLLQRADLLPSGETGSPQAIHEYLLALDAQLREKHKSDGDRVAAHVLPYKLRASALDGPLQPIELGRAFYHLAQRRGFLSNRKSVRKDEDEGQVQQGITELQDRMDAAGARTLGEYFAGLDPEAERIRRRWTARSMYIAEFNRICDSQTAHHPKVLTDVLRKELFRAIFFQRPLKSSRHLIGRCELVPGSRRAALGDRLFQRFRILQNVNNLNIVPLDGSPRPLNDEQRGKVVAALCGEGDLTFAKIKAKPILGLPKGADLKVWSGDEEKKLPGHRTDEKLRTVFGDRWDQMSETERDSIVLEVLSFQNPDALARRAIKAWALDEPMAKKLAETRLEQGYAAHSRRALRQLVHRMEDGTPYATARREFFPESFKSTEPVDRLPPVLKAVPSLRNPAVTRALTELRKLVNEIVRVHGRPEQIRIELARDLKRGRKERKPFSKDIDDQTKLREKAKARILKEAGLTEPRRSDTEKALLWEECGGLCPYTGKCIPFASLFGDSPQFDVEHILPFSRSLDNSFANKTLCYQQENRDHKRNRTPFEAYARDETRYAEIIARVRRFQGKSAAAKLRRFEMEQIPDDFVNRQLADTRYASRLAGDYVALLYGGRTDESGTQRIQVSTGGITFHLRNEWQLNSILSDGGEKTRDDHRHHAVDAVAVALASPALIQRLQRAAERASEAGRRLFAPVQEPSPGFLEQAREKVLAINVSTRLTKRIAGDLHEDTNYSKEHQFAGRDGKIKPVRHVRKRVDGMTEAQVDHIVDPIVREKVRVWIQSQAGMTKKDPMAPPTIRTHDGREIPIKTVRIRKKLSAVPVGKDARTRYVKPGSNHHAVIVAVLGREGDDKKWQDYPVTRLDVHQRKAARKPIIQKDWGADRRFVMTISRGESFLINDDHGTPCLWRCTTVSDGDNWFRLHSDAQTREALRESGARPLRASGEKLRLRNARKVRVTYLGEIIPAND

SEQ ID NO: 6675 - protein, 1057 aa, unidentified
  REGION 1..1057: note = Description of Unknown: Cas Enzyme sequence
MKNKEKKKGHLLGLDIGANSVGWALIETDDDEPVRLIKTGVRVFDAGVEGDIESAKDVSRAAARREARLRRRLLDRRTRRHKKLALALQRAGLLPEGDVSTAVLRKQFFDKLDAGLSAGDDPAVSPYAFRTRALDEKLKPFEIGRALYHLAHRRGFLSNRKSQLKKDEEEGIIKQKIAGLAAKIGESGCRTLGEYLARLDPEQERIRARYLSRAMIETEFKAIWAAQKKHHPGLLTPEAEKEIHRVIFFQRPLKSAAGNVGRCELEPRCRRAQLAILPAQSFRLLQKVNDIKVTITNRETGEIITRSLTPDERKLLVDKLETQGEMSFPAVRKLLNFKKSDKCEFNFEESGEKALIGNKTASRLISVFGEEEWLKKTDAERTEIVEAMLCTRKDEALARKGLKKWGLSAEAAEKLGSTSLEEGRSAHSLRALEKLLPLMREGVQYATARKQRYGALAFEKVFDALPPLCLPPNSGASVFIDASSNPAVRRALNELRKVVNAVIREYGKPDEIRVELARDLKRSRKERDEIWKANNNRRREREKAAGRLLEEGLKKEPSRTDIEKWLLFEECGGICPYTGKPISFESLFGPSPQFDVEHIVPFSRCLDNSFLNKTLCHNEENRNVKKNKTPWEAYHGTGKWDEIIQRVGKFKGDRKTVEAKRRRFAMEKVEGIDEFATRQLNDTRYATQLAMRYLGLLYGAGVQGVDPSRRRRVQAARGQITADLRDNLDLNSILGDGGEKSRADHRHHAVDAVCIALTSPAVVKRLSDSAARSESTYTRRRYSGFDAPWPGFQGDVRESIEAIVVSHRANRKVNGPLHEATNYGKIREDEKGKPYVHIRKPIVNMSNKDIENIVDPVVKRRVLERLDELGQSDPKKAFKEENNLPFMQAKNGRRIPIRSARIKNSDKVTRIAGGASARNVMLGSNHHVEVFEVADKKGGKKWEGRIVSTIEAMDRIRKGKNIVDRNYGENGKFLFSLAKRESFALTIEGKQRFFNIRSFWLIPSGPRFDYVEITDARKSGEAGKGLDKFPSLLEPLRKKGFKKVNVSPDGKLSDAND

SEQ ID NO: 6676 - protein, 1348 aa, unidentified
  REGION 1..1348: note = Description of Unknown: Cas Enzyme sequence
MEKILGIDLGTNSIGLTLREDSEFPWYGVYTFKKGVGEGKSGEFSFAAERTKHRASRRLYNARRYRKWETLRVLISSDFCPLSEDTLNKWKHYQKGIGRVFPVNNIEFNQWIKLDFNMDGVPDFRSPYQLRKLLISDKLDLTKSANRYTLGRALYHIAQRRGFRSSRKNGANEETAVYKGSNETKTIGRNDYEELILKYGSLGAALAYLEEYGIRVRNRYTLRSDYYQEVSKILDYQNVNMDFAEKILKAIFFQRPLRSQKGLIGKCTLEPNKPRCPINHPRFEEYRAWSFLNNIKFRDKSDKFFKPLPLELKQKIFTSKFFYKSKREFQFSEIRKMIKDNGGGQWELNYDQTKKDFSLASCYVSARLKSAFGESWKDFRKTIEKLNKRGETEKISYTIEDIWHILFSFEDEEYFSEFLTNTLNLTDFQVNELLILFKSFPVGYANLSLKAINKILPFLKEGYIYSEAVILAKIPDLIGMDLFKENNHLITSAISDEIERNRYEKTIVSITNALIYKYYSLDYKDRFGWKDTTYKLNGSDFKDIETTAIEYFGNATWNNNLSKNEHSKIIEMVAKNYQAFFADIKREHVKAPHLVNQVKEFLRNNFDVEEKKLNQIYHPSQNDIYPSYEDQIYLQSPRTAAFKNPMAYKTLYQLRDVLNYLIKSNKIDRNTRIVIEIARDLNDRNKRWAIETYQRRREAENLVFKGVISELINDKDFKGFANPESSEDIDKFRLFFEQIKDSDKIYKSIGEIDKNKSLTDKDIQKYRLWKEQGCRCIYTGRIINLTDLFDQNRVDFEHTIPRSKSFDNSLANLTVCYSNYNRDIKKNKLPVELPNYDTEALGYSPIKPRLEPWEKKIDDLEKRIDSWKIKSKNALDKDEKDYAIRQRHLCQMELDYWRNKVDRFQRAEIPQGFINSQLVDTQIITKYAFHYLKTVFSQVDVIKGSNTAEFRKIFGIQPKTEKKNRTKHYHHAIDAAVLTLIPSVRKREEILKRYYDFEEQYNNMNKQYHEKPFSSFNNSMIEAIKKNILINNIPGKNQTLTPSKRLVRKRGRIVWLDKKKQIPKIAQGDSIRGELHQQTFYSKIRLVEKDENNKPKRDDDGKWKFLQGEDEYRYALRRPVEDLTSLEKLVSPELATIIKTQLNGRSLKKAITDGLFMLDKNGNKVNKIRKVRVWEAVDPMPIKEQTYKSTKEYKNYYYAKNAENTAFGFYRNEACETAVIPRNLFDISTFIKPNSIKNINQLFEQDILSKRGNTLTLIHVLIPGMKVLFYENAKEELSELECFSNHLYYVRRLYEASSGRIQFQHHLEARDDKQLTEAFPEIEFGKKGINGFSKFTTEFIAPRSLVSG

SEQ ID NO: 6677 - protein, 1135 aa, unidentified
  REGION 1..1135: note = Description of Unknown: Cas Enzyme sequence
MKKILGLDLGTTSIGWAIVEATDEKKENPITGEKSKTDINNDRIGIHEDAVGVRIIPADEMQRRFNEGKKLNDGEKHTPTADRRIKRSSRRANSRYKLRRDKLLAVLEYLKLKPVGSFVKNGKGGWIDDRTNGKLYSKEKEYVLNSKGQQIHKRQPDDDGDTDIGKQLYKLRDRAIREKIELEELGRILLLLNQWRGYSSDRFTKDEKSNFDYYTATVVELDENPVDIVYEDKEKTKLKWNQYAVSLQFTDPIKDESDNLISNLTGFHFCQKLKFKIGDIISFKYEKKETKVKKVVVNQYFKINLVNPNPEDWNFRYQNLNKTLTEWCNEGGSVGSYFYQNFYVEKNIDRIRTNVVNRNWYENELKKIFKKQYAEHREYFQQFDIDSVLEVAFKDKNIHSKVKNTQPEEGEDPLEAKLRCLISECIIYFQRPWQQAKNKGACRFEKIKVWKERVKKGTQEKERFETYEGRTVVPRSHPLHQEFKVWQQINNVRLFYIKDGKVTNLFDENNADLLKQLVGKDTTEIKLLLYGELQQKKSLSWISFIEKTLNISVFVEGLKAKTKYQEVPTEYFTVNYIKRTKKGELQENLLKGNNTKACLKTILKEKTDEWFDEIAKTGTDDHQNIEVVEKYSYKTCEYKISNLQLLWELIYDITESKSEKVAQNIKKNFPDFTNETCDSLSNINFDDSGMAQLSAKAIRKLLPLMKVYQQDEVAEYPQKVLEKIIHLLDQNKNDLNNETPEEERLESLRDLITDTNARKRLSKFVDIKQFVGLNYWESAAVIYGQHAKHGEQSENIKKDIEKLFEPVKRNSVNNPVVEKIVNETISLCKEIYQRYGFDEVRIELSRELKASREEREQMWESMNEGNIRNDLAKRMLRELFNAETSNNNITKLRIYSDEAKYMSEEVFNELTKSGEIIKKDGNEEAYKFKKFEEINRECNLKEPSKADILKYKLWLDQMYQCPYTGEIIKLSDIFTSKYEIEHIIPKERYFDNSYGNKVITRKVINGWKSNQTAFEFITSNSGKTIIDSIDNKQLTILSWDGKSDTDNYPTLVKRLFPKGRKQMNLLRKTISDDPLSRQLKETQYISVLVKEKLGKVIGVDKVWTTSGAITDMLRQSWHLNDVMKELMRDRFESFN

SEQ ID NO: 6678 - protein, 1140 aa, unidentified
  REGION 1..1140: note = Description of Unknown: Cas Enzyme sequence
MKKILGLDLGTNSIGWALTNNDFDTKTGNIEGLGTRIIPMSQDVLGKFDSGVSISQTAERTKYRGTRRLVQRFLLRRERLHRVLNILEFLPKHYADAIDFEKRLGQFKPESEEKISFYKNESGKNQFLFLESHQEMLAEFKSANPDIKQVPYDWTIYYLRKKALTKKISKEELAWILLNFNQKRGYYQLRGEEQEVNKNKLEEFHTLTVVDVIEREKGKSGIWYNVILENGWVYKRESKIALHDWIGKQKNFIVTTELNDDGTVKLNKDNEEKRSFRAPKEDDWGLVKIRTEQTINQSGKSVGSYIYDNLLKNPKQKIKGELVRTIERKFYKDELSKILKTQIEYHVALTDKNLYKKCIDELYRHNDSHKINIKNRGFDYLFLEDIIFYQRPLKSKTSLISDCSLEFVPIKDKKGVLLKDVNGKQILKPLKCIAKSNPLFQEFRLLQFVKNIKIYKKEIINEIDVTNDYIKSEQDLVDLFNWLNDKAEISQKQFLAYPKFKLKEDKFRWNFVEDKVYPCNETRNQFLNAIAKTDVEITFFDAKNTQDLWHILYSVTDKIEITKAITTFAKRHNLSDEFIVSFSKIKPYKKEYGSFSEKAIKKLLPLMRFGSNWNENNIDSKTLARIDKIQTGEFDETMRNRVREKAIHLSKITDFQGLPLWLASYIIYDRHSETSDVAKWKTPADIEHFLKYDFKQHSLRNPIVEQVITETLRVVKDIWQHYGEGKENFFDEIHIELGREMKNNAADRKRITETINQNENTNLRIKAILTELKNDGINDIRPYSPSQQEILKIYEEGVYSSENRKTELEEVDKIRKTAKPTPSEIIKYKLWLEQGYISPYTGKLIPLSDLFTTKYQIEHIIPQSRLFDDSFSNKVICESEVNELKGNKTALEFIQKNENRIVTLTGGKTVKIFTKEAYNQHISSYYSKNKSKQKRLLSEDIPESFIERQLNDTKYISKIVKNLLSKIVREDDEQEVTSKHIISLKGSITSKMKQDWGLNDVWNKIVTPRFERLNAITNSSDFGKLEFKKDDFGNTGKQVFQTNVPDAIAKGFSKKRIDHRHHALDALVIACINRTHINYLNNLNAKDEDDKTIKHELRNKLCFKTKPDANGNYKWEFFKPWENFTKKAEDELNQTIISFK

SEQ ID NO: 6679 - protein, 988 aa, unidentified
  REGION 1..988: note = Description of Unknown: Cas Enzyme sequence
IYRERRKAVGHKGREAHLPIRNRTNAAKEPIYEFCADRDLIREEFQALWNKQRSFDGELARQLTDERLRQLDENRGDETWRTKGMLFGQRNTYWNASVLGRCDLEPTDMGCPRIDMHAQEFLVIETVNNIRIIPPGQARRPLDADERRAVVELLRRQKTASPATVRKALGIHKGPAKTQYSLSLDADPKRGLNTDWFYREVICHAVGPSTWASMTDKQKDSINRAILKLDPKQPDHHTRFQKGCHDWWGLDEGQTQRLITVWESRPNPNIRLQLSRRAIRNLLPYMCDEGVTVNEARKRFAEDADNGATPEQRNRYGFAGTRPSGAIRRFQQKHPNLLPPAPQTLSNPVVRKAIHEVRRHVQAYLRRFGRPERVVIELAREAKLPAKVRNDQLAANRTREKKRSEIVAQFGLAGLTRTQQEKAFKRVLLCQEQGQQCAYCGNGNNTITEKAAAEGIEVELDHIIPESRGGGSGLNNLVLCHTRCNRGKTNRTPKEWLSKEQFAKLEQRLSHLKKSNPVKWDNLHKDVSDITAFAESQLTDTAYASRQVADWLRKALYGDETDGTRCVFTTKGRYTPWLRRDWGLYATGGTKNRGDHREHALDAMVVALSGPERLQDLAHAVQAFELSSSTGMTAPQREALPAPWSDAETFRDQVMDEFSRLVVAHRPAQRKITGSLHNDTMYGPVLDSDGRLTRYATIKKFAIELTPKHLRVPKGWDELRRQLETAPNTTARRTVRRRMLALEDVKPEKSGVVRDRWFREELRQCLRENGLDPDHFTPKQMKELVLNKGICLASGAPVRRITLLRVPSVVEIRRKQWDDHAGRKVYDDRPQTMRLYEPQNNHHIEIRQNPKGRWFVERDEGVVTTYEAARRVRPSKASGQRPRSAVNRQDTREGRFVMSLSIGEMVRMRHPVAKTLDCFVVFKIDGTGTIHFTPHCDAGRSQQTDQTAAREDISLSPGQLQQLGESAQNTPQKVWVDPLGGWRELRRD

SEQ ID NO: 6680 - protein, 942 aa, unidentified
  REGION 1..942: note = Description of Unknown: Cas Enzyme sequence
MKKILGLDLGTSSIGWALVNEAENETEKSSIVRLGVRVNPLTVDELSNFERGKSITTTADRTLKRSMRRNLQRYKLRREALIEILKENKFIDNETILSESGNRTTFETYRLRAKAVVEEISLEQLARVLLMINKKRGYKSSRKAKGQDDGQLIDGMSIARQLYEENLTPGQLCLQLLETGKKNLPDFYRSDLQNEFDRIWDFQKGFYPDILTVNLKDQLFNKNEKVTWAICEKPMQLVGIKRVSKGAEARMENLRWRSRALSEKIDLEQLAVVLQKINGEINTSSGYLGSISDRSKELFFRKITVGQYLMSRLESNPNASLKNQVFYRQDYLDEFNAIWEKQAEYHSELSEELKIDTRDVIIFYQRRLRSQKGLISFCEFESRQIEIEIDGKPRVINVGNRVIPRSSPLFQEFKIWQNLNNLEVFPKGYLSRRNTSARVINGQTEGGERRFLDQEEKEILFKELSVREELSKLQALRLLFDNDKDLDLNFAKIEGNKTLAAFYKSVNEIIEISGHDKIEFSRHSADEISASVKSIISVLGGNNDILNFDSDTGPDQQSSYRLWHLLYSYEGDNSNTGIDGLIEKISYLTGLQSDYAKIFTNITFQDDYGSLSAKAIRKILPYLKAGNTYDLACKYAGYRHSRSSLTGEEIASRVLKERLDILPKNSLRNPVVEKILNQMTNVVNAIIDEYGKPDEIRVELARELKKNAGEREELSKMINEATRKHEEIKKNLQDEFGISHVSRNDIVRYKLYKELETNGFKTLYSNTFVPREKIFSKEFDIEHIIPQARLFDDSFSNKTLEKREVNLEKGDKTAFDFVKEKYGERGLQDFLARIESIHNLNGISKAKFNKLKMSEKDIPDDFIDRDLRNTQYISRKALGMLGEIVRGVVPTTGSITDQLREDWQLVDVMKELNWEKYKALGLVEYFEDKDGRLIGRIKDWTK

SEQ ID NO: 6681 - protein, 1152 aa, unidentified
  REGION 1..1152: note = Description of Unknown: Cas Enzyme sequence
EKNKITFSKVSRRNNRHRVRNEKRRKLARKLLWEILNPQKYNEEQKELINGLLKNRGYTYLDSDDEFEVDEELREFFVENLNQFSDFEREDFGEYFGKIEDEKELLIEIDSILDKLPERKYKKFREFLLNIKKQIQTGSKHRKVYLKEIKDEINTYNFIDNKDEFFNLVGNISNFQLRILRKYFNKKFDDKYNDEKLTKLLNKYFKRFKDKEFAKLANIKNAIDFLKSTSPYLTIPPQEEMDNRNPYKCNSMHIKENIAENLKDAIEKLIKEFDFLDDEIPLNLKLQRIMDLSSKIYKNNPRTVFKHQKGDIGFYQKILGKDFEKFSEFAKKYYLQEEKIINGIYNESFVFIKCNKTTPKKKNIRELLLKPIFSAEFTKEETDKLIEKIKTTKLKGNKRIFSYLKVIAALYKTHQNRFWEIIKSDSQDKEVKKIKDLIPKAIEIFDEIMKDLGKNSVFENINETRFLNIALQTYNILFKDIKGYSKTCKICSIENAKRSDENNPFAKRLLSDVSKPIDGILDFMLDRIAFEISELVPEKDIKTLNIILEQNRFKFEESLSEIKGKKQKIKEFKEHKYCPYTGEEIKSGDYDHILPRSKELYNSKANLIYCSRKGNEEKGNKYYFLENISKKHLKEIFNTDDIEKIKEFISKHIFEIDESKYTNFNNLSTNQKKAFRYALFMNHSSKEFQKAKRLLKLDKIKLISNGTQKRFARLLYEKLKTKRKINPENINIKLIDSKIISDIRLELSIDPNTGEIIHPEIEKQEYQKPLSHAIDAMTAIHIAGEYDFWDIYSPKIIVKNVEKRQTFSNAKKINSLQLFNDSIMSADFEDFNNKEINILKKFEVWDGKLNKKAYFELLFKLFEQKDIKSLKKLKFMDKKIFFTIRKDIKDVFFKQKSSVPAEIISPDSKKYIPPKREKTYQAIYKHLKKHETEIFIDGKFNEDNYKEIMKKFFKPTGKKRGRKRHIYSIPTKAQAKYIVRNNNTFRFLSNEKIATKHYLINGEIIDIPFFSKNTLPKEISEIIKILETKDLSQPSYEVEIKTDEISKYVEKLTYYFTEKSRIRIVARFRKNAFDVDFSKVENITSEDNEFKKFINKIENDELLRKYLGPFRSNNDKKSATLLDENNNSITLKYTAENIGSKKEIALKYGNIK

SEQ ID NO: 6682 - protein, 1133 aa, unidentified
  REGION 1..1133: note = Description of Unknown: Cas Enzyme sequence
MTDKKNLNEPFTIGLDIGIASVGWAILGENRIIDLGVRCFDKAETAKEGESLNLTRRTARLMRRRLRRRAWRLTKLAKLLKKEGLIPAVETLKDQPSKGFETPNLWKLRVNGLDQKLTGEEWARVIYHLCKHRGFHWISKAEAKAADSDKEGGKVKQGLAGTKRLMQEKSYRTAAEMILAEFPDAQRNKQGEYNKALSRELLCEELKELFKQQRAFGNTHADEKLEAAILGNGDKKSGLFWVQKPSLSGEALLKMLGKCTFEKDEYRAAKASFSAERHVLLTRINNLRIVEDGKIRGLTPDERRIALWQPYQQAGDFKYKQLGTALVRAGLLIKDGYKFAGLAYPSEVQKAEKAKDPEDTVLIKLPAWQELRKTLKDAGLENDWQEMAEGALNGRPDLLDQIGWVLSVYKEDDEVERELDKLQLSTKVVEALQTLRFDKFSNLSLEALRKIIPHMEKGMRYDEACVVAGYHHTLPDLEDDKAKEKYLPSFYAGRDKEGRLIFNEDMDIPRNPVVLRALNQSRKVVNALIKKYGSPHAVHIEMARDLSKPFDERKQIERDQLEYRARNEKDRATFAGHFNIMGRPKGRDFEKWQLYREQQCKCAYSLDPIDLNRLLEKGYVEVDHVLPYSRSFDDSKNNRVLVLTRENRNKGNQTPYEYLDGKGNSDRWVQFERFVKTNKAYRQAKQNRLLKKDFGEKETRDFRERNLNDTRYICRFFKNYVEQYLQLHEGSDAKRCVVVSGQLTSLLRVRWGLLKVRGDSDRHHALDAAVVAACSHGMVKRMSDYAQRKELGQVRDRIEKVDTKTGEILDHFPSPWPHFREELLSRLNLDEPAALYAAVERLGTYPPAALESIKPLFVSRAPQRRNSGAAHKETIYAQPEALKEKGSVTQKVAVANLKPADVDKLIDPERNVKLYVYLRKWLAGRDEREKQAKAIEASAGRGKDRRELTHQEKTQIEMLRSLPQKPDKQGNPTGPVVRTVTMVIDKLSGVPVRGGIAKNDTMLRVDVFQHKINGKYYLAPVYVHHKVTGLPNRVVVSKKDESEWLIINDSFTFIFSLHPNDLFMLNLEGEEQYAYFSGMNINDGGVKFFPHDKRGAENLKKKGVASAKKITKLHVDVLGNIFPAPSEARCELA

SEQ ID NO: 6683 - protein, 1165 aa, unidentified
  REGION 1..1165: note = Description of Unknown: Cas Enzyme sequence
MLVKKQLERDVIIGLDIGIASVGWAVLGCDRIIDLGVRCFDKAETAKEGDSLNLVRRSARLTRRRLRRRAWRLTKLARRLKREGLIPDITVFKSPPAKCFETPNLWQLRVDALERQLNKEEWARVIYHICKHRGFHWISKAEAMAAENDKEGGKVKQGLAGTKRMMHENSYRTAAEMVLAEFPEAQRNKQGEYTKALSRELLCEELKYLFQCQRTLGNSHADENLETFILGNGDKKSGLFWEQKPPLSGEDLLKMLGKCTFEKSEYRAPKASFTAERHVLLTRVNNLRIVENGALRGLNDDERRIALWQPYQQAGDFTYKQLGSALIKAGLLVKGDFKFAGLAYPSEVQKTEKSKNPESAAIVKLPAWQELRKTLVGAGLESEWKEMADAALNGRPKLIDQIAWVLSVYKEDDEVDRELGKLNLPGQKKVIEALQSIRFDKFSNLSLTALCKIVPLMGDGLRYDEACLKAGYHHSLPDLNDDCAKTTYLPPFYTGRDKDGRLKFNEDMDIPRNPVVLRALNQARKVVNALIRKHGSPHSVHIEVARDLSKPFDERRQIERAQTEYRSRNENDKTTFADHFNIMSSPKGRDFEKWQLYREQQGKCAYSLAPIDLNRLLEPGYVEVDHALPYSRSFDDSKSNRVLVFTAENRNKGNQTPYEYLGGKASSEIWHRYEVFVNTNKAYRQAKLNRLLKKDFGEKETKEFRERNLNDTRYICRFFKNYVEQYLQLHKESDAKRCVVVSGQLTSFLRFRWGIVKVRSDSDRHHALDAAVVAACSHGLVKRLSDYSRRRELVHARNAIDMTTGEIVNPAMLDKLEQHFPAPWEHFRDELLARLNIDDPAVLRVAIECIGTYPLEALDDLRPLFVSRAPQRRNSGAAHKETIYAQPEVLKEKGSVTQKVTVTGLKLNDVDKLIDPHRNVKLYAALREWISKRDEREKRAKSIEAGAGRGKGKRELTAAEKVEIERLRALPRKPDKQGNPTGPVVRSVTMVVDKLSGIPVRGGIAKNDAMLRIDVFRHKTNHKFHVVPVYVQHAVTGLPNRAVVASKGEDVWTEMDENHDFLFSLYSNDLIQITHKNGEAIRGYYRSCHSGTGAVSIALHDRYAFGDKTTSKRLHEKNPQKTLPNDKLGLVEGVGVKLAANFEKYNVDVLGNIYLAPPEIRRELA

SEQ ID NO: 6684 - protein, 1557 aa, unidentified
  REGION 1..1557: note = Description of Unknown: Cas Enzyme sequence
MHKKILGLDLGTNSIGWALIEQDDIERLGKILGSGSRILPMSQDVMGKFDSGQSISQTAERTGFRGIRRLRERHLLRRERLHRVLNILHFLPEHYAVQIDFDKQLGKFLEESEPKLPYRFNAETKSVEFIFQDSFEQMLSDFAKHQPEMVANGKKVPYDWTIYFLRKKALIEKIEKEELAWVLLNFNQKRGYYQLRGEEKEENTNKKVEFYSLRVANVEPTEDKKDDDRWYNIHLENGWIYRRSSKVPLEWTGKMKDFIVTTELNEDGSIKKDKEGKEKRSFRAPAEDDWTLLKKKTEHDIERSGKTVGTYIYDTLLQKPSQKIRGKLVRVVERKFYKQELEMILNNQKEFHPELRDENLYQACLEELYEYNESHKSSIADKGFTHLFVNDIIFYQRPLKSKKSLISNCPFESRTFIKEGKKINEPLKCISKSHPLFQEFRLWQFVQNLKIYQREKQVDGKLQTDVNVTSEFLKSEEEWVALFNWLNERKEVDQKAFLKYPAFGLKKNAEAYRWNYVEDKLYPCNETKAQIAARLSRVEGLPINFLDKGTEEALWHILYSVEDKLDIEKALNTFAKKKELLNETAKQFMEQFKKFPPFKKDYGAFSSKATKKLLSLMRAGNYWNEAAIDVKTKERVEKLMAGEWDESIKDRVRDKAIKLTQMDSFRGLPLRLASYIVYNRHSEAADIKKWKTANDIERLEQHSLRNPIVEQVINETLQVVKDIWKHYGNGKESFFNEIHVELGREMKNPATEREKISKKNIENEATNLRIKALLQELLNDVEIENVRPYSPMQQEILKVYEEGALMAAEEIPEYITKIAKQAQPSQSDLVRYKLWLQQKYRSPYTGEVIPLNKLFTRAYDIEHIIPQSRYFDDSLSNKVICEVEVNRDKDNSTAYEYIKNNRGKKIELSYGKEVTLFTIEQYEDFVKRHYSGSRSKMKKLLMEDIPEDFIQRQLNDSRYISKVVKGLLSNIVREQYEEEATSKNVIASNGAITSALKQDWGLNDVWNDIITPRFERLNTLTNSKNFGDWTNKEGKQVFQTAVPLELQKGFSKKRIDHRHHALDAIVIACASRSHINYLNNQSALEKGKSKEQREKLRYDLKSKLCFKKNNDDKNYKWIFHKPWESFTQDVRDTLENMVVSFKQNLRVVNKTANQYQRWEKDATGEMKKVLAKQTKGERWAIRKSLHTPMPYGKRNYDFDILKVAENIGKADLIINQNIKESAKAVLEKCNNKIKRAQEFLRTNPIKDENGNEINNAAFRFKTEKFRRRQPISKLSNRGQGGLKTFDDVIKFIDKVADYKIRQDLLLHLNKNENDIDKAFSAEGIEKFNETRSIPVYKLPIFESGTSRFAVGQKHNTQHKWVEADTGTNLFFAVYQDENCKRVFETVPLNEVVEHQKWRATLTKEEQKITPLIPIKSIKRQFLFSLSPNDLVYMPDEDERENLNNLNLNNLTKEQIKRIWVVNDFSSAIYFTPNHFSKSVAPKEVDLNRDEKNNKLKGSFDSKTASFKGVQIKEYCIKLQVNRLGHIINSVKLSLFDEPGESFHQLPRPSQPDKPLVE

SEQ ID NO: 6685 - protein, 1088 aa, unidentified
  REGION 1..1088: note = Description of Unknown: Cas Enzyme sequence
MKKILGLDVGIASIGWAIIEAFDEKRINKRSGEEPKSDINNDRIGIHKDAVGVRIIPQDSDNVKSYTEGKKLNTGKTKTPTAKRRQMRGSHRMNNRYKMRREKLINVLEHLKMLPEGAIFRKKNENGEWEDIRENSELYTNVEGERGEGNDIGRALYELRNKAINEQVNLTEWGRIILHLNQLRGYSSDRFKKEEGEKFDYLSGTVANISEKPLLIKYDDESESKDIIPEKQDNVRWEKYEIKIKLDEPLKNIDEEGTEKIIESITGNLYTRKLRFLKNSPITFCYREFKKEIKIEYVEPKPDDWRAKYKLLNQTLEEWCVNGGTPGSFFYTHFYDEEYLKKHPNEKRLDRIRNNVVNRDWFEQEFNKIYDVQFEKHKSSFENLKIDDVVAVAFKDGNILDEVKKKNDSIKEQLRYLIKDKIIYYQRPWQQSKNKGRCRFEKIPDVKPDAQNPGRYIKTGKYIGRTVIPRSHPLYQEFKVWQEVNNVRMWYHAKEGKPIELMSNAEECFQLLQKYPNEIKELLYKRLQEKKEVSWRTFVNETFGVNIKIDEDEKKRPATNETYYSVNFIKRARSGKEQDNKLKGNTTKIAIRNILKGEGDTWFNAIANTGKDNHKEEILKQTKHSPKDYEISNLQLLWELIYDITVVSRDEVKDNITKHFSELQEHAEELSKMQFDNTGMAQLSAKAIRNLLPLMSDGTNITDKAKARIQSLINLNKSNEEKSKSDDEKLECIKDFVSDKNARKKLSQFNTFDDFKYLNYWEAAAVVYGSHSTKKTNRIEKLERVKPHSMNNPVVEKIVNETIMLVNDLKERYGFDEVRIELARELKASREEREQIWEAIQSNTKKIQLAKAMLRELKKEDAANDLNVDSSNKNNLDKIKIIEDVVSRLKGKEHEVKRKEYKVDEPTKAELKKYLHYLEQNFKCPYTNQPIPLNEVFSKYRKVEIEHILPRERYPDYSYGNKVITWVEVNSLKKELGNRTAYEFIVSKRGQDEIKLANGRTVRLVPKESWKEHVERMFPKGKKRRYLLLKEIPEDPIERDLKETQYINKKLKEELERLCPERVWTTTGAVTDILRESWHLNDVMKELM

SEQ ID NO: 6686 - protein, 1280 aa, unidentified
  REGION 1..1280: note = Description of Unknown: Cas Enzyme sequence
MKKILGLDLGTNSIGWALVQQDFNDKEGEILGVGSRIIPMDQGLLGKFDAGQSISKTSERTSYRGTRRLYQRSNLRRERLHRVLNVLNFLPKHYSDKIDFKDKKGQFRDDSEPKIPYVKDRQGKHEFLFKASFNEMVSEFKETHPELLENGKKIPYDWTIYYLRKKALSQKIEKEELSWLILNFNQKRGYYQLSEEVEDIEEGKKKEFVTLKVKEIVDTGDEVNGNKLYNVYFENGWKYDKSIVKTENWIDQTKEFIITESKLKNGELKRTFRSVDSDDDWIAIEKKTEQEIQASKKHVGEYIYETILSNPKQKIRGKLVKTIERKFYKKEFEKILETQIQLHPELQSDELYYKCIRELYPNNDAHRKSIKNRGFLYLFKDDIIFYQRPLKVKTHLISNCSFEYRIRRDNKEKVYLKCITKSNPLFQEFRLWQFINNLKAYEKEKVINGKKRFDVDVTNELLGSVKDRVDLFEWLNDREKLSQDQLLSHLKLNKETHRWNYVEDKEYPCNETRAKFIKLLKKTKNLDKVELTSKTTQKLWHLLYSVTDPEERKKAIAKFADSHNLNEAFKQVFSKFPPFKRDYGSYSEKAIKKLLPLLRMGEYFSWNNIHEQTKARIEKLLTGEFDEKIRDRVREKSIDLQKENDFQGLPLWLASYVVYDRHSEVNDNNKWKTSQDIADYLNPKLKNSFKQHSLRNPIVEQVLTETLRVVKDIWDEYGNGEEDYFDEIHIELGRSMKNDKKTRERLSNKVTENENTNERIKALLEELKNEVQNVKPFSPSQQEILKLYEEGVYQNETRKDELENAQKIRKKSSPSKKDIQRYKLWLEQGYISPYTGSPIKLSDLFTHKYQIEHIIPQSRYFDDSLTNKIICESEVNELKDNLTAYEFISKYGGTIVSIGSNKEVKVFDKDNYEQHVDSYFSKNKIKKERLLADEIPESFIERQMNDSRYISKTVKNLLSKIVREEEEQETTSKNIVALPGSITSKLKHHWGLNDIWNTLITPRFKRMNELTKSEDYGNINPNTNKFLPKVPNEINKGFSKKRIDHRHHALDALVIACATKDHVNYLTSLNTERENFKLIEKLRDTKTIQKEKVMANGDKKLIKRRVAKNYLKPWDTFTEESLDALQSIIISFKQNLRVINKATNKYEKWTLENGEKKKKLVEQKGTNWSVRKPMHKEFIYGKVNLPFVKVPKDKSTTAIREEINTSFKSKKIGSITDRGIQKILINHLEKFDDPKVQIDTSTITSKIQKRVQMVKDKVITEHPEIKVNRINQYIKQESLR

SEQ ID NO: 6687 - protein, 1375 aa, unidentified
  REGION 1..1375: note = Description of Unknown: Cas Enzyme sequence
MKKEKVYMGLDLGTNSVGWAVTDNDYKVLKFKRRAMWGVRLFNEANPAVERRVARSNRRRLARKKQRVAWLKEIFKNSISEIDPEFFDRLEQSALWAEDKNVAGKYSLFNEKKLTDKTFYRKFPTVFHLKKALMDGKIKKPDIRFVYLALSHYLQNRGHFLLENELNSVEDIDIRDIFNSLNERIHVLIDSGDDMVPAFDLTNLDDLKQIATDTNISGKTQEKEAFIKTLLNGAKQPALEAIIKLCTGGSANLSKIFGDMFEFESEIKSISFEKANFEDEIAPKLQDCLGDYYQIIELAQQIYSWYTLYKVCSGRPSVSHAKVEDYEKHKEQLSHLKVLVRKHFSKNVYREIFRKEDDKIHNYVSYISGKKDRDEFYKYLKKTLEKKSTFKKTSEFENISRAIEQQNYLPKQRVKDNSVVPQQLYKQEIVKILNNLSSHYPFLSQKTDGISNREKIIKIFEYRIPYYVGPLCDIHRAGDDGFSWLVRDCSKKITPWNFEQVVDIPQSAENFIKNMTRKCTYLKQYNVLPKNSLLYSEYSVLNELNNVRIKTKKLTPKLKEKMLNTLFRQKKNISITSLIHWLVSEGVYEKGEIEKSDVSGVDSNFTSSLSAAISFDRIIGEKMKNKKTQKMVEEIINWLALFSDKKILQQKIVEKYQDKVSQEQIGKILRLNLSGWGRLSSEFLQLKNSQPGEHDGKTLINIMRQTQMNLMEIIHSPQFSFNTVIETEAKKQLTGHITHSHVEALYCSPVVKKQIWQALQIALELKKTLKKDPNKIFVETTRHEGEKKRTTSRHKQLLELYQAAKSHLPDLTKSIKELNDALKDTEPEKMKRKKLFHYYKQLGRCMYTGRPISLEDLFTNKYDIDHIYPQSLTKDDSFTNTVLVERLSNAEKSDAFPLDSKTRKDRQGLWRCLRRNGLITKEKYYRLTRETPLSEEEKAAFIRRQLVETSQTTKEVIRFLATLFPKSKVVYVKSGNVSDFRRDFSPSLPENKTNGKDPKGITDYSMIKVREINDLHHAKDAYLNIVVGNVYDTKFRYRGKDLTAIVREKARQYHLSRLFLYSTDGAWIGAADENRGKQRPSIETVIAEMRRNSCQVTWEAVFKKGQLWDMNAKSKRPGLLPIKKELSDTAKYGGYQGKTASYFVVVEYENKKGEREKKLESVPIYVKALSKQKPDAVNSFLRDTLGLEKPSVMVDNIKIGSIVEINGARMVLTGNNEVLVFGRIASQLILDITMAAYLKRMFKLLADTAKIKENNVYFKNCGYLDKETNLAVYDTFIAKLKLPRYAQIITHSLYEKMESNRDVFINLSLADQCNLLAGVLPALQCNSQNADLSLLGEGKAVGNIAFSKNAILKKNQVRLVDCSITGLFENSRNMA

SEQ ID NO: 6688 - protein, 919 aa, unidentified
  REGION 1..919: note = Description of Unknown: Cas Enzyme sequence
MKKILGLDQGTNSIGWALIENDFENKEGRIIKAGTRVIPMTQDKIDDFGKGNSISETAERTRQRSMRRLRERHLLRRERLTRVLKEIGWLTSEFQPEKDFIAYSPDNTSNKNKFLFEASYNEMLSLFKKKNPHIKNVPKDWTVYFLRKKALKNKISKRELSWILYQFNQKRGYYELRTEDEEDFNTQKNKQEEFIKELVTNVQETDNKGIYEITLSSGTKAITPSKQKAKPAWENHIMEFIITSTTLKNGQIKKTIRAPKEDDWHLRKKKTEKMIDYEGKHPGEYIIDLLIDNPAAKIRGQEVHTIDRKYYREELKAILNKQKEFHEELKDKETYKRCLNLLYPNNKAHRNKLMNQDFTWLFTNDILFYQRPLRSKKYLIEGCKHERRYYYENESLKEIKVKAIPKSHPLFQEYKIWSLIHNLRIFKLEEEDAHGIVHKDVEKTEQVLTYDSKTDLFELFNDNAEVSQKKIIEKVGLNEAEYRLNYEEGKKLPGNTTNAIFLKTFKKASALEEGQEFLKDKEKVEALWHKLYSLERKEDLKSALENHQFGFPQNAIEAYTHFPKFKKEYGALSKKALKKMLPFMRCGKYWSQPEIEQKVSEFLAWKETTEYENLTPKIKDQLDGLEALNDFQGLSVTLTEYIVYHQHSEDKAIKKYHSPEDIELYPQHSLRNPVVEQVLNETLKVVKEIWKNYGKPDEIHVETARELKSSAEKRQQMSKKIDENERTNKRAKAMLRELQQSNPEINPYSKGQLDLFKIYEEGALNSVKEIEDDIYKISRQGDPSSSDINKYKLWLDQKYLSPYTGQPIPLTGIFSDGYEIEHIIPQSRYFDDSFNNKVISETAINSKKDKQTAYEFIYNHGGGTISLGNGKQVTILPKEEYEDNCNKIFRHNRTKLKNLLSYDIPTSFIERQLNDTRYI

SEQ ID NO: 6689 - protein, 1150 aa, unidentified
  REGION 1..1150: note = Description of Unknown: Cas Enzyme sequence
MKKVLGLDLGTTSIGWALVNEAEHDNEKSEIIKTGVRVNPISTEENSDFEKGKATSLNAERTDKRGARRNLQRYKHRRAHLINVLKQNKIIDINTNLSETGKKSTHTLWQKRAKAAKEQISIEDFARVLLAINKKRGYKSNRKTKDEPDDQAIEGMDIAKILYEKKITPAQYTLILLNQNKKKIPEFYRSDLQNEFDTIWEKQKEYYKDILSDELKSNLEGKNKGQTWKICEEPFEIKGINLKEKGGDLKKKLYELRVKALSEKLDLENLAIILQEINGQINNSSSYLGEISDRSKELYFKQQTIGQYLYGQLEKNPHNQLKNQVFYRQDYIDEFKQIWAIQKKGREHILTEDLKNEIHDLIIFYQRRLKSQKGLISVCELEGKEVDEIIDGKSKKMFIGPKAIPKSSPLFQEFKIWQILNNIKFTHIETLEKYHISELDKELDYRTHMFALLNTKGKLSANEVLKAVIDKPKEWEVNNFKDIEGNSTNQMLFKAYNQIVELSGHEIDKKNELESITQIFNALGVNTEILHFNADLQGNEFEKQPAYQLWHLLYSYEGDNSKTGNEKLIKLLEVKFGFNREYAKILVNITFPDDYGSLSAKAIKKILPYLKAGHEYSEACKLAGYNHSHSVSKEENEKRELLDKLEILPKNSLRNPIVEKILNQMVNVVNALIKEYGKPDEIRIELARELKKSAKERAEMTSNISKTTRLYEEIEKKIKTIYPFTSGVRVTKNDIIKYRLWEELSSIGYKTIYTDTYIPLEKLFTKEFDIEHIIPKALLFDDSFSNKTLAVRDFNRIKSNKTGLDAVTEKYGKESTGYKRYLNNAEKLYKEGKISKAKYNKLLIAGDKIPEGFIERDLRNTQYIAKKAQELLKKVVNAVTPTTGSITDKLREDWQLINVMQELNWDKYNKLGLTDYEINKEGKKIPVIKEWSKRNDHRHHAMDAITVAFTKPSLIQYFNYLNARRDETHKKHSIIYAIEQKETFVNDKNKRIVKPPIPIEQLRMETKKHLESILVSFKAKNKVVTRNINKTKKKTGTNIKIELTPRRQLHNETVYGCSKKYKTKMEIVGVKFDSEMIQKVAKKSHREALLSRLQENDNDPKKAFTGKNAISKKSIFLDEHETEKLPEKVKIVWLEKRFTIRKEITPGNFE

SEQ ID NO: 6690 - protein, 1366 aa, unidentified
  REGION 1..1366: note = Description of Unknown: Cas Enzyme sequence
TKYRSIRRLRERQLLRRERLVSVLKIMNWLPNDFNPKKDKIAYYGNTFVFTDRHARLLEEFRKRNPEIKNIPYDWTIYYLRKIGLTEKLTPQELTWIVMQFNQKRGYYELRGDESADENIPDNKEFIDAEIKEIIDTGEKNKNLKILEIHLDNGMSGTINLKEIPDWKGTRKELILTSRKLKSGEEKHTFTFPDENDWTLRKKKTEHVIASQKKHVGTYILDTLLEYPNAKIRGKEVHTIDREYYKNELSDILETQKKYHPELSNTELLRDCVLGLYPNNIVHQRKLLGKDLNYLLVHDILFYQRPLKSKKSQIDTCKFEKRFYMKDGEKIEAKVHAIPKSHPLFQEFRTWQFIHNLRILEREKTVESKSYLDFDVTDEVINAEIKERLFEFLKLRKDISQKQLLKFFNLNEKYFKWNFDEDKTIDCNTTIALCISKLKSVNKSPDVSSLLIHLNDVWHLLYSVPEKKGVKNGLKKLGFTEEEATSLSTIPKFKNDYSNYSYKAINKLLSVMRCGSNWNADNIDSNTKQRIQKLIDGEVDENISERTRELLAGKTQFEDFQGLNLTLAEYVVYGRHSERETEEKINNVNDVPQIQQHSLRNPVVEQITNETLSLVKDIWKKYGDANNPYFDEIHIELSRDIKKTKKEREKQNKRISDDEQWNRRVHAILSELKNDPEIEGHINPESPAHIEIFKLWESARDQNKAEAHEEIKSMFKKPLEPTISEINRYKLWADQKHLSPYTGKPIPISRLFTREYDIEHIFPKSRYFDDSFNNKVIAERGVNEKKGNQTGLEFILNHGGEIVRLGHGKEVKILEKENYEQLVKRLFFNNRAKLKNLLREEIPDSFISRQLNDTRYISRKTTELLAPLAKDKLVLTNGTITTKLKNEWGLNDVMKSLVWGRFERMNTITGSSEWLYKENDTKWILNGYSKRIDHRHHALDALVVACTTQSHIQYLNTLNAQYKDPAKREKFRHLVFIKSNKFKLPWDSFVPDTKNQLEKTIISFKNTNRILNRGNNTYQKFTTDGSAEKKVLQKQTSPDLWSVRQPLHKETVYGKIKMRDYKKNVAIQNTVNQIDLIADKKVKKAIKGQLIACNGDIKELKKKLKKHPLEINGQQITKTDLIEYKDVSVARKPLDTKFTHGTLDKVVRNDLKQQLKMHLDNYDGNPEQAFSEQGLIVLDKKLHHPVRSIRLYEDLGKKFQLGTNHGKDKKYVETAKGTNLFFLIYENTETGERIINDSSSLVLKDVIELKKSNLPLAEKKEGYHWFVLSPGDLVYMPDENEDVAGINWQELTKEQVNNIYKMVSCTGGVCYFLPNHSAETIAPKIEFGSNNKTERSIKDGRMIKQHCIKLQCDRLGNAQPAKFETS

SEQ ID NO: 6691 - protein, 940 aa, unidentified
  REGION 1..940: note = Description of Unknown: Cas Enzyme sequence
EFDLIWEKQREYHPDTLTDDNRRRIRDEIVFYQRRLKSAKGLVKKCRFERNKRVAPMSSFLFQEYRMWQILNNIRVPYGERVSEALNEGEKQTIADALAYTEDISQAQVKKALKMPRNAAFNDVPLRIPGNKTRAKIVVAVGRPYYDNLSDEEKRHLWHVLHFAEDPEWIEEHALERLGMSAAQAKKFAHVHLEKDYGNLSSKALGKILPHLKEGYEYSEACAKAGYHHSWDEEKDGKDRELEPVAIFHDEGIVNSPIVKRAIYETVALVNAVAKKYGKPNEVRLEMARELKKPKDVREKMRKGNQEKEDLRDAYRKFLKEKHGVEPSGADILKFELWLELEFDERDLEKRNGDVDIEEYKKFAKNISVKDVEKFRLWLECDRISVYTGKPISLGLLFSPEIEVEHIVPYSRSMDNSFINKTLSEKSFNNDKKNRLPMEYLKGRPEENAYKARVKHFSQAKREKLLMEKIPEDFLNSQLNNTAYVAVEVKKCLKQAYRDVRITNGQATGVLRREWGLNGLLRDPDAEGVSPAVKSRADHRHHAIDALVVALTTDGIVNRLSRLSQQDIRVKKPISSLKTEQDVESIKDRGDRDLVIRHINKHGGMENIRKALEEPILHDPMRDGSTRTLRWVYMNSVPLPWGGMKPSALRRLVEEKLKTVFVSHRNKKRLVTSKLNKYKYRRGEKLKQKTFAARGALHEETNLGVIEDSHRGGETIYVTRKSVETISTKKHIEKIVDPEIRKIILRHVEKNGGKIPAAMKVPILYNAKKSGKEIPLKTVRMEVRESNPIQIRPDKNKKLFVASGANYAVGVYEDDEGKRAFEVLRFYDAVQKRLRGERLFPAEIDGKKFIYTLKHNDMVVVYKESPDEIDWDDKEDLFERLYKVVKYAVTKRVWFRKHNLAQTKEGLQDPTEKAPRFGNVNIAKNSIKVEVDRLGTIVRR

SEQ ID NO: 6692 - protein, 1052 aa, unidentified
  REGION 1..1052: note = Description of Unknown: Cas Enzyme sequence
MGKVLGLDLGTNSIGWAVIDEEEQTPLLNSGVKIFPEGVKLEKGNEKSKASERTQLRSARRINNRRRKRKIETLKVLIEHKMVPLSIEELEGWENSKQYPKSVEFMNWLKTHEDKNPYFFRNLASQKKLDFNDKDHRFMLGRAFYHISQRRGFKSNRLDTTQDESIVDEYRPILNAILEQTTNINDLIIKFDQYLEDNETDDSVVNALLQKISKSISYLKKNKHTVFSEEKEKLSKIINKEEKLGAVKDNIRQLSKNIEDAGCETLGQYFWLQYVKGKKIRDNYTHREDHYLKEFNLICDKQNLDKAIRKELHKAIFFQRPLRSQKSLVGKCTFEPAKARVAISHPVYEQYRMMAFLNNIRYKIANETDHNCYDCKPLSNKQKNEVVDLFYRKSKKQFKFSDISKALEKHHKTRLFFNYKDYTIVSGCPMNAELKNLFTDKKEWKKYSYTEKINYYKHIHFPKLKSPKGEHLFVVWNVLFSFNDRENLIEFAKKKLELDAINANKFALIRPKQGYANLSLKALRKINVFLEKGMMYSHAVFLANMSEVVGEKTWNDIEKREEIIKSVQEIINEHTKENKRIFAVNSLLKKCYDDSNWYSVKASDIYKDDIKKYLIKEFGDKQWTALESRQVLLESAFKSFESCLIEAENNKSRIFLKAKRIDEKITEFLKGKNEDGEVFCDDDNLLKKLYHPSDIEMFRATLNSDDGKKYLGSPMVSSVKNPVVMKGLHQLKHLINKLITDNVIDENTKINLELAKEMNDANVRKAIQRWQSDIENLHEKYRERIIEYYKKETGNTIEPQPADILKYQLWEEQNHRCIYTGQTIGISEFIGADPDYDIEHTIPRSISFDNSLENKTLCSKRYNREVKRNRLPANLENFESRRSFQTSEGELDCTPILPAIENWKTKYEELDKKIEATVRRSRAAQTKEAKDSAIQDRHIFTMKRNYWRNKYKRFTMTEVSSGFKNSQLNDVRSISRFAAAYLKSVFYKVYLINGKTTDEFKRIWGLPEKNRGNHTHHAIDAITLACINKSKNDILAAYYKDKGREHAEFPAL

SEQ ID NO: 6693 - protein, 1222 aa, unidentified
  REGION 1..1222: note = Description of Unknown: Cas Enzyme sequence
MEKVLGVDLGTDSIGWAIVQRHDTRYELLDRGVDIFQEGVARGDTGQEQPAVQQRTAARALRRHYARRRLRKIELLKVLVRHELCPPLTEEQLEEWKRRKVYPLTDEFLRWQRTDDRTDRNPYRDRYRALTETLDLATQHDRYALGRAFYHLAQRRGFRSNRKEAGADREEGKVKGAIRELSAEIADAGCAYAGIYFYELYRRGERIRTRYTSRTEHQLAEFEAICARQRLPDELCGALRRAIFFQRPLKSQKGLVGRCTFEKRKSRCAASHPRFEEFRMRSYVNNIRIETPADPAPRPLYPEEIEAIAPLFQRKSRPHFDFEDIAKKLAGKGRYACKGDRIEAPYRFNFARKATVSGSPVTAALAGLFGDDWLRELCRRYALGAGKSEERILDDVWHALFSFDDDERLRAWAKERLGLDDDEAARFAAIRLPQGYAALSLNAIRKILPALRAGYRYDDAVFIANLKAVLPPAIRADEAQRSAIEADIAALLDDYRSNPLNRATKEECIRDYLRDRIGSDESRLRRLYHPSMIETYPAARPDAQGSIRLGSPRTPAVRNPMAMRALHRLRALVNALLRDGKIDPRTKIRIECARELNDANRRKALESYQRQREAEHRKYADEIRAQFAEATGRAVEPTQEDVLKYRLWEEQKHICLYTGRQIGIADFIGDAPRFDIEHTVPRSRGGDDAQENKTLCESRFNRETKRAKLPAELADHAAIAARIEALGWPERIEQLRTQLEFQYRKSRQATTKQEKDAAIQRRHCLRMELDYWQSKLERFRMTELPEGFANRQGVDIGIIGKYARAYLRTVFERIYTVKGTTTAAFRRMWGLQQERTPKARTNHAHHCIDAIVIACIGPREYDLWARYAGDTERYERGEAGRPRCEKPWPTFTEDVRTLTDELLIAHHTADNMVKQSRKRLYKHGKALCDEAGNPRYAQGDTARGALHKQTFYGAILRDDEVQYVVRKPLDQLQKDDVEKIVDEAVKQRVKEAIAEAGFKTATDPAQYTVWMNREKGIPIRKVRIFATTVKRPLRLKEQRDASVHPHKRHYYAVNDANYCMALYEGTNERGRTEGSFEVVNRLEAAAFFKASADRASRPDLVPCRDAKSYPLKYILKPGTMVLFYENTPEELGECTPAELAKRLYKVTGISTTLIGQKYAYGVLTLKHHQEARPSGELKIKKGSWKIGEEYRPLIGMNHTQLNACVEGYDFELTVTGKIRFKH

SEQ ID NO: 6694 - protein, 916 aa, unidentified
  REGION 1..916: note = Description of Unknown: Cas Enzyme sequence
KEGKDKYDDDKKLSQRFSIPTEADWEKEWKLIKIKTENDLKESQKTVGKYIYDTLLQNPNQKINGKLVRVIERKFYKDELNQILETQQKHHIELQNKKLFYECLEELYENNESHRNGLGNKDFVHLFLDDIIFYQRPLKSKKSLISDCKYESRTFIVNEEKRIEPIKCIAKSHPLFQEFRLWQWMKNLSIYEKVTDKNVTDQFLKTEGDWVSLFEWLNDRKETEQEPLIKYLLKPLNLKPKDLTAEAARYRWNFVEDKKYPCNETHSLILSRLEKIENVPANFLTKETEENLWHILYSVNDKQEIPKALKSFSIKHNLGDDFVEQFKKFPPFKNDYGAYSAKAIKKLLPLMRMGKYWNEADIHQQTKDRIAKIINGEFDETIKDRVRDKAINLKEIAHFKGLPLWLTSYIVYDRHSEDGEIKKWKTVKDLENYLNPKMEGSFKQHSLRNPIVEQLITETLRVVKDIWNIYGKGEKKIFDEIHIELGREMKNPKSDREKITQQNIINENTNLRIKALLTELINPVYEVIDVRPHSPYQQEILRLYEDGIINNEEDVPDDILDIQKKFKETDIKKQPSKSDFTRYKLWLDQGYISPYTGETIPLSRLFTTDYQIEHIIPQSRHFDDSFSNKVICEAVVNGEQYKKNQTGLEFIKNFKGTIVTELSTPNHQVKIFTEEEYEDHVKRFFAKSRSKMKKLLLEDIPEKMIERQMNDTRYISKMVKNLLSNIVRADAKDDGTTSVNVLSSNGQITSTLKQDWGLNDVWNAIIATRFERLNVMTNSSNFGSINEKTKKFLPTVPLELSKGFTKKRIDHRHHALDALVIACATRNHINYLNNQNALEKGKNKEQKQKSREDLKYKLCDKKYNEGSNSSYKWVFKKPWETFTQEAKEQLQTTIVSFKQNLRVINKTVNKYESWKD

SEQ ID NO: 6695 - protein, 999 aa, unidentified
  REGION 1..999: note = Description of Unknown: Cas Enzyme sequence
MEYRMTLGIDLGPHSIGWALIEEEKIKGPLGGEPVAFLDTGVRVFPEGLDRNKGFEKSRSAKRREARGARKIHKRRNRRKERLKTLLRDNGLLPDDEANDALMLTDPYRLRADGLDRKLTLHEFGRALYHICQRRGFKSNRKTDDPKETGVVLKDINELRDEIKVSGSRTLGEFLYRKHHKDQSKRIRGHYTHRDMYIKEFELLWVTQKAHYPEILTEELKSDIGQRTIFFQRPLKIQKDLVGKCEYEQGKKRSPRGTWYAQRFRMLQDVNNLNITETSTGEVRPLTKEERELLVLTLGQKKDMTFDAMKKKLGLTESARFNLEEGERKKLKGNAIEWELRQVFKKDYDGLSAEVRDEIIHDLNFLDSEAVLSKHASTRWGLDDKQIERLNKVRTDSGYLNLSEKAIKKLLPHLEVGCLYMDAVARAGYERRDQREVEHTPCLEAKDIPSLTNPLVRSALHQVRSVVNSIVAEYGVPDKIRVEMVRDLKRSARARKEYSKKQKDNERRNNNASERLKAEFGIACPSRDDIIKYNLWEECNNECPYTGRPIPMGALFGGDFEVEHIIPYSRSLDDSYMNKTLCYTGENRLKLDMTPWEFYGTDTVRYGEILKRIKRMPYPKRKRFEMREVDDGFIKRKLSDTAYIAREVRSYLERVAGKNKVEVATGITTAHLRQHWGLQTILNTEDKKNRADHRHHAVDAVVVALTAPGVIKRLQRMTRGQSDVRLRGFPAPWEGFRDDVKKKIAAIVVSHKVRRKVAGALHEETNYGKLAVKGDKGETFFAIRKLVSVLTSNEVKKRIGDKRIKALIVARLKERSLDPDKDSHTKKEWKEALKEPIYLPNRNGQPIPIKRVRLHIPSTTMLDLGGRWVKPGSNHHIVIYEYTDGKNKGKWDGEVVSMFEAAQRVKDKKSVINREVGPGRHFVMSLSINEMVRVKEESLWKYYRVEIVPFSKQITFRLHTAATTKDNSEQLLKYPSTLKELLPEKITVDPMGRVRRAND

SEQ ID NO: 6696 - protein, 1064 aa, unidentified
  REGION 1..1064: note = Description of Unknown: Cas Enzyme sequence
MKKVLGLDLGSNSIGWALLEEKDGKAHRIIDLGSRIFTKAVEEKTPTPKNVKRRDKRLARRVLQRRARRKQRMMNYLVSLGLLPEELKDHPQPEKSLNKIGVPLNDDDGNPLKTIKGNSVYPNPYELRAKALDAPLAPHELGRILLHLVQRRGFLSNRKTMLNDMMNDPDVLSVLNELDEKDEQGDATEKAKEETAFKKDISELRNKISTANCRTLGEYLSKLPHHTAKRNRIRNGGHLRTDRQMYQEELDAIWIEQKKYHAALTDDVKEQIEQIIFFQRPLKLKENRVGTCSLEPRNRRAQIARLEYQRFRYLQDINNLQYLDLFEDKWITLNAAQKEKLKALFETKPAITFANVRRELKLDKSAEFNLEHGNKKLKGNITACGMKEALPEWDDLSHDDQLALVEDMLTIRKKSALKTRLMNHWNLNARTSVNLCLIEFEPGYGSHSLKAIHKLLPFLEKGELYSEARQKAGYGYEQEDEEVIDRLGMPPEIPNPIVSRGLHELRRVVNAIIAEYGKPDKIRIEMARDLEMNTKRYKAFVKQQKANTKANDDATKLYQEMGEKYPHLHLSKYPSHADKLKYRLWRDQKELCAYDLVGTKISEAELFSANIEIDHILPYSQSLDDSYMNKVVCHTRENRIKGQRTPIDAFGSDEDKWQQISGRLRHWDRGLKSKKNRFYMTSEDVQKRDFISSQLNDTRYISKIALEYLQPLGADISVTKGIMTSWLRHQWNLNSLIGQNKKNKDRVDHRHHTIDALVTACIDRTFYQNLVKLAKDLEKERSQFTPKDIHTDTPWQNLRKDLNIALENMIVSHAPQRKITGSLNEETGTGFVEGVGTVYRANLSLDFKLPQVKKIVDYEVREIVAKHLSVYGNDPKKAFAEGVTVYHKDGKTPIKRVRIVQSKTTRKKLEVTKFGIKDKQGNVFRWMAYGNMHHVEILQHKESGAYKGIFITMMEAHRRAMTGTKSARERGLLFEPMVMANHGEDAELIMALHINDLVSIEMADGKKFYRIQKLDGAGSRAMLRLHTAATIKNTDEEINLSISGLMQREMKLCRLNSIGKILND

SEQ ID NO: 6697 - protein, 1159 aa, unidentified
  REGION 1..1159: note = Description of Unknown: Cas Enzyme sequence
MIVKETSYEKLVFGLDIGIASVGWAVLGERRIIDLGVRCFDKAETAKEGESLNLSRRVARLMRRRLRRRAWRLTKLARLLKREGLIPDVAMLKQQPGKGFKTPNLWQLRMNGLDRRLNNEEWARVIYHLCKHRGFHWISKAEAKAADSDKEGGRVKRGLAGTKRLMQEKGYRTAAEMVLAEFPEAQRNKQGEYNKALSRELLCEELKKLFDAQRTLGNQYAGEKLEVKILGNGDKKSGLFWAQKPALSGEALLKMLGKCTFEKNEYRAPKASFTAERHTLLTRINNLRIVENGSLRALNDDERRIAVWQPYQQAGDFTYKQLGSALVRAGFLVQDSFKFAGLAYPSEMQKAEKAKNPESAVLVKIPAWQELRKTLIGAGLEREWLGVADEALDGQPDQLDRIAWVLSVYKEDDEVERELGKLNLPGGKKMIDALQSVRFDKFSNLSLKVLSRIVPLMEKGLRYDEACIEAGYHHSLPALEAGSEKTKYLPPFYVGRDKDGRLLFNEEMDIPRNPVVLRALNQARKVVNALIRKHGSPHAVHIEMARDLSKPFDERKKIERAQTEYRSRNENDRATFASHFNIMSSPKGRDFEKWQLYREQQGKCAYSLDPIDLNRLLEPGYVEVDHALPYSRSFDDSKSNRVLVFTSENRNKGNRTPYEYLGGKDGSDNWHRFEMFVNTNKVYRQAKRNRLLKTDFGEKETKDFRERNLNDTRYICRFFKNYVEQYLELHEESDVKRCVVVSGQLTSFLRFRWGIVKVRSDSDRHHALDAAVVAACGHELVKRLSDYSRRREMNQVRRGIEHVDKNTGEIINRFPAPWEHFRDELLARLNIDDQEALRASVDRLGTYSKEDLDRLHPLFVSRAPQRRNSGAAHKETIYAQPKALKEKGSVTQKVAVTSLKLADVDKLIDPHRNVKLYAALREWISKRDEREKRAKAIEAGAGRGKDKRELTTEEKAEIENLRALPRKPDKQGEPTGPIVRTVTMVIDKLSGIPVRGGVAKNDTMLRVDVFRHNTSHKFHLVPVYVHHAVTGLPNRAIVAFKNEEKWTEMDDNFEFLYSLHSNDLVQITHKNGETLMGYYRSCHSGTGTMSIALHDRHAFGDKTTSKRLYEKNPSKPLPNDKRGLIESIGVKTAANVAKYNVDVLGNIYPAPPEQRRDLA

SEQ ID NO: 6698 - protein, 1004 aa, unidentified
  REGION 1..1004: note = Description of Unknown: Cas Enzyme sequence
MIYTLGLDLGANSIGWACIDKKSNKITGLGVRVFKEGVARDNKGKEVSKNQARRLARQARRQNERRKQRKDLLIKCLRENNMFPLKESEEENFFKLDPYGLRSDGLYKKLSRFEIGRVLFHLNQRRGFLSSRKSSKEKKETGKMALAITELQKEIEEKECRTLGEYFSRLSRGKDRIRDRYTLRKMYEDELELLWQQQKGFHADLKDELKERLKKIIFYQRPLKSVAKFIGNCSLEPDKKRCRKDSLEAQEFRILEQINRLRYFDDDGVEQKFTQSEAEPLSGHRIEQRDALLQQLGVKKELSFKQIRKLLQLSADSTFNLEEGGKDKVIGNRTGYAFSRVFGKNWLGFSGEEKERIYQTVIAADDEKWLEEYAVSRWKLERDKAQILSSKLRFEQGYMRLSKKAIRKLLPFLREGWGYSDSLVKAGYKTGQNYRSVEEQLKNLRNPIVLKALYELLRIVRNITREFGKPDAVKVELARELKLPAKKRRQIQLENRKREKNNQEICARLVEMGVHPSSEALLRYKLWEECNHKCPYTGKEISFAALFSANPEFQIEHIIPRNRSLDNSFMNKTLCHVEANKRKRDKTPYEAFHGTAQYDEILQRIKSLHFPYPKQRRFAQKEISDDFISRQLNDTAYISREAKTLLQSLGYSVTVGKGQSTAELRYLWGLNSLHRKDSGLPDVKNREDHRHHAIDAAVVAMTDAPMLRRLSFYNQYAIRTSDRMPSSPHGWKNFREALGPFVKRILVSHQITKRARGALHEETFYGVTGRRNKHKRPLYAVRKPLNELTAPMIDRIIDPVVKEIVKDHLRFLGVDTDTPSFKIPSTAFKECLYMKTNSNKKIPIKKVRIQKASNKMFLLTKLNKTAVEPGNNHHMVIFREKGKQKGQVCTLFEAARRAKKGEPIIKRNLGEGKEFMCSLSENEMVLSGIDEADVDWKNPDHDALSPCLFRVQKISDKITLRHHLVARLKDDAGRAPGLSEHLPGAFKGFKVRIDRIGRIAKAHD

SEQ ID NO: 6699 - protein, 1026 aa, unidentified
  REGION 1..1026: note = Description of Unknown: Cas Enzyme sequence
MSKKILGLDLGSNSIGWALLEGENNELQQIIDIGCRIFIKAVEDKTPTPKNMKRRQARLARRVIQRRARRKQRMLNYLVSLDLLPSTLQGHTQPETILNELGDPYQLRAKSLDEALSSHELGRVFLHLVQRRGFLSNRKTLLGDMINDPDVLATLDELDEKDDQSGEEEKEFKQDISQLRQTIRERGCRTLGEYLSCIQSPESKRNRKRNGGHLRTDRQMYREELDLIWNEQKKHHAILTTAVKEQIEEIIFKQRPLKLKDDRVGSCSLEPGRKRVQIARLEYQKFRYLQDINNLKYLDNYTDTWNRLTENHRKALIELFDNKKNITFPQIRKTLGFDRSVEFNLEHGNKKLKGNITACTLRKVLPEWDEMPEEEQLNLLEDLLTIKKKSALKKRLMKHWDFDLRTTIDLCLLEFEPGHGNLSLRAIRKLLPFLEQGQIYSDALQNAGYGYEEDKIKPVKKLGPPPETANPIVNKALHELRRVINALIAEYGKPDIIRVEMARDLEMNTKRYKEYLRRQNANTKANEEAVEQYRVMAGKYPHLKLSSYPSRDDKIRYRIWKDQNELCAYSGKKIPLTTLFGIEIDIDHILPYSESLDDSYMNKVVCYAKENRAKGQHTPIDAFSSNPEKWEQIKQRISRWDKGLKSKKNRFYMTAQDVQQRDFINNQLNDTRYISRLACDYLKQLGADINVTKGIMTGWLRHMWNLDSLIGEDKNRKDRTDHRHHTIDAAVTACIDRRFYQELVRLAKDLEQRTSELKKRDLHINPPWDTFRGDLNQLLSSMIVAHAPQKKLAGALHDETGVGFIDGIGTVYRADLDHGFKMTQVKNIIDDTVRDIIEKHLQEHDNNPKIAFAEDKTVYHKDGTTPIRRVRIRQSKTTLKKLAQRKLGIKDHSGKVFRWMAYGNMHHVEIIRHRKTGKYSGKFITMLEASHRARGIHMPKQPIIKTDHGDDFEFIMALHINDMIEISGKYYRVQVLDRDGGRLELRLHTAATEKNKDEQIRKSISTLMQMEMKKIAVNAIGGIISQ

SEQ ID NO: 6700 - protein, 1254 aa, unidentified
  REGION 1..1254: note = Description of Unknown: Cas Enzyme sequence
VKKLSISIDMGAKNNGIFIAKIDDDKIVDKKAKCIVIDKNSIKFSKVSRRANRHKVRNIKRRKLAKRLLWEVLDREHFTKEQQELIQGLLNNRGYTYLSTSSEFESLQEESVEFIKVYYEDLKDLKTKDDFLEFLSDDKFSDEKTLLEFLDKQIEKLEIEHKKKKSDFYKEFRADHSIIKSDLKILKEFFINIQKEINTGSKPRTKYFKEIKEEIEKYDFIKDKESFFNLIGNISNLQLRVLRKYFNDKFDDRFDDEKLYKKLNDYFRRFHDKDFETKVFEVFNTTKSSKEFLEKCSPTLTIPPYEDMNNRNSYKCNSMLIKDSVITESLKKSVDRLLQNSAFKVLDEDGLTYAQKLQRILDINSKIIPSTIYPRNVFKHQKDNSDIKWYQDILQDGFNEFSQFAKRYYREEGKVLSGIYEDSFLFRRCNLNTPYKNNIKHILLRPIYSYEFTKDESDKFLKDIKSVRGLQTSLKRVSEEAKNYQNSFYHIIEACFNNEECIEDKNIKTIIKNIDKNLSDLKTILQGKDTYLATIDRVDSKNLKRVINIFKQTYEILFENISGFNKTCRHCTQENAVRSDEKCVIGKRLLSDVAKPIDGMLDMMLDRIAWEIVKDISKDDIEDVQNIEIVLEQNRFEFEENLIDIKKSGNNQIKQKKREYKDRLNVNVCPYTGKKFEKGDWDHILPRSKGIYNSKANLIYCSIEGNQNVKKNQDYTLEMIKEEHLKAIFGKDKNLEEIKEIIEKGLDSIDVEKFTNFDNLKLHQQIALRYALFMKGTKAYEKAFRIIKLDKIKTISNGTQKRLARKVHEKLVSKFSDEMKQIDVNSKVVDNKQVSATRNDLAVDQETGEVNHLFKTDIQDAHSHCIDAMVAFYLVNKDFDFDEIYVDNSAIDQVTKSKTFINSENIKSYKLFQDTVYSEHYKHFTKEEKIVDLLIKHNLLYINKDNNKIYIEDKNQIETVAKIDKIKLSNLLFEAFEQKNESLLKVLKPLDKKRYNTTRKDIINIFYSKEKLLPFEKIKDIPPYQEKTYKAVYKVLQKMETFDFNTYQEIMTKFFKLQKRKRNKKRHIFSLPSLGQNAKFRIKRGDQIAIVGSENIATKTFLVDGKLVQVPFFSKNVIPLKIADLLNAIKLNENAKAIYQVDINIDQIKEYVNKLVYTLTEASRLTVKVTLLKSAFDVDFDQIKQFNGAQDDEFRSFLQKYIQNKESILYSYLGSIRDTLNGKALLLDNSQHTITLQYKADINSYKKEIILNNI

SEQ ID NO: 6701 - protein, 1139 aa, unidentified
  REGION 1..1139: note = Description of Unknown: Cas Enzyme sequence
TVEFINSYIKDIKGLETKEDFEKFLSSEFEDEEKLVSFLESIIEKVDVESKKKKKDLKEFRDNYSIIEEDLKQLKKFFEAIQKEILTGAKPRKKYLEEIKEEIDGYEFIEDKEKFFNLVGNISNLQLRVLRKYFNDKFDDKFDDKKLYKKLNDYFQRFHNSEFKQLAKELQKYSSSKEFLEHISPFKTIPPYEDMNNRDTYKCNSMLIKDKLITKKLEDAIDSLLDTDAFKILNDDISYSKKLQRILDINSKIIKKEIYPREVFKYDRGDINWYKNILNENFEEFRDFAKRYYKEEEKIINGIYNRDFVFIKCNTNTPYKNNIKHMLLKPLYSYEFSKEEADEFINNIEKIRGLKGYLKSISEEAKKYQNSFYLFVEECFNDKGCVDDKAIKNIVKKLDSNVLKIKEILKDKNTYFLKIDGVNENNLKRVNILKQTYEILFKDLKGFSKTCKNCAVENSIRSYEDNPIAKRLLSDVAKPIDGMLDMMLDRIAWESIKDISKDDIKGVKNIDILLEQNRFEFEENLTNIKKSMNNKIKSKKREYKDELKVDICPYTGKKITKGDWDHILPRSKGVYNSKANLIYASVEGNQKIKKNRILKLQNLSKEHLKQVFKTDDLEKIKEEIRSVMEQLDESNFTNFDNLSLKEQRALRYSLFLENSSNEYKKALRIIKQDKIKTITNGTQKRLARLIYEKLIQKFPNEMKNIDVNCKVIDSRLVSATRNSFSIDPNTGEVNQLFKEDIQDSFSHVIDAMFVFYLANKEKFDFWKSIYTNGLEVGIVKKAKTFLTSNDIKSFKLFQDSIYSENYKHFTKDEKHIDFLIEKGLLYIKKKNKKIFIKDKNEIEDIAKIDTIKLSNLLFEAFRNKDIALLQKLKHLDKKRFSTIRKDIKDIFYPKDKLISFEKIKIPPYSEKTFKAVYKKLKEEIGEEFNEKKYKEAMSKFFKLKNRKRGKRKDIFSLPIPGQNAKFRVKRANQIDILANEDIATKTFFINNKLVSVPYFSKNVLPLKIEDIINILKLDESAKYIYEVEIDTHEVKDYIKKLTYFLTEASRLTIKATLYKKSFNINFDEIKEFNGKTDEVFRKFLQEYIQNKNSKLYPYIGSIRGGLEGKATLLKNTNDFITLEYKAEMSGKKSIIIKNL

SEQ ID NO: 6702 - protein, 1471 aa, unidentified
  REGION 1..1471: note = Description of Unknown: Cas Enzyme sequence
MKRILGLDLGTNSIGWALTQQDFIKKEGEIKGVGSRILPMSQDVLGKFDSGVSISQTAERNGYRGVRILLQRSLLRRERLHRVLNILNFLPAHYSDSIDFKNKYGQFKKNTEVKLNYRKKENGKYEFIFINSFNEMVKDFERKGQNIKIPYDWTLYYLRTKALTQKITKEELSWVILNFNQKRGYYQLRGEEEELVEGKKKEFLVLKVKELKDTGEVIKKTGDKLYQIIFENGWIYDKPIVKKENWLNKSKEFIVTTSIKKDGNIKRTYKAVDSEKDWIAIKKKTEQSINNSKKTVGQYIYETLLIKPNQKIRGKLIKTIERKYYKDEFKQILEEQIKHHKELQNRKIYDDCVQELYSRNEAHQNNIKDNDFNYLFTEDIIFYQRPLKSKKSTISNCQYEYRSFNKLVEIDGVKKTVKSRNSLKAISKSHPLFQEFRLWQFLKNLKIYQNVAEIDSKTVLDIDITNQLLKTEDEWVDLFDFLNTKKEIEQHQLLTYFSNKKLIPKQKKEKPNYRWNYVVDKKYPTNPTKALLLTRLSKVNGVEINTFLTKKNEQQLWHIIYSVKDKKEYEQALKTFARKKNIAVDAFFDNFKKIPPFKSDYGAFSEKAIKKILPLMRRGKYWDESIIPVEVKDRVASIIERVENVKFDKNHKNFNDELNRLSDDDIPKRLLKSFIDFKEKNPLTSLNTYQACYAIYNRFTEVSVVTYWKTPMAITEFLDNFKQHSLRNPIVEQVVTETLRTVRDIWEFYGEGKEKFFDEIHIELGREMKNPAGKRESMSKRNIDNENTNHRIKEILKELKNEGINDIKPYSPSQQEILKIYEEGVLKNPDVKYNDKYKEDDIDKIRKKSSPSKTDISKYKLWLQQGYISPYTGMTIPLSKLFTTDYQIEHIIPQSRYYDNSLSNKIICESEVNQLKDNQTAYEFIKKQGTQKVDLGQGKTVTLFNLETYEKHCNQYFKNNRGKLKKLLSEDIPEGFINRQLNDSRYISKLIKGLLSNLVREEDEQEATSKNIVPVTGSITSKLKQDWGLNDKWNEIIAPRFKRLNELTKTNDFGYWDEKINAFRTQVPDEIAKGFSKKRIDHRHHALDAIVIACCTKKHTNYLGALNAEKKNYGLRDSLLIKNEKGDYTKHFLKPWKNFTTETKSNLEKTIISFKQNIRVINKTNNKTWQWVEKDGRFKKELVRQTKGDNWAIRKPLHKETVSGKINMPAPKGKIATASRVLLSEIKTQKHLEKITDKSIQRILEKHLNNYLDDKEKKQFDLAFNQDGLEELNKNIKALNNGKNHHPIYKVRLFEIGSKFIVGNQGNKKDKYVEAAKGTNLFFAIYYNKEKNKREYETIPLNRVIEHQKLDALLSKKERTPVPIDVNKGQFLFSLSPNDLVYVPTDDEMENPNAINFNNITKEQVSRIYKMVSTTQNKLQCIQSNVAISIQNKFEFSSLNKMERDIEGNMIKDRCWKLKVDRLGNIIKIIK

SEQ ID NO: 6703 - protein, 1025 aa, unidentified
  REGION 1..1025: note = Description of Unknown: Cas Enzyme sequence
MSKKILGLDLGSNSIGWALLEETDGKPNRIIDLGSRIFIKAVEEKTPTPKNVKRRDARLARRVIQRRARRKQRMLNYLVLLKLLPAELQGNTQPEIILNELGNPYHLRAKALDEAVTPYEFGRILLHLVQRRGFLSNRKTMLGDMIDDPDVLSILSELDNKDKTSTGEEGQFKEDINRLRIAVKENNSRTLGEYLSKFDHHDCKRNRSRDGGHKRTDRQMYHEELDLIWLEQKKHHLGLTSEVKAQIEEIIFKQRPLKLKADRVGKCSLEPSRKRAQIARLEYQKFRYLQDINNLQYLDYFTDKWVKITNEDKSKLKVLFEQKAVVSFIQIRKLLGLDKSNEFNLEHGNKKLKGNITAYEIRKILPQWDEITAEDQFALVEDLLTIQKKSVLKNRLVNHWGYELPVAINLCLLEFEPSHSNLSLKAIRKLLPYLEDGQIYSDARQSAAYGYEVETIKPVDKLGMPPEIANPIVSKALHELRRVINALIAEYGKPDIIRIEMARDLEMNTKRYKDFISRQKKNTSENDRATEAYQMMGNKYPHLRLSKYPSHHDKIRYRIWKDQQEMCIYSGQKINLSTLFSAAVEVDHILPYSQSLDDSYMNKVVCLEAENRVKAQRTPIDAFAGNQDKWEQISQRITRWHGGLKSKKNRFYQTASDVQERDFISSQLNDTRYISRVANDYLKQLGADINVTKGIMTSWLRHQWNLNGLIGHDRSAKDRIDHRHHTIDAVVTACISRKFYKDMVSLAKELERTHSEFKMRDMHFDPPWNNLREDLDSSLSKMIVAHTPQLKLRGALHEETGAGFIEGIGTVYRANLNPEFKLTQIKKIIDDDVRNIVIDHLKKHNNKPKDAFAEGVVVYHKDGATPIKRVRVVQAKTTLKKLEASKFGIKNRDGKVFRWMAYGNLHHVEILQHIKTQKYSGAFVTTLAATHRARGIGMPKQVIIKTDHGDDHNFVMALHINDLVSLEGEIYRIQTLESDSSRVSLRLHNAATINIKNQGVRSSITTLMKLGMTKIHVNAIGHLLT

SEQ ID NO: 6704 - protein, 1196 aa, unidentified
  REGION 1..1196: note = Description of Unknown: Cas Enzyme sequence
MVIANGKKVLGLDIGSNSIGFSFLKLDEQNSQIVFEELASNSIVFSEPYTAEERRKARGARRLHRRKSTRNKNVRKIFVDYAIADKMFISDATRYIENLIIDDNDVYRLREKAVSGVALSREEFIFATYSIVTDRGYSNMFALVEEETEANKEKKKEDEKLNGFIQKNRDKYLANSYVLPSMVLTTQRKELEDRYQNIPIRNKKGDYRNSLDRQMHKDEFKQVVKSQSTNKEIFKSEKDCEAFISKIIEDKYNAFYQRPLKSFENMVEYCSFYDEFNPKGSQKRMPLANVANVELTLRQSIDNYEAIDKNGEVKKFTKNEKDQVVKFWLNMPSADKITNKNIYKNAGFKDIKIHIRDDKELLILNIQAYRSMLDVLNHHKIDFQGMQSEFYNEVLLELYYYKNHSSRVEHIDDIIKKYNIDVESSFIEDVAKLTYMDGFSAFSLKFASEVLVLMNKKEKIHSEALDLLGYNSKYLDMPSYDYLPPLEPSKADIEWLQKNIPHFETKHLFYQPMMSPKVKRVIAILRKLINELIAKYGKIDEIRIETAKEMNSKKEADKITKNQSDFKKKNTNAERFLKSNNINESYNNIERAKLFKEQECECLYCGKNLTNDEAFDESITEIEHFIPRSVIWINSQKNKILVHKKCNQNKGSKNPIVYLKSIGEWENFKGRIKLHSKNPKYKWLTDEATITSAMAKENWQESYLNDTRSATRAIQKYLNHYLYPNQNIHNKGGERHISSVSGKAISELKYMWGIHTVMPKNTEDKKDRNTNYHHTLDAFTIALCSPSAIQALHSHFKKNENKFKTKALKEKLFSNTPISSDGVNVVEHLKELVHKYETNAFYVCPYSKRKTNMKGFKDGNLKLYVAKDPKDESNEILAEMEKVAIDTSLLIKSVGGFPKPRSDEEVIKEIVSIQLRLNPTKQQNIIDAIKIYADEMLRLRSQINSVAKDIEIHKKRIKTGKQHQEFNDAIKLEMQPIQENSKSLSKQLQSLRCSFSIKNHKKQIVRTVKLHKVKISKSSADSILFSRRSSQSMERLSVFNFQNALENKEPFVIKENESTLCVELYAHPKQNQVVGLKYFSSIANPHIKTKFNEKYGNTFDDVEPTLILYKNDIIKVLNTKDNSVDYYLFNGGGNIAGTNNKISIKNINLNNFLSIDKQENIKESKESAITPNKHTIISKIKINFFGNITEDKQNEN

SEQ ID NO: 6705 - protein, 960 aa, unidentified
  REGION 1..960: note = Description of Unknown: Cas Enzyme sequence
MIERILGLDIGIASVGWAVVEHDSDNEENNKIVDSGVRIFTQAENPKTGEPLALPRRLARGARRTLDRKSKRMRDIKLLFRKYLDMPYRRLFGDEETIYHDKGRKEVWQLRDEVLKRKLSDDEFARVLTHIAKRRGYKSNRKSEEKKDSEGKKVLWAISQNEELLKGYETIGQAIYQSTKDGEKRRNKDDDFKFSVSREMLLAEVKLIFKKQRFYKNEKATKEFQDAYEEVFLRQLGFASVSNMVGKCTFEKKEKRAPKQSHSAEEFVTLTEIINNKMIDEDGRDVFFDEEQIENILNLCKQNKSVTFKKIRELLSIESSTLFKRVAYHDKNGEFLVPKEAEKQKLKNGFEKGFHELKKVVETSLSKLHWQTISQDRNLLNQIAEIFAHHKSDEKIKIHLEELFEKNNFLSESEKTIMIEALIENISFDKFIHLSIKAVDKINPEMKKGLTYDKACLAVGYKNIEGKKEKYLRPLNRDENNELTNPVVKRALAQTRKVVNAVIARHGQLDKVHIELTREIKKSHSDRRKVEKGQKEYQEQKEKVVKKFVERYGREPKGSELLKFRLFEEQDGYCFYHDKRMDITRLLERGYVEIDHILPFSRSLDDSMNNKILCFSKENQDKKNQTPYEYFTSIGHDWHRFEEIVKTAVRLSYGKKKRLLKKNFDENSSNDFKERNKNDTSFMSKFIKNFIENNLELTAKSKQKVFTRNGSLTSLLRHNWGVAQKNRENHYHHAQDAIVLAFATQSEVQKLSTVSAKHEGFIYEKKEDKSKKVRFEPPFKNFREAMDKSVEKIFVSYKSRKKVTGAVHKETIYSKDDNKGAFAVNGGMAENGEVKRIDVFKKEGKFHFIYLYPADFEKKELPNKTIKGKEVDDSYEFQFSIFKDELVYLKNKNNEYLGYFKSGESDGRFTIQRHFMSSTDRKVDRLTTGSLIALYKYHVTPLGEYNEIKQEKRQGTKRRK

SEQ ID NO: 6706 - protein, 1056 aa, unidentified
  REGION 1..1056: note = Description of Unknown: Cas Enzyme sequence
MSLKYRIGIDLGTNSAALVAVEIDDKNLATQIIHHEAILFSGPLENKQGNILVPKAQDRRIARQQRKQLQRKKRRIKHLAFLAPLLGVKPNQPLQQKTFPLEKGLKVPSIIYLRAISASQKIELHELLQVFIKMIKKRGYAGGFRVKTQGSDTGKVQTGANLLTKELAGSTLGEYILARIKQGLPARLRMDDYPDAENLYALREHVENEFNRIWETQSQFHDILSTTAKDPLTNEEKPLKDIFYSALFFQRPLKSFSHTIGSCQLETNLPRSPKAHPASQAFRIEKMLNDLRWGQKKYNDNKLSKQQKNILRELLNKQAEVSFSSVYKAFDKAGCPPTNEMKFSINRAQKESFKGNTTHAGFKALGLLDEWNQLEAITQTQVINFLAELTSAEQLNDENWHLKFKKSSAKANDNSSKAYRKFAPEMVGFINTIISTGKFNRLSSMKHFESGRTKYSIKALEKLTAYMTEYFCDEAEAIKEWYPNKKAEHTYETLLDAHEKTGNAVVDVALGQLRHIINACIKELGTPSEIIVEMARELGKGPTARNDIEKQQRKFEDIRKKAKEALEAISTPSTSTNILKYRLWKDQDVNCPYCNSSIGLEQLDDGSVNFEHIIPRSQSKVGRKYSEIVIAHRSCNDKKGNNLPLLSPLATNPNAVSAIKEMAQRLIKKGQKRKAMLLTLDDPTLVAEDDVLNNFSAWRIHATGWMAKLAHQWLVSIVAKPSHVYITKGGITSMMRWRLGLETVIPDLRFAEGLRIFDKNKNPIDKDTYQRWKMVFEGHPPSNNASNEIPQLDKRIDHRHHLIDALSIALCHRGITQNATNIFQKKYEAKLRENHALKLGEIKHMMREAAMKAIHSKIGWRDQALQAFTENSCQLHHRPDHYLNVRFYKDTAYGKIEERGKARLIIRKPLKELSDKSAEKVRKNLNLIVSDITRDHLLKTFNKRVTDGQTIETALTHPPITQTMYGKEKPILRVKCYFDLGADDARRVEFNGARQSGFKYLLSDGNAYLKAIINKNGEIDTKLSQPVALIDALNASNRPAKNEMRFYKGDTVKHLI

SEQ ID NO: 6707 - protein, 1056 aa, unidentified
  REGION 1..1056: note = Description of Unknown: Cas Enzyme sequence
MSKKILGLDLGSNSIGWALLEETNGKPSGIIDLGSRIFTKAVEEKTPTPKNMKRRDARLARRVVQRRARRKSRMLNYLVSLNLLPTELQGNTQPEILLNDLGDPYQLRAKALDSELTPFELGRVLLHLVQRRGFLSNRKTLLGDMIDDPDVLDILNELDDSDDKPVGEEGEFKQDIAILRQTIQDSGSRTLGEYLAGFDHHDCKRNRARDGGHKRTDRQMYHEELDLIWEQQKKHHSILSDDVKEQIDEIIFYQRPLKLKADRVGKCSLEPSKKRAQIAKLECQRFRYFQDINNLEYFQSETDKYVRLTDIDRENLKDLFEYKAIVTFAQIRSTLGFDKKALFNLEQGNKKLKGNRTACEIRKIFNDWNVSPHWDEMPNEDQFNLVEDLLTIKKKSILKKRLLNHWKYDLRVVIDLCLLEFEPSHSNLSLKAIRNLLPYLEAGQIYSDARQSAGYGYEVKETEIVDKLGMPPEIANPIVSKALHELRRVINALIAEYGKPDIIRIEMARDLEMNTKRYKDNEARQKKNTQANDEAVDKFQLMRQKSAHLGLSKYPSRNDKIRYRIWKDQNELCAYSGDKINLSTLFSAEIDIDHILPYSQSLDDSYMNKVVCFSAENQFKGQRTPIDAFSGNDDKWNQITQRIYRWHGGLKTKKDRFYKTAKQVQERDFISSQLNDTRYISRVANDYLKQLGADINVTKGIMTGWLRHQWQLNNLIGFDRKEKDRVDHRHHTIDAVVTACISRKFYNDLVAQSKDIERKSPELNMRDIHFDEPWATLRSDLEASLSEMIVAHTPQRKLSDELHEDTGSGFLEGRGTVYRKHLSDYFDLKCDSEKKAEKKLKAVVDFTVAEQLRKHLAKYDYKAKDAFADGVKVFHKDGRTIIQRVRIYQSTQIKTRKKLEKEKFSVKDKQGNIFKWYSYGNIHHVAIIHDLKKDIFFGEFITMFEAHRRAMTGTKSAKVRNVISESIIKKDYGEGFDFVGVLHKQDLVSLNIDGERKFYQVKSLGQLSQGNQPRPKLLPHTCAFGKEGEVFDSINNLMKNDDMLFHNINAIGKHLK

SEQ ID NO: 6708 - protein, 981 aa, unidentified
  REGION 1..981: note = Description of Unknown: Cas Enzyme sequence
SSVDMYALRSGKIDNYVDLLGKEDAQSLSRFVTKYYELIRKKVRTGIWSKADSMFKKCNNNPPYKANQLHNLVAGVLGVKIDSEKFVEFGSSVWQDKIGAKKISNYCKDLEELIKSHGNLFKSYVEEIGDKELKLLTTQEKKDKKLLDEMMLESVVETIADFFEIEDKYRARFTNYFSMAQLYSIIETKTSGFNKTCKWCSRENQFRATTHIEIDQESGEVITNANCQRLPSDTQRPFSGKIERYIDKLGYEIAKLKFEELKKCEATDIKIPIILEQNSFEYEESIRSAKIKNATKKSNDKLEKSKGKYLKSLKTKEERIKEFNTICPYSGKEIGSQSESDHILPRSMTRKKFGTIFNSEGNLINSHIDGNQAKQENIYKLQGIHDNYKQEMFQTINDVAIVTWIEEQINSIKSYKTFSILSHDQQKAFKNALFLPNHNEVYQKVVSWLRTDQSTRVNGTQKYLAKKIQTKLTEMLPNKKLEFEFVLVSSEDVSKRRKVYAKSNQLLQKQETQEASSHVIDAIIAYVSQIDEQPSADKVVDWSHVEDWIALKYEILLKSKSTNEKIEQMIQEDDFSKKNMQSLFSKSIFKEEAIGERYRPIVEVGDKIYVGYPKQIKSSQSLEFCQEISSKKELGHFRKIIEDKKYCSLTKDDDIKIFKIHKKEVSKASNLFFNDGYENLNHDKKEEANLVETIINRCKYFVKKYDVINAPQMIVKKDIQQYPFSEEWIRFDESWRAEIKENYKIKKEQGKDKYDITKVENQWISFCKKYFKIEKKENRYKARKSFSMVATASPPGTVIRVKRKTLQGGDIYQAVAIDNQQIKGEYAKVLLKNGKKTLSLAGKKPSAILKKELTVIKEKDIRDIKINQDKFFKEPYGEFDIEVIVNKTSVSVKKFPIGRVGVFINGSGKLLLRYMSMKKRTTAPLLSKSKQKDKQYGVKKDIVDLALKLSTRDGTVSNIKIHGQFIDFTLPFKNTKKLLDD

SEQ ID NO: 6709 - protein, 1141 aa, unidentified
  REGION 1..1141: note = Description of Unknown: Cas Enzyme sequence
MKKILSLDLGITSLGYGILNEKENNIYECIDHGVMMRDAPFDSKGNSKQSLWRDYASQRSLNIKKKRRIRQLASLFETYGLCSFDACMKVQYKNKITNKWKLRAEDALNRKLTYEELFAILAHMAKHRGYKSIATDDLLYELEVELGLIDDEMNVKDSDDEKRQVYAALKRLEKLKAEYKQETIAQVIHRAVEKGKFRSYRNHDNYEKMIRREDIEDEIETIIAKQCAFSAFDIGSDQCITFTERIKEIITDQVMPENDPSLFGNCAFYENEKAAPKYSYLYDLYKLYKTLADLKINGKPATKEDRKKIVSFLFGKVSKGKNIKELKYKEIRKVLNLSTDQKIFDKEDTMTIKGKKSDRTLVKFSFLSEIGKFPQLVTDIAEHPQYMEIFAQLAEVLRLHKTPQEAFKAIKLLCKSHTIEVVEREVLELIKSKNAGTLSVSHKFIMDVLPYFKDGYSESEAKEQLGVKTSEDYSTFSKSLKHLHLGKNNLFEKIQNKINNHAVKSLASWILRRITDLSWRYGIFDEIVIESARDTLPKSIRDAIDKSMREREKEVDKIVDQYKKEFPNIDRKMARKIKMLESQKFIDLYTGNIINISDLFEGRADIEHIVPRSLGGINADYNIVISHRDSNMQKSNRLPMDWLAENVDYINRVEKLFSDHLISWKKRKNLLARSLDETYVEVRDTKALRATSYLEALIAEVLKMHYPFPDVEHRKNGIAVRNIPGKTTSKTRSILGIKSKSRDTNFHHVEDALILATISRGWQNRLHKMLRNNYGKSEEELKKLWKAYTPHIEGITIADYVKEAYERFMSKGEESPFYHDMFGDVRSVSYWVNKKPLSASSHKDTIYSAKHKDPNDPSKTVPTIRKSILSAFASIKIVENRNRWSLDDFEKVYDKEIRQKLWLYRIGNINDPVYRAIEGRAQVFKDIINEYIYKDVGNNKEEDEIYKQKLNAFLNEPIVAANKPVYKVHFVDETFNSIVINRGKGNEVLVRTDDNFLAMIFAKGEKEKLHIEKVDVNSHKKLQNKDAMIIYLNEMIYLFNKKKIIHYGCLRSFSVKSAGGKYVKLFNPRFPSNPKAQPKKFSTGTSTRDVSVGSVTGVIKVHLDLTGKIKSYEKFGLISKELEERFLEECGYGSMEDDTYH

SEQ ID NO: 6710 - protein, 1118 aa, unidentified
  REGION 1..1118: note = Description of Unknown: Cas Enzyme sequence
MSLKYRIGIDLGTNSAALVAVELDDKNLATQIIHHEAILFSEPLENKQGTLTPKAQDRRMARQQRKQLQRKKRRIKHLAFLAPLLGVKPNQSLQQKTFPLEKGLKVPSIIYLRAIAASQKIELHELLQVFIKMIKKRGYAGGFRVQTQGSNTGKVQTGANLLTKELAGNTLGEYILARVKKGFPARLRMDDYPEAENLYALREHVEDEFNRIWETQSQFHDILSTTAKDPLTNEEKPLKDIFYSALFFQRPLKSFSHTIGNCQLETNLPRAPKAHPASQAFRIEKMLNDLKWGQKRNNDNNLSKQQKDILRGLLNKQAEVRYSSVYKAFDKAGCPPTNKMKFSVHRAQKESFKGNSTHAGFKTLGVLDEWNQLEAITQTQVINFLAELTSAEQLNDENWHLKFKKSSARANDNSSKAYRKFAPEMVSFINTIINTGKFNRLSSMKHFESGRTKYSIKALEELTDSMRGFEWSESDAVNDTYPKEKSKHEYVTLLDAHEKTGNAVVDVALGQLRHIINACIKELGTPSEIIVEMARKLGKGPTARNDIEKQQRKFEGIRKKAKEALEAIGTPSTSTNILKYRLWKDQDANCPYCNSSIGLEQLDDGSVNFEHIIPRSQSKVGRKYSEIVIAHRSCNDKKDNNLPLLSPLATNPNAVSAIKEMAQRLIKKGQKRKAMLLTLDDPTLVAEDDVFNNFSAWRIHATGWMSKLAHQWLVSIVADPKHVYITKGGITSMMRWRLGLETVIPELRFAEGLRIFDKDKNPIDKDTYQQWKHVFEGHPSHQSTNEIPQLDKRIDHRHHLIDALSIALCDRGITNRATKYFKVEHEKALRQNPILKAGKIKVMMREAAMKAIHSNIGWRDQALTAFSEESCQLHHRPDHYLNVRFYKDTAYGKVEEEGKARLIIRKSLRDLSDKNPDKVRINLNSIVSSINRDLLLKEFNQRIADGKTSENALTNPPITQTMYGQKKPILRVKCYYDKGAESARKIKFNGLRQSGYKHLLSDGNAYLKVIINDDGEVDTEKSHPVAVIDALNAPKNPASNEIRFYKGDTVKSLVNQKRYIVKQIKVSGGGRLFLIPVMETRPLRELKAKDGSISVSLSKVISLIVEERGYVRQPHSPN

SEQ ID NO: 6711 - protein, 1151 aa, unidentified
  REGION 1..1151: note = Description of Unknown: Cas Enzyme sequence
MKQVLGLDIGVNSVGFALIQINTISEDSAIITSGVRIVNEDPDFHGKFYTGNKASKNAGRTTKRMIRRLNNRYKHRRDDLIEVLEANGMMPDDDLMNRITSIEIYGLRDRATEEKVSLQELGRIWLHLNHKRGFLSNRKSKSDEESSSEYLQKVHQLEQLVADSTIGSYFYNQLLENPYFRVRENVFPRAAFIKEFDVIWQEQQKHYPELLTGGPEDSKRSSLYQLVRNEIIYFQRPLKSQKHLVSFCRFEPQKKVAPKSSPLFQLFRIWQQLNNLEARTIDNISIKPDEAQKKKLLSVLNDPTKLSARGTLAYSKILKLMDAPKDCILNYNLLEGNKTIITIYNALKAAGIENPEQYLFFYPFDEDEKGGLQQLWHITYSLPTEKDVINSLQKHFRFTKQQTTAIAAKTGYTADYGKISAKAIRKILPHLETGLHYDKACKEAGYEHTDLSEFDENRPLIDKLPPIKQNSLRNPVVEQILNQVVNVVNTVAERYGKPDEIRIELARELKNNAKQRQRLTSENKNLRRKNDFIVQRLLKEHGFKRVNARDLLRYRLWEETGQTCLYSGKPISFTELYNGVSDIEHILPRSRSFSNGMSNFIIAYNKENKAKDQMTAYDYMKSKGDVELKNFIDRVNQLYTEQKITKSKRDNLLCPGAEIPSDFLQRQLKDTQYTSRESVKMLKSFCKKVTTTTGTVTDFLRDHWELTHVMKEINMEKYRALNQTFWRTIKDNSGREKQVEDITDFTKRDDHRHHAVDAILVALTSQSIIQRLNNLNQEFETYKELKRSALAFAPPITGLREQVKHQLENILVSFKKPNSKVLSKKINRYQTASGTAEQETWVPRGSLHEDTVMGKLKWYKKIPLDKKFTLADAIVHPELKEVIKQRLAESSGDAKKAFANLKKHPLLFKNVPVTEVVVWDEKFTKRVAVSDTITPAQVTKIVDAKIKRLLEERISGFSSIKEAFKDYASKPIYLDEAKTIPIKSVTVFDEGNLVQVREGFVYTKGNHHAIIYTDGNGNFLDKVVPFWDAVEACLNNLKNTGTIYPIIDKGPAENSWRFYTSLQINDLFVIGLNPAEVDFKDPKNRSLLAKHLYRVQKMSKGDYYFRHQFESTLKREEAFAMRRIKSLKMFTQITKVRLNHLGEILTVETEQ

SEQ ID NO: 6712 - protein, 1409 aa, unidentified
  REGION 1..1409: note = Description of Unknown: Cas Enzyme sequence
MKKILGLDLGTNSIGWALVNEAELPNEQSSIVKLGVRVNPLTTDEQTNFEKGKPITTNASRTLARSARRNLQRYKLRRENLFQILKENKWINDETILTENGKQTTFETFRLRAEAAERQLELHEVARVFFHINKKRGYKSSRKLNKTEDGTLIDSMDIAKKLYSENSTPGQLVYELLKSGQKKIPDFYRSDLQSEFEKIWNYQKQFYPDILTEEFKEAINNKGQKVTSQIFFSTYNFNTAENKGTREEKRLQAYKWRNDALTKKLAIEEVAYILADINGQIYNSSGYLGAISDRSKELFFKNLTIGQYQYAQLKENPHARLKNQVFYRQDYMDEFEKIWTVQSKGRESIFTDALKIELRDVIIFYQRKLKSQKSLISFCEFEQREILVNGKKKIVGLRVAPKSSPLFQEFKIWQQLHNVKLKNKISKEVYFLNQDEKNFLFSELNLKGNLSASEILKLIVDKPKDWEINYTQLEGNRTNQALYNAYLNILEIEGYDIKEELKLRLNKDEITLADIDKSATEINEMVQKIFSHLNINTEILSFKAELDGKNFERQLSYQLWHLLYSYEEDNSPTGMETLYRLLGEKFGFNREHAKILSQITFQDEYCSLSSKALRQIYPFIKENNYSTACELAGYKHSKNSLTKEELEKRELKPRLELLKKNSLRNPVVEKILNQMVNVVNTIIDAENDLLEKEGKQRDFHFDEIRIELARELKKNAKEREEMSKAINAGKIEHDKIVKILQTEDGIKFPTRNDIIRYKLYQELKNNNYKDLYSNTYIERKDLFTNKYDIEHIIPQSRLFDDSFSNKTIVPRQINLEKGNKTAYDYILETFGETALNEYLKRIEHLYNSKENGISKAKYKKLLMKGSEIGEGFIERDLRDSQYIAKKAKEMLFQISKSVLSTSGAVTDRLRQDWGLINVMKELNLPKYEAAGLVEIQKDKNGQTKKVINDWTKRNDHRHHALDALTIAFTKPSHIQYLNNLNARNNEEAEKKANIYGIESKETYKVKDGNGNYKRIFYEPFPNFRQTAKLFLESVLVSHKAKNKVVTRNINKIQGTNKTQLTLTPRGQLHKETIYGKIKTPIFKEEKVSAKFDEKTISMVTNPHYRELLLNRLKEFKFNPKEAFTGKNALSKNPIILKDGTHLPEKVKLMWFEDDYTIRKEITPDLNIEKVIDQKVKSILQKRLDEFKGDPKKAFSNLEQNPIWLNKEKGIKIKRVKIFGVKNAEALHIAKDHFGKQRLDKNGQPIPADFVSTGNNHHVAIYEDEKGNLQEKVVSFFEAVARVNQGLPIIDKSYNVDLGWKFLFTMKQNELFIFPNVETGFNPNEIDLLDPNNKKMISPNLFRVQTISVVKYGNNTIRDFKFRHHLETTVEDRKELQRITFQQIKSLPLLERIIKVRTNHLGDIIQIGEY

SEQ ID NO: 6713 - protein, 1122 aa, unidentified
  REGION 1..1122: note = Description of Unknown: Cas Enzyme sequence
MKKLLFSYDIGHASIGWAVLDTTQARMPELKGCGTVLFPTDDCLASTRRQLRRQRRHIRSTRMRIARMKRLLAQLGVLTPAELDEPGGPWPWKLASRVHAGGALLSWRELWDVLRWYAHNRGYDGNRKWSRDDEEDADDTEKVKNARFLLDKFGKATMCETICAKLKVDPLSDDKTTSSIAYKTSNAAFPRDVVRDEVIALLEKHLGQLPQVTPELITALCAEDNSPKEDGRTVREVLKQLGFEAHLPGRYVGGLLFGQAVPRFDNRIIGECPVSGEKRPLKDCREYLEFRWAEILANITVRPTKDGDKRPLTAEERKALTDKARTEGGFTAGEFKKAVLEVSKAAASNVDLMMTHPDAADAFVLDPALRFTKTHGLVKAVWDGLPAVLQKRVLGRWNKRRRVSWAWLLQQPEAPKDLEARLQAAWKETKRKPRKGENEARWEDRVRQSIAPVFPSGRAPYGREVMKRVVEQVMEARMHPRENGGVLDAELIKKHDLGKEIDELTNNHLVRHRLKILLRLVDDMVKTYADNDPAQVDKCVVEVARDLVEFSGKTNKEVAQELGIKLKNFKDVSKRLTSDLEGTSIPINAGLIRKARIADDLDWTCPYTGKEYDAVTLARGKVDKDHIIPRSLRPSDSLDSLVITFDAVNKWKANRTALQFIEDEQGKPVPGRPDLTIVTVKQYEAFANKLAGDKKPNRFTPGQGSLDDKLRQWSRKQKLLLKDYEEKEFTPRDLTVTSHLVRMSARQLEKRFVHLQNTDRIVSLPGSVTGVVRKAWKCLGCLAPACPEVMDMRPVTDAKGDLVMGSDGKPSLAPQVRPKGEIRDITHLHHALDACVIAFASHFLPKDGKLWEQIVTRKVLKHDEEAFRERYQWHALLKLAEPKDERDKARAKKLEVLDLPDIFKQQIVEALKERRVVQHVPADMSGAKLEMTTWKVVSVKDGQVTLRQRSFGPKDIDPETGARLRKPKTESVRVNRVLGLKEGKLSRIKGAMIISDNFGMVLDPQPQVLPFHQVAKAMAELKEANGGKTPRVLKNGMILKVTKPEDRAGIWRIVTIQESTLKLDFVQPDLAQFQVSVVNDAGKTIKRKISGSRVWREVPIQKLLQGEFEILPANHYCGFDAT

SEQ ID NO: 6714 - protein, 1727 aa, unidentified
  REGION 1..1727: note = Description of Unknown: Cas Enzyme sequence
MSKNILGLDLGTNSIGWALVEIDNLNRRVRIVGLGSRILTMDAAEIAKFESGAKIDSLAAQRTTKRSPRKLNERYLLRRDRLHSVLNLLHSLPEHYKLSIEFENENGKRSGKFIKGTEEKLAYYKDGRGKSQFLFMDAYYQMEVEFQSLHPDLFYNKKNGNQTQIPFDWTLYYLRHKAVTDKEFELTKEQLAWITLSFNQKRGYEKVIGQDEKIQKEGELTDAFVAKVSKINKLDNEDVYQITLVDSANDKLEIFKYKEESRIKITEIGDLKELEIISRFDEDGAIDSKKTEYIISEVREFFITDVRNTGQKRKENFVFEVELETGWVKEQQSKFTPKWKDTTRDFIIRTKYDEKGDRILKGADKGRNINIPKEEDWTLMKLKTETSITSFNAKNNTVGVASFIYYNLLQNPKQKIKGDLVTVIERDYYKKELNAIYENQKQFHSELNNRELYEQAIKLLYPNNINHQRNIKELDFNYLIKEDILLYQRDLKSKKSLISDCAYEKENYERTDEHREKKYKKPLKAIHKSNPLYQEFRLWQFVKRLKIIQKEGFINEEIKINEDVTIQLLTPKIKEELFEYLNDKEFATEKNILDFLQKKNKNLKINNNTYKWNFASEKEPCNVTRYNFILRTKRIKGLDYRSFLTFENEYNLWHFFYSVKKIDEFSKGLRNLMIKLLERSNLPLEYLDELVKNFSSFGGYTNDYGTYSEKAIKKLLPFLRLGKYWNAIVVENILKNIAHEVKEKVLLKEEINGEIEDFQGLWVSSACYLAYGRYSEVGEVQHWKSPYDIENYLKNEFRQHTLNNPIVEKVLVETLHIVKDIWKCFGKEIGKDEEGNIIYDVLFDRIHIELGREMKKNNKQKDKDDKKNKENRKANERIVELLKELKRDNISLQEKSPFQQEKLRIIEESLLSSIEYDKDTTAYKLVDGEITKKDIKDIISKEFSKISKADFERYKLWLDQRYQSPYTGKFIKLSDLFDRKKYEIEHVFPQERITLNALYNKVICESEINKEKKANTGYGFILKAKSKTVFCSAYNEAIPVLNIEEYEELVKSNFTGKKREILLSKDIPEEFTNSQLNNSQYIAKMAMKLLSNIVREKDEDTFRSKNVLATNGTITSTLKRHWKLNDTWNEIISARFKRLNEITNSNSFGDYREINGHQVFINEVPEGTNNNFDPKRIDHRHHAMDALIIVLTSENHVQYLNNISSQEKDDKEKLETRKGIKFQLTNSRKGFNDEKEWYFLPPAHLKTKDGIEEYEYLFKNDKSKIFKEIAQNALENTIASFKQRNRTIRQRSNKYLTSKDGEIELATEENLQETKNYNVRKQLHLDTFYGKVKLQDNVISMSLEKAINEKYEFVNNLLTKQISDLKTIQKKSQEEILQQLSKEYKTVQVYEKFVASRFNNDLESFSLIAADKIIKTIEAITDTGIQKILKNHLKQYDTILKKIEDIQQYVELVVDDERRNILKELFRANSKIDHITVDTKEVKETEIFIKKLNEEIDRNLIKRNPQFAFSQDGIKELNRNIKKLNNEKDHQPIYKVRIADAMGTKFPVAEQGQKSTKFVVTAPGSNSFCGFYQKGAERKFYIPTLRESVESLKQGLKPCPSTHPDDPDFVLIFVLNPKDVVYVPAEEELETTSSVDYNCLRPEQLNRIYKFTDGSGTTMNFTPLNISSLLFNLSNKEQEKLNLNLPIQNELGLGSPQSKNQNSLDGIQIKSVCIKLQIDRLGNISKA

SEQ ID NO: 6715 - protein, 1077 aa, unidentified
  REGION 1..1077: note = Description of Unknown: Cas Enzyme sequence
MKSSLASSDLTLALDVGHSSIGWSLLTNAGTKTAPKPEVHRCGVVTFQADDCLAGKRRTYRRQRRHVRAIRQRIRRMSDLLIHLGAFDTATLQKKHQQGGGHPAPWLLAARVLASSGAKEYLLSWSELWDVLRWYAHNRGYDGNKKWSRGGEEDAEDVEKVTNAREMMKAFEAESMAETISRFMFKPHGVQDILEMDPAKLPPFNVDPAKRQCRYKGQNAAFPRETVEGEVRRILKAHVGHLKGCDDFFISALMDAAGDIPCPSIRLPKRYHGGLLFGQLLPRFENRILTQCPFTGKTVPSRHSFEFLRYRWAMQMANISVGVQGDKALRPLNSQERAALHQKMLERGYLTPGELKTFVKEITGCVWSNLDAMLLHPDAKEALELYPFAKGKEAFRAAWLALSVKHRQRFANQMMRGREWTLESIETWLRDQDDAAAADKLSESIAMGKKVRLDAEKVAALRGDVIAFRKLNGRAPYSSDRLLQAEREVLAGLDPRKECKATHPERGEDKESDGCLVRNKEILAAALGKPVDDQTNNHLIRQRLRTMEKLISDISADATLTGGRAIGKAVIEVNRDLQAMSGMTAKQMAQDMGLRLSTFKSAVAYLEKAFEGKSIRISPGLIRKTRVAMDQDWTCPYTGRKFGPMELLSTSEWDKDHIIPYSLRPSNSLESLVITRRDINDAKKNRTALQFVEEMNLPENKAERERLSVWTPKMYRDYVDGLDLRKGHDDDKKRKRRRQGLMLMAKWEEKGAGFLPRDLTVTSQLVRLGAQSVQRALPNLKPEDVTSMPGSVTGELRKGWHLLGLLAQANPNVKDAETGELKTKTEIREVTHLHHALDACVIGLAAMYFPNNGTLWQLITKRNHTEAEKQQLIELGIYNRDSEGRMHLAADLGETVKDQISKCLQEKRVVQHLPKDMSGMKVEENTRRVVSIDDGWAKLLQQKRNEKTGKLEHNKTEQPVRNLVGLHDGKLSKQKGVRVITDNFGVAVLDKLPDDAAREERFVIVPWHRVWYRLQQLQVTNGGKKPEVIRAGDWIRLTDKKGNQKLLQIFGAGLAKRDGLYFDVGAPDDISARRQQV

SEQ ID NO: 6716 - protein, 1118 aa, unidentified
  REGION 1..1118: note = Description of Unknown: Cas Enzyme sequence
MDGKYPTPPLTFGFDIGIASVGWAVLAPDRIVALGVRAFDKAETAKEGDSLNLIRRTARLTRRRLRRRAWRLTKVARALKRHGVIDDVTIFSPTHAIDRSPWQLRVEGLDRRLGAEEWARVIYHLCKHRGFHWSSRAEERKAEKDAKGESGKVKQGLAGTAKLMAAKRYRSVAEMVVNEFPEAQRNKQGDYTKALARKQLGEELALLFHRQRELGNTHASASLETVILGTDDRKSGLFWMQKPSLAGTALLSMLGRCTFERQEFRAPKASFTAERHVWLTRLNNLRVVVDGKTRPLTEPERTLALPLPYQYDTDLTHKRLRAELIEAGHLPDSFKFAGLRYPSLLQTAADKAKDPEAGVLVKLSAWQELRRAMKRGGLATEWQQIAGEALAGSPETLDRIAWVLSVYKDDDEVRRELEALSLPGSKKMVDVLLDIRFDRFHALSLKALRAIVPHMERGMRYDEACAAAQYHHSVPAPSALGRRRRLPPLYSGRNKQGTMILDDDLDAPRNPVVLRSLNQARKVLNALVSEYGSPHEVHIEMARDLSNPLDERRRIKKEQDEYRERNSKDRDEFMRTFGITGNPHGGGFEKWRLYREQQGKCAYSVEPIDLNRLLEEGYVEIDHALPYSRSFDDSKNNKVLAFAKENRDKGNRTPFEYLDGAGNGARWRNFVAFVEANKAYRLAKRTRLLRRDFGAKEATEFRERNLNDTRYVCRFFKNFVEQYLDLAPDSDAKRCVVLSGQLTAFLRARWGLLKARDESDRHHALDAVVVAACSHAMVKRVSDYSRRKELMQVREGFVDVETGEIVNPVMHKQLSEHFPEPWPYFRDEVKVRLHLDDPESLRAEVKRFGTYSDEAISNTSPLFVSRAPLRRNGGAAHKETVYGQTPRLRATGSVTEKVPLASLGPSDLDRMIDPHRNEKLYKAIRSRLEAHSGKAEKAFPPENPLRKPDKDGNPTGPVVRTVTLVIDKLSGIPVRQGVAKNDTMLRVDVFSKQGRFHLVPVYVHHRVKGLPDRAIVAFKDEDEWTQIDDSFEFLFSLYPNDLVRVTQKSKAPIFGYYAGCHRGTGAINLWAHDRNGRVGKDGLIAGIGVKTAAAIERFDVDVLGRRRPSKRRGRRGLA

SEQ ID NO: 6717 - protein, 1530 aa, unidentified
  REGION 1..1530: note = Description of Unknown: Cas Enzyme sequence
TTLFRLVLGLDLGTNSIGWALIEQNIENKDGKILGMGSRIIPMTQDIKDEFGKGNSVSQTADRTRFRGVRRLRERHLLRRERLHRVLNVLGFLPEHYANQIDFTKRFGKFITETEPKLTYKANDFLFKKSFEEMLNDFKTNQPQLVENGKLVPYDWTIYYLRKKALTQKLEKEELAWLILNFNQKRGYYQLRGEEEEENPNKLVEFHSLKIIDVVADAETNKKGETWYSLHLENGWIYRRSSKTPLTDWKDKTRDFIVTTDLNDDGSVKINKEGVEKRSFRAPSEDDWTLLKKKTEQDISQSTKTVGSYIYDALLQNPNQKIKGKLVRTIERKFYKDELKQILQKQIELQSELFSDDLYNDCVRELYKNNEAHQMQLSKRDFVHLFLDDIIFYQRPLRSQKATISTCPLEYRLHKINKKDEKGNPIKNEFEKDENGKDIEVKEYLKVIPKSNPLYQEFRLWQWIYNLKIYLQDEDKEVTPNFIQTIEDLESLYDFLSERKEIKQDTLIKHLVEKNLGLKGKALSNEVAKYRWNYVSDKAYPCYETRSMIMNRLEKVDTIPTGFLIPEIEQQLWHIIYSVTDKIEFEKALGSFARKHQLDESSFVENFRRFKPFDSEYGAYSEKAIKKLLPLMRVGKYWDWEFISSSVQERIDKILTGEYDETIKNRVREKAIHLTQKENFQGLQLWLAQYIVYDRHSEAEIAGKWKSVADLEKYINEFKQHSLRNPIVEQVVTETLRVVKDIWKQFGKSAENFFDEIHVELGREMKNTADERKRLTNTVTENENTNLRIKAMLVELMSDANVIGVRPHSPMQQEALKIYEEGVLKSGIEIPEDISKISKSAQPTKAEFQKYKLWLEQKYKSPYTGQMIPLNRLFTEDYQIEHIVPQSRYFDDSISNKVICEAAVNQLKDKQLGFEFIKNHGGQTVETGFGKTVKILREDSYQELVKENYKSNRTKLNKLLLEEIPDKMIERQMNDTRYISKFISQLLSNIVRSETNDDGVNSKNILPGNGKITTQLKQDWGLNDVWNDLILPRFERMNELTQTSDFTTKNTNGKTIPTIPLEHSKGFQKKRIDHRHHAMDALVIACATRDHVNLLNNQSAKSDNSRYDLQRKLRKVEKWQDKEGKERDKFTDFFKPWSTFTPDAKNELEKIVVSFKQNLRVINKASNQYEKMVNGKKVLVKQEGTNWAIRKPMHKDTVSGLIQLRKTKLVALSIALDNYNDIVDKALRKHILSLIAKNFDKKKIAKYLKDNDNKWNNADVSRVEIYYWENDNVASRVNLDTSFSKEKIEKSITDTGIQQILLNHLTNYEGQIDEKGKAIAPEILAFTPEGIDEMNKNITSLNNGKFHQPILKVRTYEPKGNKFAIGETGNKKDKFVEAAKGTNLFFAIYADENGKRSYETIPLNIVIERQKQGLLSVPEQNEKGHNLLFHLSPNDIVYVPNEEENVNAINLNKLTKEQTDKVYKMVSCTGSECHFIQSKISSLIKTYDSKSKMGEMGSLNKQELTMFGHQRVKEICIKLKIDRLGNISKT

SEQ ID NO: 6718 - protein, 1007 aa, unidentified
  REGION 1..1007: note = Description of Unknown: Cas Enzyme sequence
MAKMRTLGLDIGSNSIGWALIDELDGKPVGLAGMGVRIFEEGANLDAKSGKTESRNVKRREARLRRRQVARHALRKRRVQRVLSRAGLLPSSSPNHDDLAWKPLLDQDPYVLRAKALNQKLAPMELGRVFYHLAERRGFQTNRKKPATKEEHGVVKDGINKLSAEMQASGAQTLGEYFSRLNPHEIRIRTHYTRREWYKEEFDKIWNRQRAYHPAALTEGLRAELHHELFHQRPLLIRAGMLGHCELEPQKRRAPMALLDAQEFRILQELNNLRIDDETPEGRLLTPEQRQAVLDLQQREAKVTFAKIRKIDGLKKAKFNLERGERKDISGNRTSAMLRGAIGTQWDELDRLSRERLVNDLLSIHNEDDLCRRLSEHWGFDDAAVQLLSEVALEDDYASLSSSAIRKLLPHMRAGKTYREAIDAVPWETKPLAQESLLPPLENLRNPIVQRALAEMRRVVNALIARYGRPDRIRVELARELKLNKEDRAEHIRNMREREAEREKARNELIAEGLPEPKARDIEKWLLCKECGGRCPYTGKPVGFHELFRTNEFDVEHILPFSRSFDDSFANKTICHVRANRIEKRNQTPFEVYGATAEWAAILDRVRKFTGSFAASKLRRFELEDLDADADFLGKFTERQLNDTKYAAVKAAKYLRVLYPEDERLSAVRVTSGRVTAYLRNAWDLNRILSDGPRKSRDDHRHHAVDALCVALTDEGVIHQLSLESARWAQQGRRVGSFRGVPPPWAAFYADAEKAVRGIVVSHRVSRKVQGQLHQETHYGIIRDPHAAKTKDGSSVAVLRVRLEELSVKDVALIVDAGVRRAVEAKLKGGDPKKVFKGGQNLPVLQTKQGRTIPIKRVRIKYGKLDLLKLSPDRNVMAGSNHHLAIYAGTKNGKDIWTGEVVSLFDARQRVQAGVPVVRKQDDKGNPLVMSLVQGDTVELSWNGSKGFAKVMGLSENDYTFRWITDARKKADLGASLIRIRSMNALRDCGLQKLSVDALGAFHCTRD

SEQ ID NO: 6719 - protein, 1095 aa, unidentified
  REGION 1..1095: note = Description of Unknown: Cas Enzyme sequence
MSTTLGLDLGTNSIGWALVEDGKKIIKTGVRIFPKGVNESNSGKEVSRNADRRSKRGARRAYHRYILRRKKLLAIFERIGITPPNNLIKISSYELFKLRKTALDEKISLQELARIWYLLNQRRGFKSNRKENSLSEDKNELTGIKAQISELENTIKKLNLRTVGEYFFHLFEVSRDLKDWHNPEEPYERIRGRYVSRAMYETEFDLIWQKQKEYYPEVLTEKLYNEVKNETIFYQRKLKSQRHLVSNCRFEPEKKVAPKSSLEFQEFRIWQNLANLRVTDEFRYLEPLTLEEKQLVANKLHLVENLKLTQIKKLLGLSSRDKLYFTDDEDETLVKGNSTASRIAKVTGEKFWVSLPEQPDDTFRNPENSHLLTKHNLWHLLFFSDNQEWLKNYSIVKLGFSEEIAEKFSNIALEQDYGSVSIKALIKGKAGDGILKFLKEGYDYAESAKRAGYNHSEETIIKEPDGLIKRMKGDAIDSLRNPVVQQTLGEAVRLVNAITLKYGKIDRVRIEMSRSLKKPKKEREKITLNNRVKSDLRNEYIEFLKNKGFTRITGSLLTKFELWLELDFYKDDFSKLSKKIPIEEFYKFARNVKKNDKEKFRLWLECGRISPYSGKPISLSKLFSPEIEIEHIVPYSRSLDDSFMNKTLCEREINQNKLNMTPREYFGEKSEEWRFFQERIKSFSVVKQEKFRIKDLPQDFDPQQLTNNAYIAREAVKLFRRICDDVQVTNGQATAHLRHLWGLPSIINTPGAHLKNRNDHRHHAVDALTIACTEIKHIRILSTLSQFNEGMIRVPDFPMPFVNFYKDAVENLSTLLVSHRNKKRLLVAKKNKIRLKNGKILRQSSVSVRGSLHDESNYGLTNLLGKNKEYILAHRKGLESITGLKQINEIIDDQIEKYLFELYETNPKGFSQQLREGIHMFGKDRKPLPYLKIKTLRSKKASNNIINLRPGDRKGLIVLPGNNYKIAIYENKKGKRISEVVTFFDAVKRAKQGEPIFREIKENYVYRFELTHNDMFLFTEETDIAKVRNDRELLFKNLYRLKKFNFNGRMAFQSHNIGGSDQENQVGVTLLDIWPSTLTGFKVSTNILGEVTIHD

SEQ ID NO: 6720 - protein, 1263 aa, unidentified
  REGION 1..1263: note = Description of Unknown: Cas Enzyme sequence
MKKTVLGLDLGTNSIGWALVEVDENGSPLSIIGMGSRIIPLNSDERDQFQKGQAISKNRDRTIARTQRKGYDRKQLRKKELKTILAKYGIAPTMELLNLPSLDLWKLRADAVNDSQNISKEQLGRILYMLNQKRGYKSARSEANQDKKDTDYVADVKSRYAALKSDGHTIGQYFQKELSNASSSDEYFRVKDKVYPREAYIEEFDKIMEVQKEKHDFLSDEVITKLKQEIIYYQRKLKSQKGLVSICELEGFETQITDKETNQEKIKFVGPRVAPKTSPLFQLCKIWEVVNNISLKTKNPEGSKNKWGDRTPTLAEKIEIVNHLSINENLNLIQLLRILKLKKEQVYANKQLQKGIQGNITYASIQKIVGESEFLKFEPTIVSLPDKANLVDKKTGEVIEQLNGFIISDAIEKEPFYQLWHTIYSIKDMDECRNALIKRFKFTEDIAEKLSRLDFNKQSFGDKSNKAMRKILPYLMKGYNYYEATTLAGYNHSKSLTKQEQEDRETKDRLELLPKNSLRQPVVEKILNQMINVVNAIIDKYGKPTTIRVELARELKQSKDERESSDKQNGFNKKLNELVANRLTELGLPSTKRYIQKYKFIFPAKDKNWKEADVVNQCIYCGQSFNLTDALSGDNFDVDHIVPKALLFDDSQTNKVLVHRKCNSDKLAQTAYDYIAKKGAKELDSYILRVDDWFARGIISYPKMQRLKVSFEEYQERKAAKKETEADKKIWESFIDRQLRETAYISRKATELLSKICNQVTTSEGGVTAKLRSLWGWDDVLMNLQLSKYKEIGQTQLKEWTSEHGKRKHQKEEIANWTKRDDHRHHAIDALVVACTKQGFIQRINTLNASEVRNEMNREVEQSKIDFKEKNTLLEKYLITQKPFGTKDVELEADKILVSFKTGKKVSTISRYKATGKNKETGVIVPRGALHEQFVYGKIKVNDAKKSLKFLFSNPSKIINSEIRNLVLQRLEANDNDPKAAENSCKKDPLYLDAERTILIENADCFKDEYVIKYKIQDLKTKDVPFIVDEKVKSIVKAQLDKFGGKEKEAFKETVWFNKAKQIPIRTVRCFTGLSAVEAIKKDDTGKEIGFAKTGNNHHIAIYKDKDGKQIQHICTFWHAVERKKYGIPPIVKNTSSLWTEVLKNELPQSFLDKLPPDNLELGFSMQQNEMFILGLSKEDAENAIKNGDYSLLSKYMYLVWSISENNYWFRHHLETKNSELKVIEGTKESKRYYNIRSIGAFIALNPIKVRLNHLGDITKIGE

SEQ ID NO: 6721 - protein, 1296 aa, unidentified
  REGION 1..1296: note = Description of Unknown: Cas Enzyme sequence
DTISGAKIAFNTENPSNDKIIYYLRYKALREQISLQEFARIIYHFNQRRGFKSSRKAEPPTEDSDSQSKKYPILEKSQAFVLVESMTENGVFNRNRKQFILTGKLSDGRSVSGIIEKDFIPNWIGQSIEFVITKKTLKNGESTTTFSIPNPTEWEKSKKSLESEIEKSGLHVGEFYFQRLKQNPHYRIKDRIIDRKFYQSEFVAIWNKQIEYYNELNKSIPESVITLLYKNNREKQRELSGYPLQELILKDIIYYQRPLKSQKHLIAKCEKEYKIGSDGKKYGIRVAAVSNPYFQEYRVWQYIHNFRITRKANDQDTSIETDVTKELMTDDCKVRLFEYLRHNRIISENVFWHLILPGTMTKEFSNYSLNIPIDKLLGDETSSKILKAFKRAGLEETGKQIIQNHDNLYLLWHILYSLEDFSSVEKALLNNFKLPSGVTQILTDTVSFDKQYCSLSEKAIKKLLTLMRVGRYWNHDSIPVSAKAWIEKRKSDDDEEDEVAEMDLSKWEGQNHLIDSSSDLHGLPPWLASYIIYNDNKVYSRIDQITSFTEIKTLPANSLRNPVVEKVVNETLLIIRDVWKQYGKPDKIHIELARELKKNNEERKKLTELNSKNEKERERIKKIVQELLNSKTVSNSDVERLRLLEETAGNSQVLPSGNDLTAYKLYADQHFVSPYTGRTIPLYKIFTPEYEIEHIFPKSRFFDNSFTNKTICERAVNKFKDNMTAMEMIKKHGGQKIDGLDYPLLTEEAYIAHISKHFFGKKRRHLLSENIPEGFLLRQLNDTRYISRKLSELLYPIAGKPVITIGSITTELKEHWGLQGVWKKLLLPRFQELESRKAEKLYEIETPTNSIHYAIPAKRIDHRHHALDALIIAATSQAHIQFLNTRSALDPTSANQKKWYLWNYRAKRFSLPWDSFTADARESLSGIIISFKKSTRVLTRGFNLYTKFVNRNGEWIKIKIRQDNKNLYSIRKSLFKQPCGIRHIAECRDVSFKDALKIHFNYISSGTNQLSDRVADKSLARVLSELIKNCEFDLKKTIEFIKKLKDTPEGAWIEKNKKVKILGFTKYSSKRVPLDGSFDESKIDKIPYSSQDKNILVNSLKEHLHKMGSSANAFTGDGLEIFAQKYGTPCRKVTVIEEVGSKIEMKGALYETDKGSNVFYVFKRKEGEEKNSQFMTISAFEAAAKLIKKESLVDVQEGEKLFILTPNDLIIMPKIGQKTDSIDLTDKKEISSQIYRVVSFTKNRLYCLPHTVAEPILRGVEFDKLDKREHTHDGLAFRDFCIPVYQDRLGNLSWGH

SEQ ID NO: 6722 - protein, 1019 aa, unidentified
  REGION 1..1019: note = Description of Unknown: Cas Enzyme sequence
MSTIWAFDLGKGSIGEAVWNVGKKQFDHVASLLIPAEFASTKEAATRRRMFRTRQAHKAREAWLDEVWKAAGQEPLVGRRVGKVNGKWQLLHPGDERLEREFPKKGDTTCYTSCLLRIKLLRGEKLEPWQIYKALHSAIQKRGYDPDIAWKTRENRRKRKEGKDDDDDEAGTLERMHGFERELEKEFPNKEHHLSCYFDAWKMGLWAPNAPEPLKDRIDHNAQSTRNRILPRKLVEQEIRLLTEAAGQQIPALAGKAWYLLYGPAGKAYASFYKEEREEHGLREGGTTDWQGVLGQKIPRFDNRIIDKCALIPRFNVCKVRGDEHRAQGERGTLPQEVTFLMKLKNMRVQLGSKEQVGLTAAQIATVFEAFKDKGWKLTKTQWTKFCDSIGVRSVGPVEEVVAPKATGRSRFCRPALEILKRLILSGQTPPKFHAAELRQLNGSTDPRKGLVPADLKFLLDMGTTWEGLYLPNQKLDALAQRTGDAESAILELIGSQNDPVVRHRLGAFWRRLRVLEEKLKEGPGQIVIEFVREDFMGQKALLAYRDFIRRRERERKQAREDAAKAGASEKSAALKMELLTLQSGYCLYTGDALVPTSLHEYEVDHIVPRTKGGPDAMVNYILTTRTTNEDKGNKTPFEWLSGTPGWDAYVQRVKGRQMALGFKKARLLISPEAQELAEKYTALAETAWIAKLAQTLAGLQFGWKNGVDKNGGKRVTVISGGLTARIRRKYKLNSLLAGDHASEEDAEKNRDDNRHHALDAMVLSFIPGWARDSEKEKWFRFPSFVEANPRGFIGGYLAQVQPENLHLSAARLEATAYGQRRLKRGQNEPEAAFAVGREPLVNLLMKVTNGKESLKSAEKAETKRIVDGGIRREVESFLGAHPGLMLNQWKNWCASYRVQGCGARVLKVLMTKTKADALDEYADVSKDGTRQLRRGESHQGYFVYQVPAPSKKEPEKKRAVVRPVYAHQSTEGVWRDLKAAGVQDAQFFESGCTVELSAPVAHAKTPLKAGRYLLRACN

SEQ ID NO: 6723 - protein, 1124 aa, unidentified
  REGION 1..1124: note = Description of Unknown: Cas Enzyme sequence
MAIQPKARTNMKKLSFSFDIGHASIGWAVLDITEERLPQIQGCGTVLFPTDDCLASNRRQLRRQRRHIRSTRLRIARMKKLLARLGVLSPAQLDEPGGPWPWKLAARVHAGGTLLSWRELWDVLRWYAHNRGYDGNRQWSRDDEEDADDTEKVKNARHLLEKHGKATMCETICAKLKVDPLSSATQSSPIAYKTSNAAFPRDVVHDEVVDLLRKHSATLPQITEALITALCAENDTPVAGVTARAALQTLGFDLELPGRFAGGLLFGQAVPRFDNRIIGQCPVSGKNRPLKTCGEYLEYRWAEIMANIKVRISKEDEGRPLNAEEREKLTCIARHEGGFTAAEFKKAVLETSGAKFSNVELMMTHPDAQDALVLDPALRFTKTNGMLKAVWAELPPPLQKRTLGRWNKGRRVSLAWLIQQPEASATLEARLQAAWRETKRKPRKGEAEAAWEDRVRQSIAPVFPSGRAPYSREVMLAVVAQVMEAEKHPRHNGGVLDAELLKKNDLAKEIDEMTNNHLVRHRLKILLRLTEDLVKTYAEGKAEAVDKCVVEVARDLMEFSGKTNKEVAQELGIRLKNFKDVSKRLFNDLEGTNVPITAGLIRKARIADDLGWKCPYTGKDYEAMTLARGGVDKDHIIPRSLRPSDSLDSLVVTFNAVNKWKANRTARQFIEDEQGKPVPGMPNLTIVTLKQYEAFVAKLAGDKKPNRFTPGQGSMDDKLRQWKRKEMLLLKEYEEKEFTPRDLTITSHLVRLAARQLEKRLAHLQNTSRIVSLPGSVTGVVRKAWNCLGCLAPACPEVMELRPTVDDKRNLVLNADGTPSLSLQVRPKADIRDITHLHHALDACVIAFASHFLPKDGKLWEQIVTRKVLRQDEDAFRQRFTWHGLLKLAEPKTEAEEKRRARRLEILDLPAPFKQQIVDALKERRVVQHVPADMSGARLEMNTWRVLRVEGDQAFLRQRTFGPKDIDPETGARKRTAKEAKERSSKLVGLKDGKLSALKGALVIGENYGVAILNAAQAASDDERFQIIPFHQVRQRLRELRSLNNGHPPQVLRGGQLIRVKSGGYEGVWRIFSVKNNTSGMALDIGLPDVTRLKNGTPGHKINVLLKSLVKAGLEPLSGDLIGG

SEQ ID NO: 6724 - protein, 1019 aa, unidentified
  REGION 1..1019: note = Description of Unknown: Cas Enzyme sequence
RRGYDRYHQRRNELERILAERGMMFDKAVSIPTKELYGLRRKALDQALTLQEMGRILFLLNQRRGFKSNRKDAGKSGEAEKELTGMKAAMSELEAKVKASGSRTVGEYFASLFDNQPENWHNPNEPVERIRRRFVNRKMYEQEFELIWETQRQHHPGVLTEELKAEIRDRVIFFQRRLKSAKHLVSKCRFEPEKRVMPKSHPLFQEFRLWQRLNDIRITIENTDRVNSFLTNDECATLTAELGGTRSMTLPAVKKLMGWPKSTKFNDIGDKIMGCTTVAAIKEAVGEDWYFKQTPEKRLQLWHTLYFATDDGWVERYAQEKLGMNDEQAIRFADVKLEQDYGSISYKAASKILPYLVEGYDFAEACVQAGYHHSQNELDAMDRPLDNRVNTAKVEPLRNPLVQMTVNETARLVNAIIEEHGKPDLVRVELLRELKKPKAVREKMRNRMRDKEKQRDEYRDFLKAKGIIADPRMSDIKKFELWLELEYSEEDLSKLDPSIDLRAFAKFAEAVSSKDREKFHLWLECERISPYTGNPIPLHKLFTEAIHVEHILPYSRSLDDSFANKTLCEDAVNDEKGNLTPLEYFEQKRSSAELKAFKQRIQNFSQGKLDKFLATDVKDDFLNSQLTNSAYIGTEVRKLLRTVFKDVRVTNGQLTGLLRRVWKLNELLNVGEDRKNRDDHRHHAVDALVIACTSQSLVQRISTESQFDYRGNQRVPDIGVPWNVFRADAAEHLNGMLVSYKGGKRLLSTKKNKYIHSKAHEGKPEKHQRTKAVRGPLHEETLYGRITITGKGEKQETYVVRKALSALTDVKQLDLIVDPVVQRVVKEHVAAHGGKLKEAFKEPVFMPVKPEKEGLQVPIKSVRLRVNTEEMVELRPKTYVEPGSNFCIAIYEDDKGKRSYRTISFLKASQLALRKEPLYPAEVEGKKLLMSLQQRDLVVLYEKHPEEIQWNSPNWMAQHVYMVKKFDRNGNINMVLQNATNVNTDYPKRYPVGTTYKKSSGSIRAVPVKVDMLGGYKPR

SEQ ID NO: 6725 - protein, 1104 aa, unidentified
  REGION 1..1104: note = Description of Unknown: Cas Enzyme sequence
PKSNPYYQEFRIWQWLNYLKIYQKEDDKEVTSEFISGIEDFEKLFDFLNSRKDVEQKALVEYLVTLRELKNATPLPTSASKKAIQEAEKELNKKIKSETEKFRWNYVEDKSYPCNETGSQIRKRLSKVEDVPTDFLTAEIEKQLWHIIYSVNDRNEFEKALRTFANKHKLDESSFVENFRKIPPFKSEYGAFSEKAIKKLLPLMRIGKYWNWEAIDSKTKNRIDKILTGEYDEEIKNLVRKKAIHLTEQKHFQGIELWLAQYVVYDRHSEVSDSIQWKTLADIEEYLKEFKQHSLRNPIVEQVVTETLRVVKDIWQNYGKVVENFFNEIHIELGRDMKNTAEDRKRITNKVTDNENTNMRIKLLLAELKNDNNIEGVREYSPSQQEILKIYEEYALSNEEKYDERTKSFVYEIIPEDIIKISKNSQPTKAELIRYKLWLEQKYRSPYTGEIIPLSKLFTEAYQIEHIIPQSRYFDDSFSNKVICEAAVNQLKNNQLGFEFIKKHHGEKLQDKNKTIEIFSVEAYEIFVKEHYAKNHSKRTKLLLEEIPDKMIERQLNDTRYISKFISSILSNIVRGETNDEGINSKNVLHVNGKITSELRQDWGLNDVWNNLILPRFERMNLLTQTTHFTTTNKEGHTIPNIPLELSKGFQKKRIDHRHHALDALVIACATRDHVNLLNNQYAKSENSRYDLQNKLRNKEKWTSKDGKELDKFTEFKKPWEDFTIDAKNRLEKIVVSFKQNLRVLNKATNFYEKIENGIRRKVEQKGTNWAIRKSLHTPMPYGKKVYEFNILKIADNVSKREFILDNDVKIKVEEAYQNNKCKITETQKYLKKNPIKDNNGNEIIVTAFRVKTEKFRKRQPLSVLSNRGQGGIKTVEDAVKFIGKIADFKIQHDLLIHLNENDNDIEKSYSAEGLERFNAKRKIPVYKLPIAESGSGRFSVGTKIGTRHKWVEADKGTNLFFAIYEDNAGKRDYETIPLNVVIERQKQGLSSVPVRNEKGNNLCSLCPFLSPNELVYVPTEDEKVNLSILDFNNLSEAQKKRIYKMVSSSGKQCFFLKQEVATTIVNKTEYSALNKMEKSIDDIMIKEVCIKLKVDRLGNISKA

SEQ ID NO: 6726 - protein, 1000 aa, unidentified
  REGION 1..1000: note = Description of Unknown: Cas Enzyme sequence
MGSRGVELQRNKLYNGNLALNRYGIRHAEQRIGKGVLIHSLEQLKPSKYQSYHYQNERIRNRVLTRSMYRKEAHILWETQAQHHQELTDDLKKLLIGPDPIDKQTMGAVFFQRSLKSQKHRVGNCIYEPRKTKCCISSLAYQELLAYRWANSILKDGKPLSDTERHKVVHYFLRHKKFEFIEIKRILNPATAIYNKKNEEVISGSFINAELSKGYYFGQTWFAKSEKEREDIWHAIYFYKDKNKLAELAELQWGFATPQAQKIAQVSLDKRYAPISRKATTTILYFLQRGLGYELAVVLAGVKNALGRSWQNIAPTDIDFIIKRVITLYKENPVSGFVPKLQRFLIEDMQLQEFQIRKLYGQSASVENYPNHARFPLTKAVDKEIYNFKNPLLIAPIFQLRKLINSLVTRYGAMDQIRLELSPNLKTNKYQRYMGKLEHKRQVQRRDVAVEELRGLIENITPTNILKFLLWEECKRTCPFTGEDIGLDMLFTDDVRVVYILPWDRSLNDNMANKTLCMSAMADLVLGYTPYDFFKEHRPYDWETVVRRAARLFSSTPLYPSGYKKFKAFVKKYHRRHFLHNQLSDPNFLAKEIQCFMTKVCPEVKITKGYATMPLAEEWLLKNLVPTPEAYEHCEDFRYYALRAYVVSQLNLTFITALSRRHKYRNRQLFPLDKMPIPYTGFRDEVEYHLNALLVSHQAHQKLMVSRHLKHTYKGSERSNLGLAVRGSLHKETVYGKRTAPDGLTCFHIRKPLDLINTKHQVEKIVDPYIRQQVEACIEEHGGYKDNKVLSGLFFETDKNGLRTPKLFLPNLKGGDPVPIRKLRIRESLSRTVQLKEDINQHVNLRNNHHVMVYEDAEGNYQEDLVSFWEMVRRKSQGEALYQIPDPKGRAIATLHINDMFVLGVNDLDVDLNQESKSFLMRHIYRVQKLSSKFYEFRLAYNNQLNDSEFPNYIRINNFGKRKTGWFSYHPQKIEVSLNGQLRRAPSPDLQHKKLQTSMR

SEQ ID NO: 6727 - protein, 1081 aa, unidentified
  REGION 1..1081: note = Description of Unknown: Cas Enzyme sequence
MTTQRNSSPNASRKFGGQLAFAFDVGHSSIGWSVLTAPERDHPEILGCGVVLFEKDSALACQRRQHRRQRRHIRATRQRIARMEKLFMHIGALTREVIESKHRAGGGNSAPWLLAARVLASNGQKTLSWQELWDVLRWYAHNRGYEPVSDEAEADKEDIEKVENAKREMGRLGTVTMAETITAWLGLDTFGKRAASRENYKARNCAFDRGMVVAEVRRILEAHVDRLPGLDERVVKAILDDVHAIEVPSIRWPRRYRGGFLFGRLATRYHNRIIGKCPISGAKLPKKRCREFLCYRWAMLLANIRVVDSDDGRSRPLSREERSNIHKSMERKGYLTPGDLKRLVGTLPGVKQHNVDQIVVHPDAGEALVFDPIRKLIVSNERVAAVWETLPPQVKKRATGKWRRGKSLNLAALRAEVVELGHDVSGFDSAVTTFVSSRQKTRRRSRTHSKETVDDIIEAPIDARRDLAKLSGRAPYARQLLDQAFKEVMDGKDPRARGGCLEETEEVRRRREERPIAEQTNNHLVRHRLQILGRLLNHLIEDPAYGANRPERIRRITIEVNRDLREMAGRTSQEIAKELGARVANHKKVANRLFGELPEGTRITGSLIRKARIADDLGWRCPYTGVEFEPVDLVEGRVDRDHIIPRSQRMSDSLDSLVITFSAVNKWKGQRTAWQFIQEEGGKPVPDAPNLSIVTPARFRDFVEHLDTKGHRDDYRRKKRRKELLLLERYEERTSGFTPGQLTQTSQLARLAAQILRTPFNDTSNPPEIVSLPGFVTATVRRSWDVLGCLSQAAPGVLNTDGSTRSKTEIRNITHLHHALDACVIGLASHFIPNRGDVWRLLAQRNLRAWEKQQLADLGVFDFDAHGGLRLRDLPQQLKEQLRQRLTERRVVQHVPADMNGMRVEENTRGIVRREDGRVYLRQKTLTSDGRRNVKNSDELDIMVVGLNAGGKLAELKGIRVVKENFGVAILENTSLPSGDRFVIIPHVRVWKQLQELRMRNGGKPPEVWRKGQIVRIPSGNREGKWRIFSVMASNRGIMLKLDRPDSPSFDDSGGASGFKMTLTSLIKRGTIRLETRLTGS

SEQ ID NO: 6728 - protein, 1161 aa, unidentified
  REGION 1..1161: note = Description of Unknown: Cas Enzyme sequence
MHPNRVPLLQVVYGQSLILTRCVVSNSSNRIIVVFYLLICKCFIKKGEKMKKSYSIGLDIGTNSVGWAVITDDYKVPAKKMKVLGNTDKKYIKKNLLGALLFDSGETAEVTRLKRTARRRYTRRKNRLRYLQEIFAKEMTKVDESFFQRLEESFLTDDDKTFDSHPIFGNKAEEDAYHQKFPTIYHLRKYLADSQEKADLRLVYLALAHMIKYRGHFLIEGELNAENTDVQKLFNVFVETYDKIVDESHLSEIEVDASSILTEKVSKSRRLENLIKQYPTEKKNTLFGNLIALALGLQPNFKTNFKLSEDAKLQFSKDTYEEDLEELLGKVGDDYADLFISAKNLYDAILLSGILTVDDNSTKAPLSASMIKRYVEHHEDLEKLKEFIKINKLKLYHDIFKDKTKNGYAGYIDNGVKQDEFYKYLKTILTKIDDSDYFLDKIERDDFLRKQRTFDNGSIPHQIHLQEMHSILRRQGEYYPFLKENQAKIEKILTFRIPYYVGPLARKDSRFAWANYHSDEPITPWNFDEVVDKEKSAEKFITRMTLNDLYLPEEKVLPKHSHVYETFTVYNELTKIKYVNEQGESFFFDANMKQEIFDHVFKENRKVTKAKLLSYLNNEFEEFRINDLIGLDKDSKSFNASLGTYHDLKKILDKSFLDDKTNEQIIEDIVLTLTLFEDRDMIHERLQKYSDFFTSQQLKKLERRHYTGWGRLSYKLINGIRNKENNKTILDFLIDDGHANRNFMQLINDESLSFKTIIQEAQVVGDVDDIEAVVHDLPGSPAIKKGILQSVKIVDELVKVMGDKPDNIVIEMARENQTTGYGRNKSNQRLKRLQDSLKEFGSDILSKKKPSYVDSKVENSHLQNDRLFLYYIQNGKDMYTGEELDIDRLSDYDIDHIIPQAFIKDNSIDNKVLTSSAKNRGKSDDVPSIEIVRNRRSYWYKLYKSGLISKRKFDNLTKAERGGLTEADKAGFIKRQLVETRQITKHVAQILDARFNTKRDENDKVIRDVKVITLKSNLVSQFRKEFKFYKVREINDYHHAHDAYLNAVVGTALLKKYPKLTPEFVYGEYKKYDVRKLIAKSSDDYSEMGKATAKYFFYSNLMNFFKTEVKYADGRVFERPDIETNADGEVVWNKQKDFDIVRKVLSYPQVNIVKKVEAQTG

SEQ ID NO: 6729 - protein, 984 aa, unidentified
  REGION 1..984: note = Description of Unknown: Cas Enzyme sequence
VARILAFDIGISSIGWAFSENDELKDCGVRIFTKVENPKTGESLALPRRLARSARKRLARRKARLNHLKHLIANEFKLNYEDYQSFDESLAKAYKGSLISPYELRFRALNELLSKQDFARVILHIAKRRGYDDIKNSDDKEKGAILKAIKQNEEKLANYQSVGEYLYKEYFQKFKENSKEFTNVRNKKESYERCIAQSFLKDELKLIFKKQREFGFSFSKKFEEEVLSVAFYKRALKDFSHLVGNCSFFTDEKRAPKNSPLAFMFVALTRIINLLNNLKNTEGILYTKDDLNALLNEVLKNGTLTYKQTKKLLGLSDDYEFKGEKGTYFIEFKKYKEFIKALGEHNLSQDDLNEIAKDITLIKDEIKLKKALAKYDLNQNQIDSLSKLEFKDHLNISFKALKLITPLMLEGKKYDEACNEFNLKVAINEDKKDFLPAFNETYYKDEVTNPVVLRAIKEYRKVLNALLKKYGKVHKINIELAREVGKNHSQRAKIEKEQNENYKAKKDAELECEKLGLKINSKNILKLRLFKEQKEFCAYSGEKIKISDLQDEKMLEIDHIYPYSRSFDDSYMNKVLVFTKQNQEKLNKTPFEAFGNDSAKWQKIEVLAKNLPTKKQKRILDKNYKDKEQKDFKDRNLNDTRYIARLVLNYTKDYLDFLPLSDDENTKLNDTQKGSKVHVEAKSGMLTSALRHTWGFSTKDRNNHLHHAIDAVIIAYANNSIVKAFSDFKKEQESNSAELYAKKISELDYKNKRKFFEPFSGFRQKVLDKIDEIFVSKPERKKPSGALHEETFRKEEEFYQSYGGKEGVLKALELGKIRKVNGKIVKNGDMFRVDIFKHKKTNKFYAVPIYTMDFALKVLPNKAVARSKKGEIKDWILMDENYEFCFSLYKDSLILIQTKDMQEPEFVYYNAFTSSTVSLIVSKHDNKFETLSKNQKILFKNANEKEVIAKSIGIQNLKVFEKYIVSALGEVTKAEFRQREDFKK

SEQ ID NO: 6730 - protein, 1363 aa, unidentified
  REGION 1..1363: note = Description of Unknown: Cas Enzyme sequence
MTKPYSIGLDIGTNSVGWAVITDSYKVPSKKMKVLGNTSKKYVKKNLLGALLFESGITAEGRRLKRTARRRYTRRRNRILYLQEIFSTEMAKIDESFFQRLDDSFLVPDEKRDSKYPIFGNLVKEKTYHDEFPTIYHLRKYLADSSKKADLRLVYLALAHMIKYRGHFLIEGDFNSRNNDIKKNFQDFLDTYNAIFESDLSLENSKQLEEIVKDKISKSAKKDRLLKLFPGEKNSGIFSEFLKLIVGNQADFRKYFNLDEKTSLHFSKESYDEDLETLLGHIGDDYSDVFLKAKKLYDAILLSGILTVTDNETEAPLSSAMIMRYKEHEGDLALLKAYIRNISLETYNEVFKDDTKNGYAGYIDGKTNQEDFYVYLKKLLTGLEGADYFLEKINREDLLRKQRTFDNGSIPYQIHLQEMRAIIDKQAKFYPFLAKNKEKIEKILTFRIPYYVGPLARGNSDFAWSIRKRNEKITPWNFEDVIDKESSAEAFINRMTSFDLYLPEEKVLPKHSLLYETFTVYNELTKVRFIAEGMRDYQFLDSKQKKDIVRLYFKGKRKVTDKDIIDYLHAIDGYDGIELKGIEKQFNSSLSTYHDLLNIINEKEFLDDSSNEAIIEEIIHTLTIFEDREMIKQRLSKFDNIFNKSVLKKLSRRHYTGWGKLSAKLINGIRDEKSGKTILDYLIDDGISNRNFMQLIHDDTLSFKKKIQKAQIIGDQDNIKQVVQSLPGSPAIKKGILQSIKIVDELVKVMGRNPESIVVEMARENQYTNQGKSNSQQRLKRLEESLKELGSKILKENVPAKLFKIDNNALQNERLYLYYLQNGKDMYTGDDLDIDRLSNYDIDHIIPQAFLKDNSIDNKVLVSSASNRGKSDDVPSLDVVKKRKTFWHQLLKSKLISQRKFDNLTKAERGGLSPEDKAGFIQRQLVETRQITKHVARLLDERFNNKKDEDNKALRTVKIITLKSSLVSQFRKDFELYKVREINDFHHAHDAYLNAVVASALLKKYPKLEPEFVYGDYPKYNSFRERKSATEKVYFYSNIMNTFKKSITLADGTVIDRPLIEVNEETGESVWNKESDLATVRRVLSYPQVNVVKKVEVQSGGFSKELVQPHGNSDKLIPRKTKKMLWDTKKYGGFDSPVVAYSVLVMAEREKGKSKKLKPVKELIGITIMEKESFEKNTVDFLERRGLRNIQVENIIQLPKFSLFELENGRRRLLASAKELQKGNEFILPDKLVKLLYHAKNIYNTLEPEHLEYVETHRTDFGKILDTVSVFSEKYILAEANLEKMKEIYRKNVDTEIDELVTSFINLLTFTSIGAPATFKFFGRSIERRRYSSIVEILNATLIHQSVTGLYETRIDLGKLGED

SEQ ID NO: 6731 - protein, 1078 aa, unidentified
  REGION 1..1078: note = Description of Unknown: Cas Enzyme sequence
MSVKKSYRLGLDIGIASVGAALLAEDHILALHVRTFDKAETAEGESLNKIRRDARLTRRRIRRRSFRLTRLRRILHRYGLIKTPEVESVNLVGVSPWQLRSDALDKLLEPKELAFALYHLVKHRGFQSNRKSEVKPGEKAGDMLSGVSQNQALLKEQGYRTIGEMVAKDNSFTQSKRNKGGDYSHTFSRQDLYQEVEVIFKQQIELGNTYINDELKDEVLGLLMARKPALAGDNLLKMVGHCTFEKEEYRAPKACYSTERFIWLSKLNNLKILQLGSSRSLTKAEHELVKEMPFEQAKVTYKQLRKKLQLDDEAKFNGLTYFSKNGKDPETVDFFVAKAFHSFRKVYLAYGLETQWKKDATNHDKLNKLAYAQTVYKEDAEAKTWLEVQGIESQIIEAILEVSFSEFIRLSTKALQKILPFMEQGQRYDEAVISAGYMHHSQLSHSEKTNFIPALNKEEFTNPVVFRAINQTRKLVNAIIKKYGAPMSVHIELARDLNKSFDERRKIEKEQKENQINRQKDIEDFENRFGVEANGHNLAKMRLYREQSGQCAYSQKPIDLNRLCEHGYVEIDHALPYSRSFDNSFTNKVLVFTAENRNKGNKTPYEYLGGELNDQAWINYQAWVQSNIKNPRKVQKLLRKDFDETKAEEFKERNLSDTRYAGRVMKNLIEQHLNLNDESTSQKCVVVSGQLTAYLRGRWGLHKVRADGDKHHALDAAVVAACSHSMVKRLSDYSRKNELSQVKCDFIDPDTGEVLDIQALRKLESQFPMPWPDFRKELIGRLSDNPQEELNTLKHYTSEKLETIQPLRVSRMPTRRGLGSAHQETIRSAKYLDEGISLIKTPLTKLRLKDLEKVYQFQDPRNTPIIEALKTRLKAFDDNGIKAFSKPIYKPSKANGFNAEIPKLDDYDGEPAPLIRSVKLQEVQKSGIPIRGGVANNGDMVRIDIFTKGGKYFVVPLYVADAAKKILPNKAVIAKKPESEWIEMDETYEFLFSLYPNDWVKVTFKQKESKEGYYSGMDRATGAISLWAHDRNQNLGKNGLFRSIGIKAAKSVDKYHVDMLGRLYKAQNEVRKPLLQGK

SEQ ID NO: 6732 - protein, 997 aa, unidentified
  REGION 1..997: note = Description of Unknown: Cas Enzyme sequence
MSEKQKYYLGLDCGTGSVGWAVTDEKYNLLRRKGKTLWGMRLFDEANTAADRRVARSSRRRLARAKSRIKLLQMLFRDEMIKVDPDFYTRLRESFYLEEDKCFKDPAANSKNTLFNDANYKDKDFHKEYPTIWHLRNAIITGFEKHLDIRHYYLAIEHIIKHRGHFLKDGELKGAGDFNELWNNFCSYANDCGFAANESYGNSAEILLKKKMSKTDKKKQLGNEMFGVADEEFAGEQKDLAALLCGSKVSLKKMFGIESVEDYKLSFAEGVFEDKVPEIEEYLAGVENGMDLVLTAKQIYDYVYLSDLLRGSDSISAAMVRNYDQHQKDLREIKDALKPFEKDYKYFFKTEETKKEGEIFYAAYVGKAYSQDKKGRKKSYSVSQEDINKELIKLFKAHNIDGDLLKRAEEGILLPKQRGFAKGTIPQQLHHNELRLILERLARDYPSFAKEVAGESEGYNTALKKIERIHDFRIPYYCGPMLSRSERKTTFSWADSEIREIVRPWNFDELVDKSARADKFISRMTNECTYVIGADVLPKNSFAYQKYMVLNELNNLKINGVRIDNETKQKIYDKGYLSGELRGNISLGQLKKWMNSNGILGDGDELGGTNEVKVLPKLSTNADFARILGDDFSKRYETKKLEKTVELITILNNERKMLAEKIREELGCSDEQATKLSKLNYKDWGKFSEMFLAGIMVEICGRKMSILDALWETSHNLMELLGGEFEFKNELDRINRDSAKEQSDEITYEMVKELYCSPAVKRTVWQAIKIVQEIKQVMGCAPEKIFLEVTRGEEKGEKKIKLARRKDLIEKYKQIKTQEAKDLLSNLDKKCEDRDLQSKKLFLYYCQMGKCAYCGKHIDLEEINNNQLCDIDHIYPRSKTKDDSITRNLVLVHAEENREKTNDYPIRDDIRNEMLGIWGAWCHAGLITKEKYERLTRATPLTDDELAGFISRQIVETSQSVKAIRDLIQQYMAKTKVVMVKAGGVSDLRHFYGYSGD

SEQ ID NO: 6733 - protein, 1489 aa, unidentified
  REGION 1..1489: note = Description of Unknown: Cas Enzyme sequence
LGTNSIGWALLDTDKQAFIKTGSRIIPMDAATLGDYENGNLKSGAAERTGFRGMRRLYERSNLRRERLLRVLNVMGFLPEHFCEQIDFEQHPGQFKNHGEPKIAWRMGADGKSEFIFKDAFLEMVEEFRKSQPSLVGEGKKVPYDWTIYYLRHKALTQPITKEELAWLLLNFNAKRGYYQLKGEMEEQASTNKREEYKILTVKEVVKLEEKSRKSGFSKYEIRYDDGTVQPVESRAQPHQVGDRVELIVTTMLDNDGNVKLTKDGEPKISVRSPKDDDWTLRKIRTEHEIYESGQTVGSYIYSHLLTEPDVKVRGKLVHTVERKLYKEELRRILERQKEFLPELSDTELYVRCVRELYRQNDAHAESLSGKDLTSLLIDDILFYQRPLKSKKSLIEDCPYESYHYRDGKTGELVEVPIKCIPKSNPLFQEFRLWQFVGNLRIFKRENMVDGKLRTDCDVTSEFLKTKEDRACLFDWLNTKKEIKQDDLLKYKPFGIGKEAKAHRWNYVEDRAYPCNETFYEINRRLAQLESVPTLSPSDIQQIWHIAYSVCDPTASDKALRSFARNHSIDEDAFVELFGNYAIAKKDYGAYSEKAIKKLLSLMRMGHHWSAENIPASVMQRVEKIIDGEADESISIQTMEKAEGLERINDFQGLPLWQACYIIYGRHSETQDMSRWQSPEDIDQWMKTSFKQHSLRNPVVEAVLGETLRLVRDLWKECGKIDEVHVELGRSLKKDAKGRAKDLKRQQENEQTNRRIRTLLREMAEPDSGVDNVRPHSPSQQELLKIFENEVLSNPESEMDDEIKTIVGNMGKAVYVSHSDVMRYRLWLEQRYKSPYTGKVIPLSKLFTTAYEIEHVIPQSRYFDDSLNNKVICESEVNKEKDRMLGYEFITKKGGSIVKGAGGQDFRIFSKEEYEEFVRNHYKGKKMKNLLLDDIPAEFVQRQMNDTRYMSRRIIGILSMLVRDEGEEEATSKHIIATNGSITDRLKSEWGIKDIWNQIVALRFERLNEKTGTSNYGEWKNDGGKRYFQINIPDEIATGFSKKRIDHRHHAMDAMVIACTTRDMVNYLNNCEAAEDKRERRYDLQHKLCTKVKTDDRGNYVWRFNQPWEGFPADVKAQLEGIIVSFKQNLRVINKMTNHYQHYENSKKVYSRQTKGDGWAIRKSLHKDTVSGFVTLQRVKQVKLSEALKDWKSIKDKAIKKEVKRVIALYNGKCDEKTLNKYFKDRGFKLGNKDISKVEVYYYTSGKDALSASRKPLDTSFNEEKIRSITDTGIQKILLRHLHNYDDPQGKQHPELAFSPEGIEEMNRNLRQLNDGKDHKPIIKVRKTETFGMKFPVGENGAKRQKFVEADKGTNLFFAIYEDENGQRSYESIPFNVVVERMKNHQPVAEARNSNGALLKFTLSPGDLVYLPNDVDHPEKIDRKRIYKMVSCNKKQCFFVPYAWASIISDGIELGSMNKIEMALTGENIKAICLKLIVDRLGNIVKIQE

SEQ ID NO: 6734 - protein, 1435 aa, unidentified
  REGION 1..1435: note = Description of Unknown: Cas Enzyme sequence
MAQKILGIDLGTSSIGMAVRDIDNGDNLKEQIEYFSVDIFKSGTGKDKTGEYSFAAERTKHRQSRRLNETRRRRLWATLELLIENNMCPMDKETLKKWSTYDKSSGLKREYPVNDEKFESWIRLDFDGDGKQDYSSPYQLRAELANTQLDFTEEINRFKLGRAIYHIAQRRGFKSSKGETIAEQEKEDNKAESEDITTSMKQSETKQCKELNEYIKQNNLHTVGEAFALLEKNGNRIRNSIYKAVRDQYEEEIKYIFNFQDQLNTVSELFKRLVSKKKGEGTIFYKKPLRSQKGLVGKCTMEPNKRRCPVCHPEFEKFRAWCFMNNIKYRDSYDGEWQTLPLSIKDKLFKTIFTSRVKSDFTFSDIRQFLAKELGLFVRLDGDGEKKTINYTDKTNVAGCPVTARLIKLLGEDWENFQKEGNTQRTSHSNKSDEMHKVTYNAMDIWHICFESDDPEDITEFAKKIGWEDDKQKELLRLWSTMSQGYAMLSLKAIKKINQMLYKGLKYPDAVMLAKVPEIAKLNDDEIEDLINAYLTEVKKDSDDEKTINAITNKLIADYKSMIIEERFAEHNYDYILQDSDFQDIENKSKEHFGEKTWSNIDIDTQKDIINKVAEKYQQFFNDEKRMFIKTPRLDDTLKKYLSEKYQDVDAKEWNKLYHPSQINLYQAQLNNGEPRLGSPNIGSIKNPVALRTLNVLRKKINAMLDKKLISVDDTRVVIETARDLNDSNMRWAINTYQRSKEEENNVIKSVLEDFYKGREINSKDVDMARYIIDQSEKQPYKSNGKNVGTYQLENDKHKYKLWLEQGCHCMYTGKVINLSNLFGETFDIEHTIPRSKSFDSSDKNLTVCDAHYNRYIKKNMLPTDCPNYEHDITIDGVTYTAIKPRLENWEKKVQRLKDNVDFWKNQSRKAQTKDRKDQCIRQKHLWNMELDYWSGKLSRFKMTEVKEGFKNSQLIDTGIITKYATLYLKSIFNNVDVQKGQVTADFRKMLGIQSIDEKKNRDKHSHHAIDATMLTIIPVAAKRQRMLEMFYKIEEAEMLHHDCQQIKQELQKEIDDCYIGKDVASIVDFIESSILINHHSKDQTLAKASKKIRIRGKEVKIKNSEGEMVNKWAKGDSIRGQLNKESFYGAIKYPKEDGSGIDRKPIIKDGMFEYGDNQDITMVIRNDIRSFSSLDEFKIIIDPTLRAYLYDVIEKRIKEENLTFKEAINKDIYLTDKYGHEIRKDKNGRPICPVRHVRCKVKTGRGFMTYQKCLQIRDQKYTSNKKCINVTDRSYKSKVYAQNDSNYLYLLYEGINKGKLVRKDRILNLYEISELMRGNRNTNIEHFIKNEPYFNTITDKKTELKLTAIIKVGYRVILWEKSPEEITGMSDDEISKRLYVVFKFNNTGSNHLYLKEHINAGTDSDKELVAAKLNCLIEHRDFEIDELGKVILKD

SEQ ID NO: 6735 - protein, 1239 aa, unidentified
  REGION 1..1239: note = Description of Unknown: Cas Enzyme sequence
LELPNIFSIFVENLPNMKKRILGLDTGTNSLGWAVIDRDENDEYSLVDKGTVIFQEGVKIEKGVESSKASERTEHRDSRKHYYRRRLRKIDTLRALIKYGLCPPLTDEELNLWRKKKIYPLNDDFMLWQRTNENEEKNPYYYRHVCLHEKLDLSKQSDRFILGRSLYHLAQRRGFLSNRLDTTSEDETGKVKQSISSLNEEMANAGFEFLGDYFHYLYSTKKSTVRLRSRYTDREGHYLKEFNEICRVQHLDDDMVNDLRSALYFQRPLKSQRHGVGLCTFEPKKPRCAASHPDFEEYRMLSFVNAIKIQAPKDAAPRGLNDEEMAKIEPLFYRKSSPNFDFDDIAKKIAGKNNYMYDKDQGDKPYKFNYRMTQGVAGCTTIAQLKAIFGEEWKQGIAETYIKMENDKSVDEAVNDIWNVLYSFSSEEKLKEFAKTKLQLDDERADKFSKIRLTSGFASLSLKAIRKILPFLRQGMIYSDAVFFANIPTIISKELWERDKDVIMDEFRRIIYNTNAADREMQGTMDFMIKNYLKDNYDLKPGAADKLYHPSMIETYPDAKIENGVYQLGSPRTNAVRNPMAMRSLHQVRKLVNALLRKGIIDNATEVHVEYSRDLNNANVRKAIANYNKEQEKLHKTYRDEIKKLYKEETGIDIEPTKEEILKFQLWEEQGRICLYTGRQIGISDFIGPNPKFDIEHTIPRSVGGDSTMENLTLCEKKFNRDDKRAKLPTQLANYDEIMARLDGLKEKIVGLEKQINAKNLKTFTGMEKSLKDSRLQKKHLLKMKKEYLLGKYRRFTMTEVPEGFARRQGAGIGLISKYAGLYLKSLFHKPDDRNKSNVYIVKGPTTAEFRKLWGLQDEYTKKKRVNHVHHCIDAITIACIGKKEYDEMARYFREYEAFERSEANRPTFKQPWPTFAADLNNLEKELLIVHSTKNNLPKKAKKVVKTSKGKFIATGDSARGSLHLDTYYGAIERDGEIKYVVRKALTDTTFFDSPKKLDLIVDEAVRDKVKQAVEGKNFKEAMAEPIYMNKEKGILIKKVRCYMNSVRNPLNIRKHRDLSTKEYKQQFHVANDSNYIMAIYEGLVKGKVKREFEIVNMLDAANYFKTSTSKEEFPTLVPQRSANGLEMKSRLFIGTMVLLYEKSPDEINFYDMHDISKRLYKVTGLSSTNVSGYLYGVISLRHHEEARPSNDVRFKNGAYKNDEQLRPGITMLHTQINALVEGEDFTIDELGKIKLINR

SEQ ID NO: 6736 - protein, 1089 aa, unidentified
  REGION 1..1089: note = Description of Unknown: Cas Enzyme sequence
MAYGIGLDIGISSVGWAVVALDEAENPCGILKMGSRIFDSAEHPKDGASLALPRREARSARRRLRRLKHRIERIKALLLKENFLSQDELAHLYDNADGKLEDIYSLRVRALDEKISYKDLARILLHIAHRRGFKSNRKSETADKETGNMLKSISENEKAMKEHGWRTVGEMLLKDERFSGQKRNKGGVYLTTVQRSMVESEVRQIFLAQRKFGNEKASESFEDAYLAILLSQRSFDEGPGNPSPYAGSQIERMIGMDTLDGKEQRAAKATYAFQKFTLLQNVNHIRLSSESEDRALTSEEREKVVALAMRKDKPTYSDIRKALDIPEDFLFNISYAKGEREEAEKKKFNYMSAWHAMRKLLAKAEGCRKIDEIDSSMIDAAGTILTKYKADDHRTEELLAAGFTREEAEALLPLNVSGFGHLSLTNLKKIIPGLEKGMTYNDACTAAGIDFRGHSGTEKSMYLPFIPEKMEDITSPVVLRAVSQTIKVMNAIIRVQGESPLYVNIELAREMARNFKERRDIENSMEENRVANEKLMDEIRRNFKRMNPTGMDLVKYKLFKAQDGRCLYRGKAIDIERLFEPGYVEVDHIMPYSISFNDTYNNKALVFASENRRKGNKLPLQYMSAAQAEDFRVRIENSTLRSAKKRILLKEKFTDEDLNGFKERNLQDTKTMARFLYNYIRDYLLMAPSVTGRKKRVTAVNGAVTAHLRKRWGINKNRANGDLHHAVDALVIACTTDKLIQDVTRHARYEELKYVPGTEESRLVNTRTGELMDRFPLPWHDFRDELTARLSSNPTDVLRRLNLPFYRGEKIEDVKPLFVSRMPRRKVTGAAHKETVKGKTSDKEIVTVKRNLTELKLKNGEIADYYNKESDRPLYNALKAQLIKFGGDAKKAFAEPFHKPKADGTPGPIVKKVKLTEKTTLTVDLHDGSGVADNGSMVRVDVFYREGDGYYLVPIYVADTKKPQLPDKAIVAHKPYEKWKEMDDKDFCFSLYPNDLIRVVHKTGITLKLDKKLAEKSSLEKTKELKDVLLYYAGADISAGSISAVYNDGTYGIHGLGVKKLSALEKFTVDILGNYTKVRKEKRMPFRKD

SEQ ID NO: 6737 - protein, 1053 aa, unidentified
  REGION 1..1053: note = Description of Unknown: Cas Enzyme sequence
MRILGLDCGIASIGWALLEDGDGGGEPGIVAAGAWMFDPPEEKTKTKTQLKSELRRIYRGQRRVTRRRRQRMNNIRRILHQYGLLESFSRDALKRPCLDPWKLRVEGLERLLTPEEFAVALGHIARHRGFKSNAKRTKVTDTADDTSKMKKAMEETRTKLAFYDTPARLLAAEYPVAGRYRNREGDYTRSLFRDDLENETRKLFKAQRRLQARYATAELETSFAESAFFQRPLRDSVGMVGACPFETGEKRAAKRGYSFELFRLLSRLRNLTLRLGSAERCLAPGEIETATQDFGVTQKFTFAHLRKRLKLDDSTLFADVARADEAERDVVARAGEAAAGSARLRKIVAQILGEQAWSALIKQPATLDAIAEIISFRNDLDAIRSELEKTGIEIALVEAIVVASSEGKLDAFTGAAHISAKAARKIIPGLRDGLTYDKACERAGYDHTTSTERQAFDVGVRGKEALAIILREGRISRQLVGSSTARKALIESIKQVKAIVEEHGVPDRINIELARDVGKSIEERARIHKGIERRNDEKESLRKRFAKDIERPPAEGERGKEEMLRYELWHEQNSRCLYTDTQIDPREAVGNENLFQVDHILPWSRFGDDSFLNRTLCATKANQDKKNRTPFEWFEAEKTKEEWRAFVARIESIRSMKGLKKRNYLLLDAARVVDKFRSRNLNDTRWTCRLLAEVLRQLYAKDDPTRRIFARPGALTDRLRRAWGLQWIKKDAKGARIPDDRHHGLDAIIVAATTESLLQRATREVQAIESKGLPYDLTKNISPPWPGFREQACAAVENIFVARAERRRARGKAHDATIRHVALRDGKEMVYERKKIADLVIGDLARVKDPDRNARLIDSLREWIEAGKPKDRPPLSPKGDAISKVRLATKGKIGIDFDTGNAERLATVDRGEMARVDVFRKANRKGKFEYYLVPVYPHEIVTLDAPPMRAATSSKPESEWPVMDESFEFLWSATQKTWLEATKSDGEILNGYFRGLDRSNGAIALSPHENATHSIRGIGTRTLLSFRKFAVDRFGVRHEIVRETRTWRGKVCI

SEQ ID NO: 6738 - protein, 1166 aa, unidentified
  REGION 1..1166: note = Description of Unknown: Cas Enzyme sequence
VLGLDLGITSVGSALLDLDYNNLKNTNILHCNIRIFEAPITPKEKTSLQLIRGENRRARNSKENSAVRRKKIVNVLLKYKLIDKNEIKNINTNLPKSKSKRDIIVKVANYLFENKKNANDILELRYKSLNEKLSNIELARLLYSMNNHRGVSYEDTRSSKNIPEKKLEEFSKKSINDYADGSSDKLLYGLLNFKNAFINSNKYQTVGDFLYKEHREKFRNSPKRLKDTKQSDFMFVIPRKNIVDELNFIFEKQKEFKNEAINDDFIKEYLEAFLWEEDSPAYDLLVANCSIKESKKAASKYLVESQFYIYLEKLYNLSYKTKDEYRYKNLDIESIVKIIKNLNTKTIKYSKLKEFVEKELNLQDVMFKGVSDYKKDFIDLSIFVNLASILSLSTNILELFQNIEAKNLFNQVVNILAYEPKISQKEEKLKELNIVDEDIVDKLLEVKIKGNLSYCDEVLEQICNGMLSGLIPHYAKEEVQKAYPKKSIIKGHLLPPLLDTDFPIKNNQVVVRALSQMRLVVNDTLKHYRKLYNNPNWFFDKIVIETGKDFLNKEQVKKHNDRAKENEKSNKEAIEFCEKYGKAYPSREEILKARLYLQQNGEELYPSNYDISTNSAKFQQIDAQRLFDEAYCEIDHTLPISRSLDDSFANKTLVLSTTNQNKGDKTPYEFLSKELFEIMEDKLNKNINTLGYKKVSNLTNKEFKELDGFIARDLNDTRIITKYAGLYIEKYLAFPKSEKTKRRVFANNGKITSLLRKSWGIGAKNRNNHLHHGEDAILIALSDNSLIKNISTYYGIQTQLENLDFSKDGFDKLFKNNKNIKEHIQKELKKDDIDIENIDFSKINKKEISSKIFRIIAKKSYPREDFLDIFRNSIDNAIVTHQERVKINGQIHKDTLEKLSKKTNDDVVLVRGGFATNGEAIRYDVFKSDNKIEFKRIAPKYCNKKVELLPQANDNSAKFMLSIYKNGLLKVGFIKNDELFNIKGIFSKIDADAKGILTYIYLNSVRNTEDNLFISFVSGFLNSTIYDDAINSDDRKKIDELLKNNKIKITDSVRDKDTIKSKIVDFMNIVKSNAELVVGFNIIRNNNILNSIHNDLSEYLYKKDLKYDVIINIDGKPATPILKIKLPIDDKKTNLPKMVNIIKLKTDTFGNEEIIENEKREPLIKK

SEQ ID NO: 6739 - protein, 1125 aa, unidentified
  REGION 1..1125: note = Description of Unknown: Cas Enzyme sequence
MKKILSLDLGITSIGYSIIDELGNNNFSLINYGVFMLDTPYSNDEKRISKKTIHSQVIAIKKLYKLKKERKQNLAKLFEEYNFGRKDDFLNQEKKNLFINKWELRAKKAFNEKLSFQEFFSILYLIAKHRGYKSLDTDDLLEEFCEKLGLNQEVKKEKTVDERGKIKQALKTIETLKLQFPHKTIPQIIYEVEIQKDNPTFRNHDNYNYMIRREYINEEIKTLVLSQEKFGLFDKNFDSKAFIEKLIKTIDDQKESSNDLSLFGNCEYFKNEKVAHQYSLLADIYKMYQSIANITFNSNPTIKISKDQIKLIANDFFDKLKNGKNITDIKYKEVRKILKLSDDFKIFNKEDSYKSKDKTQENSITKFHFVNNLSKFDKDFIKNILEKSNKYEILKEIFDVLRDEKQPKPIYDKLNTIFLKYDLINDKSTKNNTILELIKNKTGSSLSISHQAMINIIPYFEDGFTIDEIKQKLNLNREEDYLSFKKGIKYLSVAQFENDTNLLVNNHPVKYVVSAVFRLIKHLHTTYGAFDEIRVVSNEELQLNQKAIKNIHKKKIEKDKKTKAILENINYQQIANSFDKNIEDYVKRILLWEEQNGIDIYTGKIINIEDIFSKNVDITYIIPKSLGGLNSNHNLVLVYINKDNKISNQLPINYILDKQEFINRIEYLFNEYKISWKKRRNLLTTNLDEIYENSFKIENKIASSYIEFLTSDILKRYYPFNSHINVTHSQIKIILNIRKFLNIKSKIPNTNIYHAINAILMGISDKVWMQKLCNTFKNNLGLKENLSEQNIKRFNPFIQGIEVKKFMEMIEYNYNSFGEESIFYKDIFGKLKVVKFWVSKKALVSKIHVNNIYSKKPDGYFTARGIKNINEHFIELKISPNTKAEDFYEKFKNNILEKMYVYKTNPNDIICKIVKDRAYEIKNLLISFEYINKNDSDIYIKAQQQLNNLICSPILDNNNKPIRKVKFYRTNLTGFNVRGGLATKEKTFIGFKVKLDNYKLVYERIDLSNYEIIKTQKDNSFRVYKNDMIFFIFPDNTYKGGKISSFLENKQIASFLNPRFPSLSQYQPDAFCRFDKNKKCGAKQHLLSKAIGIIKLDLDILGNINSLQTIGRVESRLYNLLKSRK

SEQ ID NO: 6740 - protein, 1363 aa, unidentified
  REGION 1..1363: note = Description of Unknown: Cas Enzyme sequence
MNTTSIISLDLGGKNTGFFSCTTHDFNNLKNFQSGTIIYDESFILSQVNRRGKRHTKRNNLRRKLVKRVFLLILKEHYKLKIKYLPDEILALFNKRGYTYASFELSNEEQESLSSNILKEFLNENLENFNISNDIEIEDFLNQIASNENAFKQYSKDFLNLYESSTFKPKNKIELKDEIKNSYEDKEDQKELFDGLKTVKKTLEEFDKQQNQGNLPRAKYFLEIKEEIKTNSNIQNFLKNSNLEEEKINNLIGNISNFQLKELRRYFNDKEMVQGDIWIEDKLHKIVWRFITSWHPKKDETIKKNQDELTSNLKNSKIIDFLTQTNPNKTIPPYDDMNNRGAVKCQSLRLNKNYLDTHLPNWRKIANTLANDSLKENLKNCTTNKSDIDLTLLHRLLDTSSSIDSYKLREYNIENYIDILGKDDSLKFKKFTQNYYETITKKVRTGIWQKADNIFELCNHNPPYKNNQIHTLVSAILGVEISDTKFKEFEETLWNKKFGNKKLVNYCKNIEEIRKRKGNLFKLYIEELKEIEKPDSEQKKDINLLKDELLLFWTDEIANFFKLDNIFKSRFSNHFSMAQLYTIIETKRAGFMSTCKWCSAENSFRTKTNIENFTLYDKSTGEKLEDVIFDENIHIKVYENSNAQRLPADTQRPFSGKIERYIDKLGYEIAKIKAKELENTEEKKIDLKIVLEQNSFEYEESIRSAKIKNANAKAKKSLEDSKKFFEKSIEEKEKRIKNFNNKICLYCNSEITTDGEIDHILPRSYTLKNYGTVFNSEGNLLYVHQKCNQSKGNKIYKLEDIKASINVNEIEEQISKIKSYKTFTLLNQKQQEAFKFALFLPNSSEAYKKVLGFLRTDQSSRVNGTQKYLAKKIQEKLIKMFPQKEFDFEFILASSEDVSRLRKDYAKQNPILEKPKDNKQSPSSHTIDAVVALSSVFKKVTNLDDIPTSNKILEFVQINNIPIKPLGKIEKEQIGNLGNGSIFKDSIYQENFAPIYEFENRFYTGFLKASKTPDFKNCIEIKSSDFEQIKEYLKGEIKKENGLIIYQINKQKTLDLFHNISNNLSDELKLAETLDKFSYTLLKTSVENAPKILKDSKKTSTKIYGKTLILPIKDEWERFDKFLKKELISQNIEYKEKDGKYQIENEILISICKDYFNIQNKNIRNKARKVFSLPTVEAPSGGFRIRRKNHKNENIYQLVGIDGAKSVGFALENKKINSSKDVLLPTLVKSKNISFKEPAKKELQEYIDMNNFRDLTKFVNLKNINIFVAPASTNRPLVKVELDFNLLKNILKNENLNFLELDNIKLEDEQKAIFDEIFNSCNFAPRDNKIKILKADSNRVLIEFSNSNKTIMKYYDKAEDINI

SEQ ID NO: 6741 - protein, 949 aa, unidentified
  REGION 1..949: note = Description of Unknown: Cas Enzyme sequence
FKDKLLNGVNENSLGVFEQRDLKSVEDMVGYCSFYNLYHENKQKRVVNAHIKAIEFILRQRIENSILGNLIINKKTGEFVSLSKENIETTIKFWLETPNVQKITTKNIFKNAGLKDLEIKTSDKQDDTVQDITTYKAILEIISYEMIVKNEDFYSKLLEVLHYYVSKEQIITEIIKIDKEKILTNEQIEKIANINKNSSSYISFSLKFINEILEKMKKGISYQDSLTELGYFRKYTNIKAYDYLPPLNPNSEDIEFLKNKIPDFNPQELFYQPLVSPNVKRVISILRRLINELIKRYGKIDKIVIETARELNSKKDEEKIKKSQEQSNKDKKESENLLKSMNKEISSKNILRARLLKEQKSRCLYSGENLTLEDALDENITEIEHFIPRSKIWIDSYKNKILVLKKYNQNKSNQNPVLFLKSIGEWENFIGRVNEYISSKDKKFWLTDEVNIEKIYNDEKLEDRFLNDTRSATKIVANYLEHYLFPKQNEHGKGESNDKVIRVTGKAISELKKLWGIHEAQPTNEDGKKDRDTNYHHTIDAIVISLLNNSSKKALNDFFKQKENHFKTKAILENLKTRFPISKDGKSLFEFVKDKVEKYEKNELYICPFMKKRENIRGFKDGNIKLIWDEELNNFAQIDKIDINKNLLLNNFGKDLKDDEVKKIFEDIKNRLEFPKQNNIKKALEDYEKRLLETRARINAIKDEIKQEENKLPRDKKAIDTQESLEIKEKIETLKINQKGLSKDMETPCSFLTKDGKKQIVRSLKLKTNSVTKADSIIITDKKQNNRVQRLNKEVYESLKESKTPFVAKLNDNTLSVDLYNTEKGQVIGLNYFSSIKSNILPKINEKKVSLIKNFEDKITISKNDILEVTDLKNCTKEYFVFNGGGDITATNHTIVLEFINLKSITKVNKKGKEEKNFTKKITINENTIVKPIKINFFGEMSYEEFKKN

SEQ ID NO: 6742 - protein, 916 aa, unidentified
  REGION 1..916: note = Description of Unknown: Cas Enzyme sequence
SNSIIFSEHMNAEDRRNFRSGRRRNERTSRRKENTRKLLVSFNLATKEILENPIEYFNNLTKLCKEPYTLREEAVKGKKLTKDEFTFSLYTIISRRGYTNLFATQDDDSEAKESEKINSAIQNNKNIYKNSNFILPSKVLTVKKESLEKDGFINVAIRNKKDNYNNSLDRKLWQEELEKLCDSQKNNKELFKDLETFEKFKDKLLNGVNENSLGVFEQRDLKSVEDMVGYCSFYNLYHENKQKRVVNAHIKAIEFILRQRIENSILGNLIINKKTGEFVSLSKENIETTIKFWLETPNVQKITTKNIFKNAGLKDLEIKTSDKQDDTVQDITTYKTILEIISYKMIVKNEDFYSNLLEVLHYYVSKEQIITEIIKIDKEKILTNEQIEKIANINKNSSSYISFSLKFINEILEKMKKGISYQDSLTELGYFRKYTNIKAYDYLPPLNPNSEDIEFLKNKIPDFNPQELFYQPLVSPNVKRVISILRRLINELIKRYGKIDKIVIETARELNSKKDEEKIKKSQEQSNKDKKESENLLKSMNKEISSKNILRARLLKEQKSRCLYSGENLTLEDALDENITEIEHFIPRSKIWIDSYKNKILVLKKYNQNKSNQNPVLFLKSIGEWENFIGRVNEYISSKDKKFWLTDEVNIEKIYNDEKLEDRFLNDTRSATKIVANYLEHYLFPKQNEHGKGESNDKVIRVTGKAISELKKLWGIHEAQPTNEDGKKDRDTNYHHTIDAIVISLLNNSSKKALNDFFKQKENHFKTKAILENLKTRFPISKDGKSLFEFVKDKVEKYEKNELYICPFMKKRENIRGFKDGNIKLIWDENLNNFAQIDKIDINKNLIYDNNGKDLKDNEVEKIFETIKNRLELPKQNNIKKALEDYEKRLLETRARINAIKDEIKQEENKLPRDKK

SEQ ID NO: 6743 - protein, 967 aa, unidentified
  REGION 1..967: note = Description of Unknown: Cas Enzyme sequence
MKKILGLDLGTTSIGWAVVNEAENSDEKSSIIKLGVRVNPLTVDEQQNFQKGKSITTNADRTLKRSMRRNLQRYKLRREALLEILKEQNFISDETILSENGTRTTFETYRLRAKSATEEISLEEFARVLLMINKKRGYKSSRKAKGTEDGVLIDGMEIAKKLYNDNLTPGQLCLQLLQSGKKYLPDFYRSDLQAEFDRIWNKQKEYYSEIFTDKLKDNLRGKNEKATWAICKEPFNLVGIARTTKGEELKKENFVWRVKALSEKMDLENLAVVLQKVNGQLNASSGYLGAISDRSKELYFNKQTVGQYQMEVLDENPNASLRNMVFYRQDYLDEFNTIWNKQAEFHTELTNGLKAEIRDVIIFYQRLLKSQKGLISFCEFESRQIELEIDGRKKVKTVGCRVIPLSSPLFQEFKIWQVLNNLEVSGQGKKSKKKFKKDDPTLFVNQEDKFQIYGRRELSQEEKEILAYELSIKEKLTKAEILKLLFENPQELDLNFPLVQGNLTTANLFKAYQKIIELSGHELDLRKSADNILKDANDIFDALGWNKDILKFNSNADKLDNEPMYKLWHLLYSFEGDSSNTGNANLIAKISELYGFEKEYASILAAITFQEDYGSLSSKAIRKILPYLHEGNTYDVAVALAGYGKHSKSSLTKEEIENKVLVDKLDILPKNSLRNPVVEKILNQMINVINSIIDTYGKPDEIRVELARELKKNAKEREELTKAISKTTGEHEEYRKILSQPPFNLTYISRNDIIRYKLYQELKDNGYKTLYSNQYISPAQLFSGDVDIEHIIPQSRLFDDSFSNKTIEFRAVNLKKGNLTAADFVKQEYGESGNEKSLDNYLQKLDDLLKKGIISKTKYRHLTWKETDIPEGFINRDLGNTQYIAKYARTMLETLCKRVTATTGSITDSLREDWQLVDVMKELNWEKYKMLGLTEEFTKTDYNGNIVRIQRIKDWTKRNDHRHHAMD

SEQ ID NO: 6744 - protein, 1176 aa, unidentified
  REGION 1..1176: note = Description of Unknown: Cas Enzyme sequence
MKNLLNKKVLGLDIGSNSIGYSLLELDEKDEQVIFNELASNSIVFSEPFLASERREARSSRRRNERKSNRNKNARNIYVNYNISENEFISSPTDYLNNFRLKDNDVYNIREKAVSGSYLTKEEFILSTYSILTDRGYSNMFSLSTNEDGVINDAVSNNAKEYQSKNFKLPSMVLTQKRKNLEKTYQNIPIRNKKDDYQNSLDRNMHIEEFKKVVLSQSNNKEIFSSEEKCHSFIVEIIDKKYNAFYQRPLKSFESMVEYCTYYDEFNPKGSYKRIPLSNYKNIELTLRQKIDNYSAINTKTGEIKIFTKEELDEIIKFWINTPSSKEINATNIFKSVGFKDIKLNIPEQSSQIVLNIQAHKNILEILNKYNIDFQDTQNDFYNKVLLELYYFKNNSSRIENISKLIKQFNLIIDDSFTQELALLENMDGFGSFSLEFISEILDLINNKNKTFHEALENLEYFSKYLDMPNYDYLPPLEPTKADIKWLQENISYFDTKHLFYQPMMSPKVKRVISVLRKLINDIIKKYGKIDEIRIETAKMPNSKKEQERIDKNQSKDRAKNNDAIKLLKSYDLKESSKNIEIAKLWKEQGGECLYSGEEITQEEAFDENETEVEHFIPRSVIWINSYKNKILVKKKYNQNKASQHPISYLQSIGQWENFKGRVSKKYMASEKKDWLSKEEIINSVMQKEHWQDSFLNDTRSATKIIANYLEHYLFPKQNEHGKGETNDKLIRVTGKAISELKRLGVNDVMPKNESDKKDRNTNYHHTLDAFTIALCSNSAINTLHNHFIKNENKFKTKAQKEKLSTHIPISKDGTNLIEHLKNLVEKYENNKLYVCPYNKRKTNMKGFKDGNLKLYITKDKNDNEILAELEKISIDTTILIKTVGGFPKPRSDKEVLEYVESLQERLNPIKQKNIIKAIETYAKELLELRAKISEIDNKINDIKKTLKSGTQHKEYNVSINETIKPFAEENKLLSNQLQKLKCTFTIKNGKKQIVKALKLQKIKIEETKADAILFKNKIERLSISNFKEALENKKPFVIKMNESTLNVQLFNTKDRGQAVGLNYFSSIANDVKTKINDKFADELKGKEADLTLYKNDIIKVDNLKDSKTEYYIFNGGGDITATNNKLTIKNINLNSFIKTDKKGEIKESKEDKLTPNKTTIISKVNIDFFGNIFEV

SEQ ID NO: 6745 - protein, 1214 aa, unidentified
  REGION 1..1214: note = Description of Unknown: Cas Enzyme sequence
EKGKSITTNADRTLKRSMRRSLQRYKLRREALIESLKEHGFISDDTILSENGNSTTFETYRLRAKAAVDEITLEQFARVLLQINKKRGYKSSRKAKGIEDGQLIDGMEVAKRLYEEHLTPGQLCLQLLNAGKKYFPDFYRSDLQAEFDHIWSKQASFYPEIFTETLKEALQGKNEKATWVICRDNFSWTETERVWNELEAKHENIVKEKRLVGIKREGNIQEQKLENFIWREKALSEKMHPEQIAVILSKINSQINNSSGYLGTISDRSKELYFNKQTVGQYQMVVLNNNPNAGLRNMVFYRQDYLDEFNTIWEEQAKYHPELTDELKTEIRDIVIFYQRRLKSQKGLISFCEFESKQIEVTVEGKTKTKTVGSRVAPRSSPLFQEFKIWQSLNNLEVSGKGKKTKKKKGALPNETVDQEDLLLVYGKRELYQEEKAILLHELSIKEKLTKTEILKLLFDNPQELELNLPSIQGNLTLATLFKAYQTIIEHSGHALDLKKPANEILADMKTIFTALGWNTAILQFNSDAENLDAEPMYKLWHLLYSFEGDNSNTGNENLIQKLMRDYGFDRDSAVILANITFQDDYGSLSTKAMRKILPYLKEGNKYDIACEYAGYRHSKSSLTKEEKENKVLVDKLKILPKNSLRNPVVEKIINQMVNVINTIIETYGKPDEIRVELARELKKNAKEREELTKSLADTTKVYDEYKKILTKPLSEGGQFGLTYVSRTDIIRYRLWKELEQNGYNTLYSNTYISPAAVFSGNFDIEHIIPQSRLFDDSFSNKTLELRSINSEKGNLTAYDFVKEKYGETSHENSLDKYLARVEDLYKKGIISRGKYNKLKMQTKDIPDGFINRDLGNTQYIASFARTMLETLCKNVIATTGSVTDALREDWQLIDVMKELNWDKYDKLGLTYYEENREGKKLGRIKGWTKRNDHRHHAMDALTVAFTKNAFVQYFNNKNASLTPTSNEYAIRSKYFENGKAIPPMPLNEFRAEAKRHLENTLVSIKSKNKVVTQNNNVTKKRGGVNKKVQLTPRGQLHLETVYGARRQYVVKEQIVNAKFDLEKVKTVASKKYRTALFTRLQANDGDTIKAFTGKNALEKNPIGLNDEHSVCVPIKVKTVALETVYTIRKPITSDLKLEKVVDVHIRKILETRLKEYGGDPKMAFSNLDENPIWLNKEKGIKIKTVTLTAINNATALHDKQDQFGKPIFDKDGK

SEQ ID NO: 6746 - protein, 1521 aa, unidentified
  REGION 1..1521: note = Description of Unknown: Cas Enzyme sequence
MNKILGLDLGTNSIGWAVVQKDEQGSYEKIINAGSRIIPMDAETMKNFNNGITQTQTSERTRLRGVRRLLERSLLRRERIHRLLNTMNYLPPHYAEKIDFVNRLGKFIGEEEPKYAYKVDEHGKFQFIFKESFNEMLKDFQDKQPELVLNNKKVPYDWTIYYLRKKALDRAISKEELGWIILQFNNKRGYYQLRGEEDETLKEGKKEEYFALKVIRVEADSSSAGKKGEVWYNVLLENGWIYRRTSKIPLDWEGKTKEFIVTTDVDENGNALKDKEGKEKRKFRAPAENDWTLLKKKTESDLVKSGKTVGTYIYDTLLSSPDQKIKGGLIRTIERKFYKSELIAILNKQKEFHPELKDKTLYNKCVEELYRSNESRRLSLSNYDFTRFITEDVIFYQRPLKSKKSLIENCSFERRYYLDPITKELAYAPIKCIAKSHPLFQEFRLWQFIKNLRIIEREKIVGDKLMFDQDVTTEFLPTQNDYVILFDWLNEHKEIDQKALLKYQAFDLKKNIDKYRWNYVENKSYPCNETRALLKTKLNKAGNIPSEFLDNDTLESLWHILYSVEDKLEIEKALTSFATKKELSEEQTVAFVEQFINIPPFKKEYGSYSAKAIKKLLQLMRMGSRWSENEIAESTKGRIQKLIDGECDESIKTRTRDKALKLNEINDFQGLPLWLASYIVYDRHSESGDVMKWETPEDIDYYLKHVFKQHGLRNPIVEVVVVETLKVVKDLWKTYGSFSEIHIELGREMKNPADKRIRMTNQNVENENTNLRIKALLAELANQKDIEGVRPYSPSQHEILKIYEEGVLNMLTKEDPDYDSISKLSKMALPSSSDLVRYKCWLEQKYRSPYKGQVIPLARLFTSEYEIEHIIPQSRYFDDSFSNKVICESAVNKDKDNLLAYEYIKQNEGKIIEIGLGKKVKLFTADSYTEFVQSYYVGAVAKKKKLLMETIPDSFIERQLNDSRYISREIKKLLSSVVREKDEDEAISKNVIVCTGAITDKLKRDWGLNDIWNTIIYPRFERLNQLTNSDKFGQWENKQGKKVFQIEMPLELQKGFNKKRIDHRHHAMDAIVIACATRSHVNYLNNESAHSKSKEKRYDLRRKLRRIEILEKQELKDGITFTKKIEVAKEFYKPWPTFTQDTHEVLQSIIVSFKQNLRVVNKATNRYECFVHGEKEIVKQSKGESWAIRKPMHKDTVSAAVSLRKIKTVRLSLAIDDWANIVDKTLRKEIGLLYSKYGENGSKNIIKYFKDRDNKHNGLDVSKVNVYYFDNDCAASRVTLDDTFNSTKIESITDTGIQKILLKHLSSYNEIKENKIIEHPELAFSPDGLDILNANIRELNNGKFHKPIKKVRTYETLGNKFAVGQKGNKKKKFVEAAKGTNLFFAVYSSEDGVRSYQTIPLNEVAERQKQGLIPVPEKNANNDRLLFWLSPGDLVYVPSIEEEGRIVEVENNLNYIFNIYKIVSFTGNRLYAIQAFIATSIVDKMEYSLLNKVEFTINENRSIKQYCIKIKIDRLGNILNI

SEQ ID NO: 6747 - protein, 1302 aa, unidentified
  REGION 1..1302: note = Description of Unknown: Cas Enzyme sequence
DEDAEKKKYEVVAQKVEILKVEKSDNTFTVRGGKNKGEKQYYFDVTINFEGEEVEGQTELQNLKEKEGQEEELEIRITRKKDDNLTYKFALPQKSNWRKAMELSEKTLKEENLFISQLRLRDLQQNKWTRIRNRVFLRNRYKEEFDKIWETQEKQYPILKDCPKETLEKIVHYIFPGNSESQQLLRKIALEKGLKYIIKEQVIYYQRPLKPQTELIGNCRFEKKEKVIPTSHPYFQEFRCWKQINNLFITSKTLVGNKYIYQNRYLTAEDKQTIYEKLQTQKEVGFSAIIEILNQDKNKGKLDKEQKDYFLNGLNVKAKLKGCDTLLSVKKELGDYFIDFISQDEKLVEQLWTVIFDVTNHEGSEYDVESKQVSSIRKILKNYTDEETAKEFSLKLAQKIKFPRKYASLSEKAIRNILPLMLPNPQSIPDTIQQHFKNIQHLVETGEILDNFNYNLEDYVIDFVKSNPNVLQEGGLMESFAISLVYGKHTAEKIKAQIKNYHDIKEDKERAKNLRNPIVAQLANEAMQVIKAIWKQYKFNPEELEIRVELARDLKNSSAEREKIWNGQRKNKAINDKAKERLREDGIAITDENILKYRLYEQQKFMSPYTKMKIIPFSKLFDDKEYDIDHIIPKSRYYDDSFSNKVICEKYINEEKSNRTAWEYISQQNSKHRNEKEELEIISTNDFLNHVNENFFGKKKKNLLAEKIPSNPVERQLKDTQYISVAIKSELAKIVGSENVKTSTGEVTDFLRSRWGLRKLFMELTENRFKQMELWDLDENGNPKTKWVTRTVIDDGEKKKNLYEIKNWSKRYDHRHHSIDALVVALTSQSHIHRLNNLNKFYQDELTARKDEFKIEIKEGESVFEGFFNLEAERRDEILRQIESSRYFEKPFDNLVEQVKNQLKTMIVSHKPKDKLSINIDDKTNKQQLKIRGALHQETYYGKLNGRDTKRVDIFSLSLSDVSKIVIDNVLANEIIEHKKRYDSMKEAFTGEGLKTFNDNRITKGKQPAYKVKVWYNKEEKKESGLQRLYDNNNKQSVITGDNYLFLVMLKKLRDKEERVFTVATLYDSVSLANKALRNKKTDFRKDIVEEKRLELKSEIIKEFEEKQIELKAKIEKAKGNKRESLKQELQESHDDLEYFVDESSESKLVPLFTLQQNELVYLPTQLNDNVSGFSVDEFNDWLKITENKTAFCKRIYKVVKIDNPGLCHFIPHIYANHISVSKDLSKEEIEYLKKELEAKGKKTISKKDLNFVEFSSYGNCSPYEIGDAFINYLKNGSKIKPLRIQDSCIKIQIDWLGNISL

SEQ ID NO: 6748 - protein, 1019 aa, unidentified
  REGION 1..1019: note = Description of Unknown: Cas Enzyme sequence
FSKTLNIPLAENKGTREEAKLQHYKWRNEALANELDLKVLAFIITEINNQINQSSGYLGAISDRSKELYFNQETVGQFQHKQLANNAHTKLKNQVFYRQDYLDEFEKIWETQSEFHPELNEKIKSEVRDITIFYQRKLKSQKHLVSFCEFEKGHKAIPKSSSLFQEFRIWQNLNNIVVKNETTKETFLLDEDLKKLIAQELLFKESMTDAQMLTFCELKKGTHTVNFKKIEGNRTNTSIFKAFEKILVLEGYDELDLSKLEALEIKNIIKSAFSDLEINTAILDFDATIQGNDFDKQPYYQLWHLLYSAEEDDFLKKSLMSKFGFKENHIPFLLNINLQADYGSLSAKAIKKILPHMMDGHIYDKACTLVGYNHSSSLTTEQNNDRILKDTLEILKKNSLRNPVVEKILNQMINVINAIIKDPVMGKPDEIRVELARELKNNNEQRSEMTKAINKSTAEHEQIRKLLHTEFGIHRVTRNDIIRYKLWKECDGISLYTGKPIEPSKLFTKDYDIEHIIPKSRLFDDSFSNKTICERQLNIDKSNKTAYSFLQEKLSPEEFDQFEKRVKSLFGKISRTKQNKLLMADNEIPEGFIDRQLRETQYIAKKAKEILLEVSRNVTATIGSVTDKLREDWELVDVMKELNWDKYHKLGLTKEEEGKNGERLYKILDWTKRNDHRHHAMDAITVSFTKPAYIQYLNNLNARDINTTKGNSILGIESKYLKRDKNNKLRFIAPIPNFREEAKKQLESILISYKAKNKVVTKNKNTTKKSGGTNQKIQLTPRGQLHKETVYGKLQQYATKEEKVNASFTKEYIQKVAKKEYREALLKRLEENGNDPKKAFTGKNALNKTPIYISLKDNIVVPEKVKIVWFEDNYTIRKDITPDNFKDLKSIAKVIDSGLKTILENRLAEFGNDPKKAFVNLDENPIWQNKEKRIAIKRVTISGVSNAQALHTKKDHFGNEILNENGKPIPVDFVSTGNNHHVAIYRDEKGNLQEEVVSFYDAVVRRNLGLSVINKNHEK

SEQ ID NO: 6749 - protein, 1335 aa, unidentified
  REGION 1..1335: note = Description of Unknown: Cas Enzyme sequence
MLTSLISIDLGGKNTGFFSFTDSLDKSQSGTVIYDESFVLSQVGRRGKRHTKRNNARNKLVKRLFLLILQQHYGLPLDVLPDEIRGLFNKRGYTYAGFELDEKKKDALESDTLKEFLGEKLQNIDRDSDVEDFLNQIASNPESFKDYKKRFETVFVSSTHSPNKKLELKDELKSEYGENAKELLAGLRVTKEILDEFDKQENQGNLPRAKYFEELGEYIATNEKVKSFFDPNSLKLTDMTKLIGNISNYQLKELRRYFNDKEMEKGDIWIPDKLHRITERFVRSWHPKSDADRQRRAELMKALKSKEIIELLTTTEPVMTIPPYDDMNNRGAVKCQTLRLNEEYLNRHLSNWRDIANRLNHGKFNDDLANSTVKGYSEDSTLLHRLLDTTKEIDIYELRGKKPNDLLVKTLGQSDANRLHGFAQNYYELIRQKVRAGIWTNSDDMLKRCDHNPPHKTNQVHNLIAGILGVKLDEARFTEFEKELWSAKVGNKKLSAYCKNIEELRKTHGNMFKQVAETGEDKDVLKYQKDLEFWTTKIAEFFGIDNERKQRFSNLFSMVQLHTVIDTPRSGFSSTCKWCTAENRFRSETAFYNDETGEVYNKATATCQRLPADTQRPFSGKIERYIDKLGYELAKIKANELEGVEAQNIHLPIILEQNAFEYEESIRSAKIKNANKKANEKLEKSIKNAKKSIEDKDKRIKAFSGGICPYCGDTIGDDGEIDHILPRSHTLKYYGTVFNSEGNLIYVHQKCNQTKVDSIYKLSDIKAGVSVQWIEEQVANIKGYKTFSVLSAEQQKAFRYALFLSSDNEAYKKVVDWLRTDQSARVNGTQKYLAKKIQEKLTKMLPSKHLSFEFILADATEVSELRRQYARANPLLEKQNKQAPSSHAIDAVMAFVARYQKVFKDGTPPNADEVVGLISVNNIKTKPMSKIQKDQKGNLGGATIFKDSIYQERFTPIYRYDDKYYAGFVKASKELDFSVCAEIKQQDFEKIKPYIKQQKTTNGGFEVFELDKSKILNLFHDISRGNSDDIKTAELLNKFSYNLLKTSVKEAPTVLKDDKKLSSKIYGKAMVLPIKQEWLVFDNAFKKYLTDKNIEYKEKDGNYNIEGDTIDDFCKIYFKIEPKSIRNKARKVFSLPTVESPSGGFRIRRQNHKGENVYQLVGIDGAKSAGFAKIEGKIDTSTDVPLATLAKSKNVSFKDPQKMIIADYVDMGEYRKANVAELEFYISMATVDRPKVIVNIGFDIFQKLYNSELASVLSLQSEIKIVDGTEENTISYKNFIDRFGKYDIKPRVESKNGKPKTGKIQIIEASPKNIKFIVELGSAYSKIKDYFKNAK

SEQ ID NO: 6750 - protein, 1455 aa, unidentified
  REGION 1..1455: note = Description of Unknown: Cas Enzyme sequence
HKIKLILMAKILGLDLGTNSIGWAIVEKNNSDFTLIDKGVRIFSEGVNIEAKTNSESSKAAKRTEFRSSRKLKYRRKIRKIGLLKVLSDNDFCPKLSDIELKDWRYKKIYPQNNEFRIWLCTDNQDNIEERKLQNKNPYSYRFKAATESLDLESKKDRYILGRAFYHIAQRRGFLSNRLDSSDNSIIEEKNSEITGIINDANSIVDFSEAFSEFLESFDKDDTSNSPIFKLSRAFDKIVKENSTLVYSDLKDKFLERLNQKEYLGPVKRAISDLTEKIKEQKCSTLGEYFYTLYQKGEKIRGEYTHRIEHYLTEFNFICNRQNIHSEIKEAIEKAIFFQRPLKSQKGLVAKCPLENRKACVPISHPDFEEFRMLSFLNNVKIKLPTDEKLRLMTVNEREQIQSLFFRKSKANFDFIDIAKKLIPKGLIPKYYKDKEATNENVLFNYTLGSNVAGCPTIANLVDVFGVNWKEYLISNFVKNTKVVNNSRVLKTVEDIIDDVWHVLFRFDNEELLKQFAIENLNCDEKTATKFSKIKLKQDYGSLSLKAIRNILPYLRQNLIYSHAVFLANMKNIIPKEIWNNEENRNIINNEIESIIESYKLYSNNIDIVNGLIKNVKKENGTWSSTNSLVVKIYRKGLEKQVKDFFGTKKWNGTPEHYKAQILTECFELFSNQMKLNLGRGEFAKKKTKDEILKTFLSDNFSVSEESLKKLYHPSAIEVYKKARRSDIDGKKYLGSPLISSIKNPMAMRSLHQLKKVINQLIKDDMIDEDTIIHIEMPRELNSSNERVAIRHWNEILKDRRKKYSEEIKSIFRGDLKDEGCNDANSSYNNYEPTENDILKYQLWIEQNKVCLYTGKTICLSDFIGNNPKFDIEHTIPRSRSLDNSQTNKTLCCTTYNRQVKKDKIPFECPNHAEILPRIKHWYAKVKDLEDKIKDLSKKVKAASTKEKRDKYIIERTKLRFEYSYYLNKYKSFTREEVSESFKNSQSVDIGIISKYGNLFLKTLFNKVYPIKGKTTANLRQMWGLNEKSRDNHAHHAKDAVVIACCTRDINDALANYYHDLEQFEFFGKPKPSFSHRIPWEGFHKDVDHFDNNTLISHYTPDNLPVQSKKAIRKRGIIQRNEKGEIKYKQGDTVRGALHKESFYGAIKREELNKKTGQTEEVIKYVKRQGIEMFKDADLKNIVDDRIKEIVTNGREQEKLIKKEIEDLKRQLRNVKEEEEQPLKDAIQLLENKIKNDLYVLPNKNGNPIPIKKIRYYTSDVTNPLFIKKHRDVSKHEHKQFYHAKNDGNYCMAIYEGIDKKGKISRSNQLINVIDAGKYFRLSNEDKKLYPIAPEKDENLNPLKYILTKGKMVLIYDKSPNELFEMSEEKLLERLFEITQMDVEKYAEIKLLHHSEARDKKRITEFMGLKTGMKGGKNIGEHKKYPWIKIGANTFDCLVEGYDFKITPSGKIIFL

SEQ ID NO: 6751 - protein, 1120 aa, unidentified
  REGION 1..1120: note = Description of Unknown: Cas Enzyme sequence
MEQKRPRDPRSYRVGIDVGTHSVGLAAIEYDASGRPTEILTAISHLHDSGVLEPKTNTTRLAASGVARRTRRLVRRRRKRLRALEAKFSDWGWARPEESSDPYAAWRARARLATEPVSDQDELGRLLVLALRHMARHRGWRNPYHSTNSLQKTADPSEQFEAYRDRVETSVGQDFDDSVTVAELAVAAIDHNNRRPLRMGKTTNLRVDRTAESYLGGKLLQQDNANEIHAWARRQDLDKELVREIIDMVFQAESPRGSWINRIGKDPINKEPRAPKATDTFQRFAILTNLANVRVKDAGGSRPLTLRERTAAYEFLVNSKPSDHPSWSDVAGSVGLERGALGGSAALDDGQERLPQRPPTMLTNTRISEVKKPLAPIRDWWAAADREARDSLVLLLVDQIEDETSEGGSMAQALLASLDDDALAALEGLDLPAGRASYSLTTMREIIEFLLGHDGDLHLARKALYGLSDDWTPPAEPINAPVGNPAVDRVLKIVGRFLSAAESEWGPPAQVTLEHVREAFVSAATVDARDKEMQRRMEANEKQRLQVKAGENDGGRTTIADVRRFDAITRQKGQCLYCGDTITFKTCELDHIVPRKGVGSTNTRANLAAVCMPCNRSKGNLPFAVWAARSSRPEVSVEEAIKRLRFWTKDKGLSPRTWSRFRADVRERLERTEADPEIDGRSMESVAWMANELRARIVAHFGSATKVSVYQGAVTAGARQAAGIAEKIPFVGGGGKTRLDRRHHAVDAAVVTLLDESIARTLAERNSMRASRFYTPREAQDEWKFYSGSGDEAKRRFAEWRAAMEALAQLLIKAFNDDTVVVMESLRLRLGDGRIHDDTVRPLVRRQVSSSFTRDEIDAASTPALWHALTRDPKYDPAEGLPADPQRRIRVQGSHFGPADEIGFFGDAAKDLIQRKAAIAVREGFAQLGDSIHHARIYRWEEKGKTKWGMLRVFSIDLRRHRGADLFAVEPDPSWISMRNAHPSIGRADLSQLEYVGWLVAGDEVRISLVPPLAQGQVLDVMTSLRLPTRCSWRVTGFTDGTKLAVAPLMLASEGLPAFLDANEDLRVVGHALGTILERWRPAVNVLFGNGQVEIVRRDAVGRARVHSRAHLPVGWAAEG

SEQ ID NO: 6752 - protein, 1450 aa, unidentified
  REGION 1..1450: note = Description of Unknown: Cas Enzyme sequence
MNKILGLDLGTNSIGWALRDTGQIGNQIEKFGVLTFNKGVGLGKKGEYSYAAERTKKRSTRRLYQARKYRLWATLEHLITEGYCPLSMDDLNKWRHYNKEEARKNNNAGRVYPVDNLAFDAWIKLDFNNDGKPDYTSPYQLRHELATIKFDFTKEENRFKLGRALYHIAQRRGFKSSRKGADDTKEKEISDNETMDLQYSEKKKNKNIVELFEKYPQAKTIGSLFALLENDKVRIRENVAQYAIRENYKVEINHIFKEVQKLGLEHSLYKKLVESGNNKYDGSIFYKRPLRSQKGLIGKCTLEPNKYRAPISHPAFEIFRAWSFINNIKFKDNNNKISVWQQLPLEFRQEIYQNLFFRKLKSYFPFSEISDFLKKKGKNWSFNYSPKTTVTACPVSARLKDIFGDDYLNIKIKKTKAPKSDKYYYDIEDIWHVLFSYEDQEYVAEFAENKLKLGAEKTKQFVIAWNACPVGYGMLSLNAINKINMFLEKGLIYTEAVLLANIPEIIGKELWQQNEQLLRHSIGGVITENRNQKTILNIVNSLISKHKNIEVSERQGYKNKDYKLDESDFQDIQAAIEEQFGSNKWNGFTDEEKQRIQNTVKDCYQAYFSKQGIVRDIGSEERLVAVQSNRKNYYKTDTGYYRLPKLIDTLKEFLQDNFEHLDEKKLSKIYHPSEINIYPPAKEDKDGVLKLGSPKTGSFKNPMAMRTLHELRELMNYMIETKQINNETRIIVEVARELNDANKRWAIEAWQRQREAENQEFAEAIKLLLNDDKTIKANATNNEDIDKMRLFYEQNTEQTLPEVVVMEEDESGKKKKKKSTEKDEAVRWSGHGKKLIDKYRLWKEQGYQCLYTGKFIKLTDLFNENVIDFEHTLPRSKSFDNSLANLTVCFADYNRTIKKNQIPSQLPNYSEDSGGYTAILPRLDAWKDKVERIKQQIDFWKTKSKKAADKSWKDDAIRQRHLWQMELDYWQNKLDRFTITEITSGFKNSQKVDTQLISKYAFHYLKTYFDKVDVQKGSITAEFRKIYGLQIADEKKDRSKHSHHAKDAAVLTLIPAAAKRDAILEEYYEAKESKKDFKEEPYKGFKREFIFGIDDNVLINSISNNQALTPAKRKIRKRGKEVIINGKNRWAKGDCIRGQLHQETFYGAIKPAQKGGKGNLLKDEEGNFIQEEKVRYVIRVPFKYKANANDTGFKTLDEIKKQIVDEGLKIDIEKQVNAAGGLKEAFEKGIHLLDQNGKPHGNPIRHIRVWASVSEPLKIKKQTNLSEKEYKQHYYAGNATNSYFAIYKGNKLQYSVRRNLFEVSELISGETKNPIQLFEPKVYVIKDGRSLRELTKEEIKEGKKGAELPLTYILEKDTKIIFVQKNEDLKSLSQRDILKRLYVYSNFEKDGRLNFQYHLEARNKIEETYSESEIDFSNPKPTLRFSYAKYDFLVENYDFIVDMDGTIKWK

SEQ ID NO: 6753 - protein, 1458 aa, unidentified
  REGION 1..1458: note = Description of Unknown: Cas Enzyme sequence
MAKIGLDIGSSSLGWFINKNKKGVVTFETGMSKGQSGGYTSPTKDRREARSKRNLIRARKYRKWELLKVMLNDYVPLNEVELSDWCHYQKGRRRKFPESEQFLKWLACDFTYQGGEKYKNPYELRVKALDETLSKHEFGRALYHLVQRRGYKDIGETDQETEKQVQRRGESGFQNALDANRTIAEALVTEFLDKGERARNQYPYREEYKNELELICKSQGFSVATNEKGEYSNDFVKNLWKAIIWQRPLKSQKGNIGKCTLEPSKLRCPISHPAFEIFRALQFINTIKYFDANNEKQNLSSDLRKKLFTDLFLKQDGNFKFQEIKKFLDKHSGSVYKYNYPINPKNNQYETSVAGMPVCKSLVDLFGNDVQNALLEIEKFHIGNAPKMKNGYSIYDIWHIVFDFDEQHLGKFAVEKLGIENVSRKRKGEDISISPLVELKRKFLQGYSDVSLKAICKIIPFLKEGYLYNEAVVLAKIPELMGADWQSSQQIILDILKESNKIYQEKTMIVTISNNLIDKHKGQTRAMIDGSEEQVFAYKDFSYTLAEDDIELVKIACSNHFGDKTWGSKKDKDEIIRKVGLEYQEYFFDHKRAYRKTDTLTDIFKLLLKEKNITLSGELYHHSNLENLYNKNLEVNFRTGEKYLPKYKNTETEILPIPFIDSIKNPMFNKSMSIVRKLLNQLIINGDIDQETEVTIELARELNDNNVRAAIERYQKERRDNREKIRKFLEQYNQEENRSITIEDNIPLFELWTEQIFEETEDESKNKIQNKNRLDILREKEDVKRYELWTEQKGQCMYTGRMISISQLFSNEIDIEHTIPRSILPDNTLANQTVAFSKYNRDIKGAKTPFYCENYFKDTPNGTSISPRLDSWRKLRDYYKIQYESRRRAKGAEDENTKNKRIQDKHYYKLHFEYWNDKLNRFEAEEIKDSWARRQLVDTQMVSKYAREYLKLYFKKVAVQKGSITADFRKIFGFQEQDEIKSRNKHTHHAIDAAVLTMIPNNSSYREEVLKEYYAAIENKDKRKIDEIRKKIIPLYFNVQSLINEIESTTLIVNYQKDKILQQTSKTVRKRGAIQYVKNKNGEFLYDEDGNKIIKKAKGDSVRSSLYAQTYLGKIRDVERYADNQPQRENNDWKYKQGKDEFIFVKRENITKVKESDKLIESIIDPNIQQLVKDQKKNAEIEDFQGNIIRHVRIKTSMGREVKERLNYRSKYDYKNKFYSEAGSVPYSILAQKIHNGAIKRELIPISSFEIAKEFKKYGNFVIENFISEKYPEFNHWDKKQLLKTGQKLIVLNEDGDFEKRLNIDFQQKRLFVISQFSEGSIWLNYHLNALSKDEVKKSIAFIKDEKLLEFEKEYNLPDVIEDINIQDNKKRREDFLNRKFRFDTIGNSYRLSRLVEIIGLEKTNDIKKELDKYKAIPSTIEIEGETPLLKMGKDKWNFLFEGEDFEISLDGKINWNF

SEQ ID NO: 6754 - protein, 1062 aa, unidentified
  REGION 1..1062: note = Description of Unknown: Cas Enzyme sequence
VAKIKYRLGVDLGANSLGWCVYRLDAQDEPDKIVRLGSRIFADGRDPKTLASRAADRRQARQTRRRRDRVLKRRHKLMQALIQFGLMPADNAARKAMQGSDPYALRARGLDQPLALHELGRALYHLARKRGFRSSKKDTRGDDAAKEAGKVNQAIAVLRARVQEAGCRTVGEYLAYQHAERAPVRARRSSDGGYVLYLQRAMVEEEFDALWQAQQAHHPHVLTDTSREILRDILLFQRRLKPVEAGRCLFEPSEYRARLCSPLQQRFRMLQELNHMRVNDGVEERALTLDERNRMLAVLEKDVGPRPVSFAKLAKAAGLRTSDFNLGRDGKRTGLRGDAVGSRFASDNALGNAWMSLSSTQQYALAVLTTLADQVPVLEAALLALPANSPACEDILKGVFDKDEREAVALALQSLPLRLSEAQVRTVAIFNLPDDYGSLSLKALARIVPELEREVVTYDEAVRRAGYTSHSQLHTGEIFSRLPYYGEVLAGYTAPTPAAKNPDEQRYGKIPNPTVHIGLNQLRLLVNALIKRYGSPHQIVIELTREFGASGEKRREITNRQKENQERNAAYDQELRALGVRANRENRQKLQLWEELGKDDAMDRFCIYSGRHLSKTMLFSDEVEIDHILPFSQSLHDGIGNKILCTRQSNRDKGNRTPFEAWGHTERWAGIEARAERLPAHKRKLFREAALQEFLGDGDFLARHLTDTAYLSRAAKQYLSYVCPQNEVWVSSGKLTGMIRGKFDLSRLLSEDASKNRNDHRHHALDAAVIGLCSRSLIQRMANAAARAEEHGENRLLERLDLPWSSYRDELASVLANVVVSHKPDHGKQAALHNDTNYGLRGSPDKRGNPLVGRRQTLDSIKNAKDAESIAGKALREEIVRLLAPLSSPKEIKAALEAYSARTGVRRVICEERLSVIPIMDRRDGQPYRYVKGDGNYCYEIFRKPDGRWDGEVISTFEANQRSFEESATHAQNGMPLVMRLHKDDVLAVVIDGHEDILRVAQFSDGKLLLARHNEANVAARSKDALDKFKFVQLAPSRLLNVMARQVGVDVLGYLNDPGFRE

SEQ ID NO: 6755 - protein, 1306 aa, unidentified
  REGION 1..1306: note = Description of Unknown: Cas Enzyme sequence
MAKILGLDLGTNSIGWAIRDTNKKGNQILDSNVIVFPKGVGEKEGKEFSMASERTKNRAKRKLYKRRKKRKTDLLKLLIENGFCPLTIDELTIWSEYKKGQEMKYPATNFEFTEWLKINPYEVRAKAVNQIVSKKELGRALYHMCQRRGFKSGRKDADAGKDLEQYKKEQEILAQSGFKTLGEYYYDLHQNDKKVRKTKFSADDQEVNSSRISYVEEFNILMKAQNISKELSDAFFDAIFFQRPLKSQKGAVGKCTLEKTKTRCAISHPLFEEFRMYQYLNSIKVKERNSDKFVFLSEYPEYYKIAKDKFYRVSAKNFKFVDISKGINAAAKRASLLFEFNYNDKYPIVGSPTISKLIEVFDADNWTDCKKIIVSKYKKQDNKTSDELVDELWHTLFFSGDFVNDVTLEKVKSFIRDRFDISEEKVNYYETINLKQGYSSLSRKAIGKILPFLECKIIYPYAVFFANIDAIIGKEKWEANKGFIQDTIVDIISNYKTQTLKIDIVNGLVGDFIKEYDNSHFDYILDETDKKNVSYKTKLFYGKYEWEKMSDETKNELLNEIEITFQEQLQKRRVGGYYLSKPRVDEIIKDFLIHEYKVSREQADKLYHPSAIDAYPQSQDNLLGLPFTNSIKNPMAMRTLFYLRKLVNTLLKENKIAPDTEIIIELARELNDKNRRLAIERWQRERESENKKFREKLEEFAKDTNSKVTEADVLKYRLCQEQNGRCFYTNKTINCEKLLGTNPAFDIEHTFPRSKSFDNSLINKTLADKAFNQIKGNRIPQELEQEYINNFTLNIKDWEKKIDDLEEKIEQQKYFSKVASTVEQKNRAIQQRHYLKLELDYWKQKVYRFTATEIKPNFKNSQLVDTGIITKYSELFLKSLFQRVFPAKGSMVADVRKSWGLGEKDRNFHYHHAIDAIVLTCMDKSIRDGLAEAFKESEENRYQDKFKIAKPWQTFTEDVNHLKENIIVVHTHKNNIEKQTVRKLRKRNKIQYDKKGNVIFEKGQGIRASLHKDTFYGKIERENEKNEKEFWFVIRKPINNNFSDADVTNIVDEGIKARILKHGLKNIRTEEKWILLPSEKDEKGNEIKEMLIKKIRVKTRNSDLPKIKSQSHKSQGNRKEHKEYYYATLENIFAMAIYEAIDNKGKRIQRYKTISAFDLAKYNQGKSKLEMPLEENIKISEKKETILVPLSKVLRVNQMVLFYENSPEEIKKLSKMEINKRLYKIIGFEGDGRLQFRQHSFSMKMSSNNKEEMTIKKYMEIHNLKNSAMDFEKTIPWLRLSLSNIKAIFEGKDFVLHPSGKIDFII

SEQ ID NO: 6756 - protein, 143 aa, unidentified
  REGION 1..143: note = Description of Unknown: Cas Enzyme sequence
VNQGIADNGGMVRIDIFNKNGKNYIVPIYLSDTIKAGLPNSAIIAGKPESEWEVMDDNFKFLFSLYPNDLVKIMTKKEIYLGYYRGTDRSTGLITILIHDGSKEIRGIGIKINTLLEKYQVDILGNITKVEKEKRLDFSQLQS

SEQ ID NO: 6757 - protein, 919 aa, unidentified
  REGION 1..919: note = Description of Unknown: Cas Enzyme sequence
MRYVVGLDLGIASIGWAVYNVDNSKIEKCGVRLFDAAENPKDKSPLAQPRREARGMRRRIRRRAYRMQKIKDHLINSGLVSKDELASMFDNTSKTKSGTSHYDVYELRYLALDSLLSNQQLARVLIHLAKHRGFKSNRKKDKSVDGTVNKSLAENRKLLEENGYRTIGEMFYKNETFAANKRNRFGEYRVMLQRSDIGEEAKIILETQHQLGNQLITQQFIDKYIKMFNWQKSFDWRGNIIDMVGNCQFEFNEKRAPKACFSSEKFIALSKLNNIKYTEDSLEKSLTASEIQEIFNLAAARTTKTFNITFATLRNHLGLSDEARFNFVKYGKNEDFLEAEKKTKIKELEFKATHELKAAIINHCGEIIWGNLLSNTALLDTIAVALTYNKTDETIETALEKCFSTQQNNFDSNSQQAIISAILEEGISFDKNISLSLKALSKIIPHLENGQRYDEACESAGYHHSQKKKNANLKLPSIQALGLDSELTNPVVIRAISQVRKVINAVIDNYGSPYQINIELARDIGKSVIQRNEISKRQKDNQAKNERLIAEFEEHFKRKPMKDEFTKFKLWKQQGNKCIYSGEYINPESILHGTHATEIDHIIPHSRSFDDSMGNKALCLTQENQRKGNQTPFEYIGQNGHNEQAWHKFEERCKLINKTGYQLGFDYSKLDRLLLKKVDNAGFIDRNLNDTRYIARFCKNYLENYLQFSQQDDNNKLRVRVLTGQATAFIRSHWGLSKSREENDLHHAQDACVIAAVTTKLVQNVTRYMHEKEFSAAPQIRFVDEDGDIHDRFPMPNINFRQEIIKRVNEVFVSRMPKHKISGQVHLDTIRSSKYVDNPVGEYNNGKPFSTINKQLADSGIKLDKNGEIPTLCPTYKQHNPNIYRLLKEQLEKHGNDAKMPLLSHYMLHGKTAHQVKLR

SEQ ID NO: 6758 - protein, 1302 aa, unidentified
  REGION 1..1302: note = Description of Unknown: Cas Enzyme sequence
YYLRKKALTRKIEKEELAWIILNFNQKRGYYQLRGEDDDNREIKEYCQLMKIVSVEKGEKEKKNDKKTWYKFIFDNGWEYSATFSTEPNWLNTEREFLITEEYDENGNIKIVKDKKSDTIGKEKRRITPLPSFDEINLMSKKDQDKIYKKIKARTEITIKNSQSTVGSYIFDNLLLNPKQKIKGKLVRTIERKFYKDELQQILIKQKEFHSELHDENLLMDCVRELYKNNDAHQLTLSKKDFVHLFLEDIIFYQRPLRSQKSSISNCTLEFKKYVDKDGVEHTQYLKAIPKSNPYYQEFRIWQRMYNLNIYRKDDDENVTKEFLNSYEDLENLFEFLDGRKEIEQKALLKFLIEQKDFKGKGLTAEIEKYRWNFVEGKAYPCNQTKTMISTRLSKVDNIADDFFTREIEQQIWHIIYSVNDKIEYEKALKSFARKNNLDEISFFEAFKKFPPFKSEYGSFSEKAIKKLLPLMQVGKYWSYDNIDEHSKARIDKIITGEYDENIKDKVREKEINLTSESHFQGLQLWLAQYIVYGRHSEASIIGKWNSAEDLELFLKEFKQHSLRNPIVEQVITETLRVVKDIWVQYGKGAKDFFSEVHIELGREMKNTAEDRKKITNQVTDNENTNLRIKALLAEMMNDSNVENVRPFSPMQQEILKIYEDGVLNSDIEIDDDILKISKTAQPSSSDLKRYKLWLEQGYKSPYTGQIIPLNKLFTPEYEIEHIIPQSRYFDDSFSNKIICESAVNKLKDNYIGLAFIKQFHGTIVDCGFGKTVKIFEADEYEEFVKKHYAKNRSKKAKLLLEDIPEKLIERQMNDTRYISKYISGILSNIVRVEDGTDEGVNSKNIVPGNGKITTTLKQDWGLNDVWNDLILPRFERMNQLTNSTDFTAWNENHQKFLPTVPIELSKGFSKKRIDHRHHAMDALVIACATKEHVNYMNNEYALRKGKSKDEKQTLRYDLRANLCYKKYNDDSKENYKWSFNKPWANFTVDAKNSLENIVVSFKQNLRVINKATNYYEKYVEKDGVKTKERVAQTGINWAIRKPMHKETVSGKVDLPWIKLPKGKILTATRKSLDTSFDMKTIGNITDTGIQKILRNYLTAKGSSELAFSAEGIEDLNKNIKQYNDGKDHQPINKVRVFEMGSKFQVGYSGNKKDKYVEAAKGTNLFFAVYEDEKGKRSYESVPLNIVIERQKQGLNAVDLKGTKDFYLSPNDLVYLPSGDEVENKINIDFEDFSKEKKQNIYKVVSFSGNQLFFIRQDVATSVVNKAEFSTLNKMERAVDGRMIKETCLKIKIDRLGNISKA

SEQ ID NO: 6759 - protein, 1470 aa, unidentified
  REGION 1..1470: note = Description of Unknown: Cas Enzyme sequence
TNSIGWALVEQDFDNQQGQILGLGSRIIPMGQDILGDFGKGNSVSQTAERTGYRGTRRLRERHLLRRERLHRVLHLLGFLPEHYDAQIDFEKRFGKFIPETEPKLAYSNKNFLFQSSFNEMLEEFKKSQPEFLKDKNGNDCLIPYDWTIYYLRKKALTRKIEKEELAWIILNFNQKRGYYQLRGEDDDNREIKEYCQLMKIVSVEKGEKEKKNDKKTWYKFIFDNGWEYSATFSTEPNWLNTEREFLITEEYDENGNIKIVKDKKSDTIGKEKRRITPLPSFDEINLMSKKDQDKIYKKIKARTEITIKNSQSTVGSYIFDNLLLNPKQKIKGKLVRTIERKFYKDELQQILIKQKEFHSELHDENLLMDCVRELYRNNEQHQQLLSTKDFVHLFLNDIIFYQRHLRSQKSSISNCSLESRKSKDGVVYPIKVVSKSNPYYQEFRLMQWIQNLVIYRKDDDVNVTNEFLATQDDSEALLDFLNTKKEIDQKQLIEYLLKRKLDIKKVPKGETEKYHWNYVEDKTYPCNETRYLIQSRLEKTENVPANFLTFEIEMALWHIIYSVNDKIEYERALKKYAEKNQLNVDSFFENFKKFPPFKSDYGSFSEKAIKKLLPLMRFGKSWNWDNIQTTSKDRIEKIITGEFDENIKNNIRENVEKHQLKSENDFQGLPLWLAQYIVYGRHSEASVSGKWNSVKDLEDFLNEFKQHSLRNPIVEQVITETLRIVKDIWTKYGNGVKDYFSEIHIELGREMKNTADERKRLTNIVTENENTNLRIKALLAEMALDSNVEDVRPYSPVQQEILKIYEDGVLSSEAVIEEDILKISKTAQPSSTELKRYKLWLEQKYKSPYTGQIIPLNTLFTHEYEIEHIIPQSRYFDDSFNNKVICEAEVNKLKDRQLGFEFIKNHHGEKVTIGSKTVQILEVADYEEFVKEHYAKNRAKRNKLLMEEIPEKMVERQMNDTRYISKYVSNLLSNIVRDDKDGSNDDGYNSKNLLPGNGKITTRLKLDWGLEAVWNELILPRFERMNQLTNSTDFTTWNEKYQKFLPTVPLELSKGFQKKRIDHRHHAMDALVIACATRDHVNLLNNQSANSDNKRIDLQHKLRISEKWMDKNGKERTKFTEFKKPWSNFTTDAKKALESIVISFKQNTRVINKATNYYEKYVEKNGEKVKGIVKQEGTNWAIRKPLHKETVSGKVQLERIKVAKGKILTATRKSLDSTFNEKTIESITDTGIQKILLNYLKAKGGNPETVFSPEGIEEMNQNIALYNEGKQHQPILKVRVFEQGSKFSLGEVCNKKDKYVEAAKGTNLFFGVYADKDGKRSYDTIPLNVVIERQKQGLSSVPELNEKGHHLLFSLSPNDLVYVPSGDEDVSIIDFNNLSKEQVNRIYKFTDGSGIMANFIPANISSVLFNMNKEKQKKTLGKEIYSVQNEIGVGSQGSKNENAMTGQQIKAVCIKLKVDRLGDISKAGK

SEQ ID NO: 6760 - protein, 1428 aa, unidentified
  REGION 1..1428: note = Description of Unknown: Cas Enzyme sequence
TNSIGWAYVKEGESPEQSSIEQIGVRVNPLTVDEQTNFEKGKPLTTNADRTLKRGARRNLDRFKLRREQLLEILKASKIINAETKLTEVGANTTHSTWKLRANAAIEKIELDEFARVLFAINAKRGYKSSRKAKNEDEGQAIDGMAIAKRLYEEKLTPGQLTYQLLQEGKKTVPEFYRSDLQAEFDNIWAIQKQTHSNILTDEFYKELQGKGQRATAALFWTKHKFNTADIKDLEDSLKNEKTIKLSNREKKRLQAYKWRSEAVTIPLEKEQMAYVLTEINNNLNNSSGYLGAISDRSKELYFNKETIGQYLYHQLKKNPHSSLKNQVFYRQDYLDEFEKIWETQAQYHPQLTKELKEQIRDVIIFYQRKLKSQKGLISFCELESKEIELNKNGQIVKKTIGFRVAPKSSPLFQEFKIWQMLHNVVIRKKGTTKRKISINNAQKELFANENEFVFDQEAKQILFDELNLKGNLTASAVIELLGDKANEWEMNYTTLEGNRTQQSLYEAYLKIIEISGHDLRDFLKIKSNKDEIELKDLDVSAAGIKKVVKDIFSTIGINTAILDFDAMLEGKAFEQQASYQLWHLLYAYEGDNSTSGNETLYKLLQEKFGYSKEYASVLANINLQNDYGNLSAKAMRQIFPHIKEKKFSEACELAGYRHSKHSLTKEELENRKLNDTLDLLPKNSLRNPVVEKILNQMINVVNTLILKNSEKDADGNITKYFHFDEIRIELARELKKNAKERAEMTSNINAAKIEHEKIVKLLQKEFGVANPTRNDIIRYRLYEELKNTGYKDLYTDTYIPKELLFSKQIDIEHIIPQSRLFDDSFSNKTVVYRKDNLDKGNQTAYDYIDRKFGAEGLTAYQTRVEELFKTKVITKAKYKKLLMPESEIGDGFIERDLRDSQYIAKKAKEILFTITKAVVSTSGQITDRLREDWGLINVMKEMNLPKYRALGLTEMEERKYGQKVEVIKDWTKRNDHRHHAMDALTVAFTKHSYIQYLNYLNARKNEKHKLHGNIIGIETKETEIHIDDNGDKKRVFKQPIPNFRQVAKEHLEQVIISHKAKNKVVSKGKNKIAGKQTVQQTLTPRGQLHKETMYGRYQYYEQKDVKITASFDKETARKVSNPLFRKLLLERLEANNNDPKKAFAGKNALGKLPIYLDESKTSTLPEIVKIVWLEEDFSIRKDITPDNFKDEKTIDKVLDQGVKRLLKARLNTYGGDAKKAFSDLDKNPIWLNKEKGISVKRVTISGVKNAEALHYKKNHFGELILDNNGKKIPVDFVSTGNNHHIAIYMDQNGVLQEQAVSFYEAVARVNQGLPVIDKEYNHDLGWHFLFSMKQNELFVFPNEKTGFNPAEMDLLDPKNRKLISPNLFRVQKIATRDYVFRHHLETTVENVNELKETTWKRVGVNGISQTVKVRTNHLGDIIWVGEY

SEQ ID NO: 6761 - protein, 1457 aa, unidentified
  REGION 1..1457: note = Description of Unknown: Cas Enzyme sequence
MSKILGLDLGTNSIGWALRNPNAAENQIEKFGVLTFNRGVGVGKTGEYSFAAERTKKRSTRRLYQARKYRLWATLEVLITEGYCPLTIADLNKWRHYSKEEARKNNNAGRVYPVWNTTFDAWIKLDFNNDGKPDYTSPYQLRKELAETKLDFTEELNRFKFGRALYHIAQRRGFKSSRKGADDVKEQEADVSDDHETTLQKSEQKKTNKLKELFPDYIPTVPIGVFLANKENEGQRIRLDITQYLVRENYKDEIKFIFQFQGLKFDSALYTKLVETAKNKNNGSIFYKRPLRSQKGLIGKCTLEPSKYRTPISHPAFETFRAWAFLNNIKYKPFAGEKLSYVNNPNEAYKIELSLLQELYEKFFLRTKGYFPLSEITEFLKKKGKNWQFNYSPKTTVTGCPVSARLKDIFGDNYLSVKIPKDRKSKSGKDYYDIEDIWHVLFSYEDQEYVAEFAENKLKLEPEKVNKFVIAWNALPVGYGMLSLNAINKINVFLQKGLTYAEAVLLANIPEILGNDLWHQKVQMLLDCISDVIDENRQQKRILNIANNLISKHKNLETHEKFGGKNYVIADSDLKDIEITIEDTIGKSKWSCFTEENKKRIFDTVKDCYQAYFTKHGVVRDAGSKDRIVTIQSNGKKYFKTESGYYQLPKLIDTLKTFLLDNFENIDEKKLSKIYHPSEINIYPPAKPDKDGVLKLNSPKTGSFKNPMAMRTLHELRKLVNYMIETNQIDSETRVVIEVARELNDANKRWAIEAWQRQREAENQEFAEAIKQLLNEDGRIKANASSNADIDKVRLFYEQNAEQTLPEVTEVEVDEKGKKKRNKSAQKDEAIRWSGHGKKLIDKYRLWKEQGYQCLYTGRFIKLTDLFNENVIDFEHTLPRSKSFDNSLANLTVCYADYNRSIKKNQIPSQLLNYSNEHDFSGSIGICSAIKPRLEAWEEKVKRIKQQIDFWKTNSKRAWDKTRKDDCIRQRHLWQMELDYWQNKLDRFTITEITSGFKNSQKVDTQLISKYAFHYLKTYFDKVDVQKGSITSEFRKIYQLQAPDEKKDRSKHSHHAKDAAVLTLIPVAAQRDAILERYYEAIEKNPKATFTEGPYKGFKREFVWNIDDNVLINNITNNQELTPAKRKVRKRGKEVFIEKPDGTKVNKWATGNSIRGQLHQETFYGAIKPAKKGEKGNLLKDEGGNFIQEEEVKYVVRIPFQYKKDANTPGFKTLEEIKKQIVDEGLKLQIEKQVIEAGGLKEALEKGVYLLDKNGKPHGNKIRHVRVWASVSEPLAIKRQTNLSDKEYKQSYWAANATNSFFAIYKGEDKKDYDFRNLFDTAKIKSINPIKNPKDLFEPKITITKGKKITELHLTYVLEVGTKIIFKKDEKEDLKSLPNSELIKRLYVYTRFEKDGRVNFKYHLEARSDNDITETYTDSTVNFENPVPTLRLVINKCDFLVEGYDFEIKIDGTVKWK

SEQ ID NO: 6762 - protein, 1388 aa, unidentified
  REGION 1..1388: note = Description of Unknown: Cas Enzyme sequence
MKKILGLDLGTTSIGWAYVKEAENEKEKSEIVKLGVRVNPLTVDEQQNFEKGKSITTNADRTLKRSMRRNLQRFLLRKENLIEILKEKGFINDGTLLSENGNKSTFETYRLRAKAANEQISFEEFARVLLMINKKRGYKSSRKAKSQDEGQLIDGMEIAKRLYNEKITPGQFVLDLLKEEKKYVPDFYRSDLQAEFENIFDKQLSFHSNVLSLELKEELRNKKRDAVWAICAKTFKEKGFELVGTKRQGKASEQKIENYNWRVKGLSEKLDLEQFVVVIQQINMQINSSSGYLGSISDRSKELYFNKETVGQYLMRQLEENPHTKLKNQVFYRQDYLDEFNTIWEVQAKFHKSLTDDLKSEIRDVIIFYQRRLKSQKGLVSICEFENRQIEVTIDGKKKIKTIGNKVCPKSSPLFQEFKIWQILNNIQLIEKANGAKRELVQEEKEILFKELNIKDKLSKGDALKLLFENHKDLDFNFKDLEGNRTNASLFRAYQSVIELSGHGEYDFSKLNADKVLEITASVFEGLGYNTSIIYFDTNLEGDAFEKQSAYQLWHLLYSFEGDNTATGIGNLIEKIITNYGFEKEYASILANVSFQPDYGSLSTKAIRKILPHLKEGNEFSVACTHAGYKHSKNSLTKDEKEKKILKNKLDILPKNSLRNPVVEKILNQMINVVNTAIDTYGKPDEIRIELARELKKSAKEREELTSVVAKNTLEHEKYRAILQKEFGLNHISRNDIIRYKLYLELEHTGFHTLYSNTYIEPHKLFSKEFDIEHIIPQSRLFDDSFSNKTLESRSVNIEKGNETAYDYVKQKNDEKALVDFLKRIEDLYKAGKISKTKYNKLKMTGKDIPDNFIARDLRDTQYIAKKAKSILEELVKDVISTSGMVTDRLREDWQLIDVMQELNWDKYNKLGLTEVIENREGHKIKRIKDWTKRNDHRHHAMDALTIAFTKRSHIQYLNNLNARSDKSGSIYGIETKELYRDDRNKLRFKPPIALADFRLEAKKHLENTLVSIKAKNKVTTININTTKKQGGLNKKKQLTPRGQLHLETVYGSIKQYVTKEEKVGANFNEELIKAVASKKCREALLKRLKEFDNDPKKAFTGKNSLDKNPLYFDELQTYKIPLKVKTVSLETLYTIRKDITPDLKIDKVIDPQIKIVLENRLKEFGGDSKKAFINLDENPIWLNKEKGIAIKRVAITGINNAQSLHSKKDKEGNLILDKNGNTIPVDFVNTGNNHHVAVYKDENGDLQENVISFFEVTTRVNLGLPIIDKSYKEKEGWQFLFSMKQNEYFVFPNEQTGFKPNEIDLLNPENYHLISPNLFRVQKFSKIIYGTTAIRDYVFRHHLETNINDNKDLKDITYKSIKSLPYLNNIFKVRLNHLGLIVSVGEY

SEQ ID NO: 6763 - protein, 1222 aa, unidentified
  REGION 1..1222: note = Description of Unknown: Cas Enzyme sequence
MDTKKILGLDLGVSSIGWALIEESKESRTILGIGSRIVPLSPDDTNEFSSGNAISKNAKRRQKRSIRRGYDRYQLRRKQLSQWLQKLGMMPDEKLMQLPPLTLWELRATAAKRPINKHELGRVLYHMNQKRGYKGTKAEEASADKKETEYVAEVMNRYQTIKESNKTVGQWFFDHLQTASNEASPYRIKDQVLPREAYMDEFDAIMGIQAPAHGFSEKDTNELRNRIIFYQRPLKSQKKLVSTCEFEGQYRTLKNGQVSFTGPNVAPRSSPLFQTCKILESIQNIRITNRRNEIRPISPEEKQQLFRHLNANRTLSEKKLFQILKIDPKDGWYGNKQTAKGIQGNTTLADISDILGEDHPLTSFTLDIKQQDSFGYIYDKETGEVVAEERREYIDPSFQNQPLYQLWHTIYSIKDPQECQAAIQEKFRLGADIARRLAGLDFNKYGFGNKSAACIRKILPYLMKGHDYTNACSIAGYNHSNSFTKDENLKRQLKDSLPLIKKNSLRQPVVEKILNQMIGVVNAIITKWGRPDEIRIELARELKQSKDERYEAYSANSKREREAKQIIERIEAEYGQYGVRASRRNILKWRLFHEISNQEMRVNAICLYCGKPFGITDAMRGSAVDVDHIIPQSLLFDDSQSNKILVHRHCNQNKDNMTAFDFMTAKGESELGRYVAQVDELFRNKVIGYGKKNKLLMASSSIPKDFIDRQLRETQYITRKAREILEQICYQVWNTSGQVTSYLRHLWGWDDVLMNLQLPKYRELGMTEWKEFDEGNGMIRKMEIITGWSKRDDHRHHAIDALTVACTKQGFIQRLNTLSASRTRESMRADLGDQFNAKKNLMDNYFQKFRPFTTRQVEEKAEGILISYKSGKKITTPGSNRKGRKPQSGVYVPRGPLSEETVYGKIKTLERKPVKELFACVDLIVKERIRELVSARLLLHHGDIKKAQQSLKKQPIFLDKEGKEELTFGSCYRQEIVVKKSLAAITTLKQAESIVDQKIRQLVKERLEKFSGQEKKAFAEPLYSDAAKTREIRSVRFLTGLDAVVPLYSDSTHAFVKPGNNHHVAIYRDAEGKLSEHICTFWHAVERKLHGIQPIIENTNDMWDRINLGKSLPDHFLENLPPPHLELVISMQQGEMFTIGLEKHELEGEMTAAKYKLVSAHCYRVQRLSSKDYYFKHHLETIFDESTMSMQARKLLRIRSIPLLMTAKLKKITIDKIGQFSI

SEQ ID NO: 6764 - protein, 1406 aa, unidentified
  REGION 1..1406: note = Description of Unknown: Cas Enzyme sequence
LGTNSVGWALIDENGKDSKILGLGSRIIPMSQDVVSGFEEGKPQEKNKKRRQQRSARRNLQRYKLRRERLLKVLHALEWIPDLTNNVSRHAFFGKDPVSGLPLEPIDLFELRDRALREEVTLAELARILFHLNQRRGFKSNRKVKEAEESKGEEQEENAAGSMVTYEHHSILSEDIDASGKKKAYVYTLQDGSKVGSRTRIPFSSGKLVELRVTRKMTKKDGLSIQVQLADRGAWEYRKDFINRAIEESELTVGQYYYRSLSEDRHFRTKDNIVLRSHYINELNRIWSAQIAFREARGAQSELVSESSSQKIADILYPSNQERRNVIRRWSLQEIFRDDIIYYQRPLKSQRDLISDCRFEPDKKAIPKSHPLFQEFRIWDKLTNIRLTDNLGFDVTNNYITPEILRSMRDHLASAQSSKTTQLLSRAIPKSKIKSIEVSEPELKGNVTRAKIISVIGEDHPLIKDSVLNPLSEGNKLIKVWHLLYSLDQESDILSGLLNPKNGFDLTEDQARGLLRLNFEEGYGSLSARAIRKLLPLMSCGMPPIVEYSGNTLTDERLTQLCKGETPDDLSNKITELFQLRGFKVKEDVSALPYYAAAAVVYGSHSELLVKKRYKFPEHVQLLPRNSLRNPIAEQVVNETIQVVRDIWAKWGKPEEIRIELSRSLKNSASTRQGIAESQKKNRELREQIRKRLLELNRPIQDEEKYSLWIDTFHPGENALTPQEWASYRSYLLKGSAGISNSDIERYRLWTEQNHVSVYTGKPIPLSRLFSQADYQVDHIIPRQRFYDDSMSNKVIVESTVNADKGTPGRNLTGLEYIKAGPVKKDIKLLDETSYRSLVNSLFRSNRAKLNKLLADQVPDDFVNRQLKDTQYITLAVRKELAKIVGPDNIMLTTGSVTDHLREQWGIAHVFKELLLPRFERFEKLKGAASDEQKIQRVFDAKRNKDILKIAGYSKRLDHRHHAADALVVACTRPAYIKRLNDLNRKYQEQGHHGLPGSADLDLGKKAWQFPLPWSGFPEEAKEWLQRTAASIKNRNRLLTKSTNRYVRFNQDGRKELVVQNKGAATSVRGELHDPQPLGETWVTEVHPLPNSLSQMKKWVDKGGLSFEELSKRLASSREREAIQLLWNECKQDWKELWKRMKKDGLSVKGKRLESLHLRFQRYTKRRKLAALTPNQAENIANLALRKEVQQHIEKYGDIKKALGTAEGLAAFNQHREVPVLAVKVLEAANSEVGDTMGQRLMIRRGDSNQKLHTTSSINHALIVYESITDLNEKKWPVQRKFDVLTFRDAVSLDLENLPLYENTGGFRAFILKKNDPVLFLGSELTPRDIDWNDQKALSQSLYRVTKNSGNDYYFTPINVADFIKSGVEYGTQNCLMSLDGVNISRYCIPVYVDRLGQVKLRFRYD

SEQ ID NO: 6765 - protein, 977 aa, unidentified
  REGION 1..977: note = Description of Unknown: Cas Enzyme sequence
MGLEETVFGFDLGKASIGYCARQGAKILDLGSMLIPAEHGNTQDLAKRRRAFRTRQAHKKRELWLNKIWSEAGLKPLLEFYTEDESANKKNSLKKSNKQRSIRVKTADERLKIEYSPKSSKLIYNSALLRVALMNYSKNPEQDLTTLIQGKPLEEWQIYKALHAAIQHRGYMHSDYKDHEAKNVDNIEEAAEDLKDAKENYEAVEGYKKELNEILPNTNMHYPCYFEALLQGLITNEYPLNLSKIKLRIENISQAESLSNSRTVRRKGRVAPRELVEAELRVLFNNAKEILSSLRNIETEYFLYGPAKEAFLTVKKNAPIEFKKLRGTEWEAQGVLSQKTPRFDNRMMDKCCLMPLRNTCNAKDLENNKFKLLMHLKNFRFTDVYGERRGFTREEFREIYKRCFNIIERKIENGIVSLKLTKGERDKEIKAVLISNDPNSKEILDPNFNDEVKFNTSGRSSFCRPALKIINEILEKTINPSELDISSHIQNHDETKAHLGITKSEIESLVSRLGESWEKISIQDNRYEIDFEDDKYQEIALKIGSVNNPLVRNRLQIFINLVEALSKKHGTPDKIIFEFIRGDGGYIDGSKVVKNYDKAIKDNEKKNDKAAKDLLEHGLELNKKNIDKYKLWERQGRICPYTGEALIPEKFREYQIDHIVPYADVITSDALFNKVLCLGSANQEKGKRTPYEWISNKGVNEWINFQARIRNMKDLPKRTKELLINTKPLELFEKYTGLAETAHIARLAQNITAKLFDWGLQTRDDERKIFVNNGAITAKLRAKYKLERLLRNLSEEEWQSLSPELKKKNRDNKLHHALDAYCISCSQSIKEKIDSSINDTDTKRFSCEALEKSKENFEKRFKEISAFNKTRDISALLPKETIYRLETIERANKKGVLVKFNCMTYHKDFYAYLSEKITKDEINKRLENLWDLAIKKDLKDKLEKMDFSKEAWLNILKDYRHPHRKTLVKKIQIIDKE

SEQ ID NO: 6766 - protein, 1155 aa, unidentified
  REGION 1..1155: note = Description of Unknown: Cas Enzyme sequence
MIKVGLDIGVASIGWCVLSEQGKELTILGMGSRVIPLDKESKDQFSKGEKQTLNANRTLLRSMRKCNFRYKLRREWLRESLPPAMLPSADLFLLKAIDLYSLRAKAANQQVTLPELGRILFHINQKRGYKSSRKSKSDKDESSEYLKSISQLEAEIGARTVGEYFYEQLKGNPRFEIKKKILTRARYIQEFEQIWNTQAQYHSILSDALKFRIRDEIIFFQRNLKSQKHLIGGCQFEQRTYKKDGKEVTEPVKVCPISSPLFQEFKLWQIINNLEIQEILSRKKHILNEDERFSLFDLFQNKQKVSGNDVLKALKLSRDTHKTNLRKDVPGNTTRVSIKAKLQDAKVAPKAIDSILAFDHLGILEQQPLFKLWHILYSVDTPIDAANAIQKHFGLDEPRAAVILETELKDGFGALSSKAIKKILPFLKKGLSYADACSQVGYNHSDSLTKEGNQSRDLLPAQALQLIGKGELRNPAVEKILNQVIHLMKDLTNEYGTPNQITIELARELRQNAEQRNRTLKKIDEQERRNDRIRTELQQEPFFAGKRVSMRDIEKYKLAEEFTFRSPYRPEGPQISIKELFSVYEIEHIIPRARMFDDSFINKTIAHVTDNREKDNDTAFDFMASKRSDSLEAYRSFLLARSKAKDGISRAKFERLLMSKEDIPSDFVNRQLKETQFITREARKILLQVCRDVHVTTGSITSVLRHVWGYDHVIHNLHLPNYKANGLTEVFTVKEDHQDRQIEKIRDWDKRNDHRHHAVDALVVACTTAKHIKNLNDLNKDFELHQNAESESVWKGLRKRFPAPFTHKLVSDYVSKILISYKPGRRLASKSKNKIGDFRIGKAHTIPRGRLHEESLYGRIKRYRKIPISRLKENDLGRVAHETDFDLIQTHLQTFAGNFKKAFGAKGLEKLTKDGKPLTHISVFENEFTIRRTLDGITTKQIESIIDSKVRKLVQARVAEFNGSIKKAFTDYLKDENRLWLNKEAGLFVKSVVCATGATDLFEIRPGAYVESGRNHHVALYRNETGELKEEVVTFLEAFERKRQGFEVIPKTHPELGILVVSMRENEMFIFDITRAELESAIAQNDYSSISKNLFRVRKLTSGSYWFNHHLETVPRESLIDKKMNLCKQASRSTFEKGLIHKIRISRTGKISIAN

SEQ ID NO: 6767 - protein, 1431 aa, unidentified
  REGION 1..1431: note = Description of Unknown: Cas Enzyme sequence
MKTKNILGLDLGTTSIGFAYVIEGEKPENSSINMLGVRIIPLSIDEQTNFEKGKSVSINADRTLKRGARRILNRYKDRRKNLIEVLRKANVISEETVLTENGKNTTHETWGLRAKAVLERVEKDQLARILLAINKKRGYKSSRKSKNEDEGKAIDGMSIAKQLYEQNLTPGQLVYQLFKDGKKYIPDFYRSDLQREFDKVWECQGKFYPEIFTNEFYQELLGKGLRGTSSSFWAKYKFNTEENKGTREEKLIRAYEWRSKAITDKLKKEEAAYVISEINSNINNSSGYLGSISDRSKELYFNKETVGQYLYRQLKQNAHTKLKNQVFYRQDYLDEFEAIWKEQSKHHSELTSVLKTEIRDIIIFYQRRLKSQKDLISLCEFEKKQIQIKKEGKIVETTVGMKVIPKSSPLFQEFKIWQTLNNCLLKRKRKSRQKLTAEIIQNSETEITLDLTAKQLLFDELNVKGNLKSDVAIKLLGYETSEWELNYPELEGNNTNKALLHAYLEILEIEGYDTKGLLKIKQSKDEIDLSKTDIPANEIRRILREIFNSLNIKTQILEFDSELKNKEFEQQLSYQLWHLLYSYEGDNSISGNDKLYKALGDKFGFKKEHSQVLANIALQDDYGSLSTKAIRKIFPFIKENKYSEACALAGYKHSAESLTKEEINSRPLKLKLEILKKNSLRNPVVEKILNQMVNVVNTLIEVNSKKDESRKIIKPFHFDEIRIELARELKKSAKERSEMSANIGAAKIQHEKIVKLLQSEFGVKNPSRNDIIRYKLYEELKNNGYKDLYTDTYIPREILFSKQIDIDHIIPQARLFDDSFSNKTVIYRKDNLKKSNRTAFDYIESEYGKNKAEEFLQRIEKLLEVNKKNNIEGIGKAKFLKLQKRESEIGDGFIERDLRDTQYIAKQAKKMLFEITRSVLSTTGSITERLREDWGLVNLMQELNFDKFKKLGLTEKVEKKDGTFKERIVDWSKRNDHRHHAMDALTVAFTKHSHIQYLNNLNARYFETHKEFKNIKYIEEKETHIVKDDSGSNSRVFNLPIPNFRMLAKEQLENILVSHKAKNKVVTKNKNKISTSKGVKIKTELTPRGQLHKETVYGKYFYPVKKEEKVSAKFDLDTINKVSNPTFKMHLLARFNENGNDPKKAFSGKNALSKNPIYLDEKKSEIMPEIVTLSWLESDYSIRKEVTPENFKDDKTIEKVLDAKVRQILTDRLKQFGNDPKKAFSDLDKNPIWLNRDKGISIKRVTIRGVSNAQPLHVRKDHFGKEILDKNGNTIPVDFVSTGNNHHVAIYKDEKEILQERVVSFFDAVELTNACLPVIDKEFNKNLGWQFMFTMKQNEYFVFPNEKTGFNPKEVNLLDSKNYKQISPNLFRVQKIATKNYMFRHHLETNVNEIKELVNIAYINIRSTPPLIGIVKVQINHIGQIVKVGEY

SEQ ID NO: 6768 - protein, 999 aa, unidentified
  REGION 1..999: note = Description of Unknown: Cas Enzyme sequence
MFDSRIVLGLDLGVTSVGWALLKTNFENQEPVSYEIIASGVRIFPATVEDKTNAPKNAKRRTSRGARRLLRRKRQRKNGLREILISKNLLPQIEKGESSAKFDALGNPYELRVRGLTEKLEPHQIGRVIYHLAKRRGFFNNRKSGKSKDDGVVFSGIAEVKAAMEKSNFKTLGQYLNTLDKKRKHYTEREMVKDEFETFWTAQEKFHPAILDEHFKIEIKHLVFYQRPIQSQRGLIGKCGFEKGKKRCDMARQEAQRLRYWQDINNLQIQDRETLEWHKLTADEKTKLADEFEKKKEITYKGLRKLLKIGDDRRINLEANEKKLYGNKTTISFRKAIGDAWDALSDEKQNLLTEDFFRIESELSLAKRLKEFWNFNDAQIEELLKIELESGYSRVSLKSIKKILPLMQTEGLRYDQAATAIYGDHRKQFDTQSSEKLALPPKDLRNPIVSKALFELRKVINAILRIFGKPDEIHLEMARDLKLTAKQKENLLKRQNENKKANDLAADFYLKKFGLENVSGTDKLKYRLWKEAGEMCPYTGEKIPPETLLDDQYVDIEHIITYSRCFDDSYMNKTICLAKYNRETKKNQTPFEIFGTNEQKFFELKQRIKDFPKGKQKKFLTEEVIFDEMVGRQLSDTRYICREARGYLLQLYDNEQSVMVVAGGATANLRRYWHLHSILADGDVDEKNRFDHRHHAIDAIVIALTNRGLFQNISRLAGENRNIMRKALKNLPMPWENFLTDVSEAINSIVVSHAPVHRVRGQLLEETAYGATAEEGLFVVRKSLESLSDSNIVKDEIVDEAVREIVRERYREFNGDRKKAFAEPLFHKDGKTPIKKVRLYVRMSPETVVGIEDESGKPYKYYALGGNHHVEIFENTLTEERKAVLVPRFKAAQNVRESVKKGQTPSAVSRNLGENWQFLFSLCRNDYIEFLGDSGKLSLYRIQKMSGGSGFEITLRPLNEAFTDTKDGNPLRLRSKPSLSKIVRKLQVDPLGHLTQAND

SEQ ID NO: 6769 - protein, 952 aa, unidentified
  REGION 1..952: note = Description of Unknown: Cas Enzyme sequence
AETVCAALKVDVFGKKYSSKDSYKNLNAAFPRTTVEAEVKRLLMQHQSKHLAITPQFIKALMEDWQAVTIPSVSLPGRFEGGLLFGQLVPRFENRIISVCPVTGEKVPTRNCREFLLFRWAMLLANIRVAGQNEKDLRPLDKAERHKLNDLMLLEGYLTPGKLTSTVKEITLCQRDNLQTMFLHPDSKESLLVDPVQKLVRSGHLARLFPTLPEPLQKRALGKWRRGKVLTLAELIAGASGLDSFEKELSALLDSVNVKRSKKEGQFTRESVLNEVHSIRREIAKLSGRGAFARHLMKQAYEEVLAGKHPNEEQGCLYRSEEIRLAQLQRAIDDQTNNHLVRHRLLILRRLFKDLVADANFAQGKLERIGRVTIEVNRDLRTMSGKTAKEISKELNGRLSNFKNVQEKLEKAFEHQKFNGQSVPITAGLIRKARIAEDQGWQCPYTGLEFEPIDLVSGRVDKDHIIPRSLRPSDSLDSMVITFSEINRMKGQRTAVQFIKEFQGQPVEGKPELSLMTLERFKKCVEALDSRKGHDDDKKRKKRRKELLLLESYEEKEFTPRDLTVTSQLVRLGAQSLQREFIGLPAQPVITSMPGAVTGSVRKGWHLLGCLREAAPGVVDKDGQLLSKTDIRDVTHLHHALDACVLGLASHIFPNKGQLWEVMVKRKPNPQEAALLRTTGFYQFDAQGKPSMNELPESLQKQISQRLAERRVVQHIPSDMSGLACGETIYRVFDPKDTSPRGRRLRHWADKLLNSGEFNKKLSRLPDPDELDDPMILLIARKRRNQVGGESGKTFHDTGAEWRWIYLLTAKSAVHGLNPGKLSALKGVKLLGENFGVAGVYKPGSAAHFEIIRPRKVWLQIEQLRKSNPASRVQLIRKGMLIRFEDSDGKNSIFRIFGCGERPGRGIYFDAGEPDVITRQREIQISAFKSGRAKVIETSYTGIVACPTTSSA

SEQ ID NO: 6770 - protein, 987 aa, unidentified
  REGION 1..987: note = Description of Unknown: Cas Enzyme sequence
MKTILGLDLGTNSIGWALIEQDFDRKEGKILGMGTRIIPMSQDILGEFDKGNSVSQTAERTRYRSTRRLRERHLLRRERLHRVLSILNFLPKHFAEQIDFVNRLGKFKDRLEPKLAYDNKAFIFQTSFNEMLEDFKRYQPALVADGKKVPYDWTIYYLRNKALSKRIEKEELSWILLSFNQKRGYYQLRGEEEEENQNKRVEFHSLKVVDVKADEQQKGKDDIWYSLILENGWIYRRSSKTPLFDWKDKTRDFIVTTDLNDDNSVKTDKEGNEKRSFRAPGEDDWTLLKKKTEQDVDQSHKTVGAYIYDTLLQNPNQKIKGKLVRTIERKFYKDELRAIISKQIELHPELQREDLFADCVRELYRNNENHQRTLSGKGFLHLFIDDIIFYQRPLRSQKSSIGNCSLEKRRYKDGNGIEQIVPLKAIPKSNPVYQEFRIWKWISDLSIYRRDDDSNVTNQFFRTYEDSERLFEELNSRKEVKQEALLKYLAEQTGLKGKAANAEAAKYRWNFVEDKIYPLNETGAMIVNRLEKVNGLSKDFLTKEREQQLWHIIYSVTDKTEYEKALKSFAQKHKIDESSFVASFKRFPPFKNEYASYSEKAIKKLLPLMRIGKYWSWEVIDKATRERIEKIINGEYDENIRDRVREKTKSLTDHHHFQALPDWLVKYVVYGRHSEAADLNKWTSVDDLKNYLEDFRQHSLRNPIVEQVITETLRVVKDIWQHYGKSLTNFFGEIHVELGREMKNTAEDRSRITNQVTENENTNLRLKALLVEMLQQGDVENVRPYSPTQLEILKIYEDGVLNSSIEVPDDILKISKAAQPSGKELLKYKLWLQQKYRSPYTGEMIPLNRLFTPAYEIEHIIPQSRYFDDSFGNKVICEAAVNKLKDNQLGLEFIKNHHGEKVETGFGKTVTVFEEDAYQDFVKNHYAKSRGKKAKLLMEDVPEKMIERQLNDTRYISKFISSVLSNIVRAEKDDDGINSKNVIPGNG

SEQ ID NO: 6771 - protein, 962 aa, unidentified
  REGION 1..962: note = Description of Unknown: Cas Enzyme sequence
CKELYENNEGHRNSISQKGFDHLFINDIIFYQRPLKSQKSSISDCRFEKKYFIKDGKLETIGIKCAPKSHPLFQEFRLWQFIQNLRIYKKDEDRDVTSEFLTCPDDWENLFIWLNDRKEIDQKAFLKYPGFNLKKNADLYRWNYVEDKFYPCNETHTTIISRLEKVGIDTNFLNNDVEESLWHILYSVTDKEEINKALNKFADRYQLSDEFVNIFVKYPPFKSEYGAYSIKALKKMLPLMRMGRFWSKDAMDKKTLDRIDKIINGEYDESIKNRIREKAYNLLDISHFQNLPVWLASYVVYDRHSEDGETLKWKSPHDIELYLKDVFKQHSLRNPIVEQVIAETLRVVTDIWKHYGSGIENFFDEIHVELGREMKNPADKRKKITETISQNENTNQRIKALLIELMNDIDVENVRPHSPSHQEILKIYEEGVLGSTSDLPDDILKISKLAEPSKSELTKYKLWLDQKYRSPYTGVIIPLSKLFTPAHEIEHIIPQSRFFDDSLSNKVICEAAVNQDKGNKLALEYITSEGGKIIETSSGEKVTIFKLEQYEDFVKTNFTKNRGKMKKLLMDDIPEDFVMRQLNDSRYISKVVKNLLSNIVREVDEQETVSKNLLTTNGAVTSILKQDWGLNDIWNDIISPRFKRLNELTHSTQFGDINPNTGKFLPQVPFELQKGFNKKRIDHRHHALDAIVIACATRDHINYLNNESALGKDKKDIKEKKRFDLRHKLCTKKYNQGSETNYKWEFKNPWDGFAKDVKDRLEATVVSFKQNLRVINKTVNHYQSYYDEAGNLRLDKNGKPSKELTKQTKGDNWAIRKPLHKDTVSGSITLKLKKPITISKALEQWENIVDKSLRKKVTELIASNYDHKMLIKHFKDLNYIFNDKDISRVEVYYTDSTNVASRVNLDDSFTKSRIETSIADTGIQKILLNHLENYKGQMDEKGKEISPEILAFSPDGIEDLNK

SEQ ID NO: 6772 - protein, 1051 aa, unidentified
  REGION 1..1051: note = Description of Unknown: Cas Enzyme sequence
MRRLGLDIGTNSIGWCLIEDDTRIVDIGVLIFSDGRDPKSGASLAVDRRDARAMRRRRDRYLGRRSAFLNALVAVGLMPIDADEAKLVGERDPYDLRRRALNERLEPYEIGRALFHLNQRRGFKSNRKAERKAKPGEEGKIASGAKALDEAMTKAGVDTLGQFLAGRETKRVRLNSDNQEYDFYPQRSHVEHEFARIWEAQAKHHPALLTDAARAALHRVLFFQRPLKEQEVGYCTFAGMNGVPEGERRLPKAHPLFQQRRLYEEVNQLRIVSPGAADRALTRDERDRLMLKLQDKKRVSFESLGKVIKLAEGERFNKESENRKDLIGDEVRAEMADKKRFGTRWLHFSLDEQLRVIDRLQNEENPETLLAWLKAEYGLDETAAEAVANARLPEGYGRFGETATRRLLEALKTEVVTYDKAALTAGFHHSDHRTGEVLNRLPYYGEILAREIAPGKEEYGDPLERRFGKITNPTVHIAMRQLQKLVNAIIAVHGKPDQIVVELARELKLNEDEKEEHKRRIKRDTDAAILRGKKLESEGLADTGANRMLLRIWEELNPANPLDRRCPYCGEPIGIRQLFSGEADIDHIIPYSRSLDDSVGNKVVAHRSCNRAKGNKTPYERWGHEESRWTTISDQVARLHKSKQWRFGPDAMERVERDGGFLARQLTDTQYLSRIAGKYLRSLYPTSEDGRVDVIPGRMTAMLRRVWGLNSLLPDHNFVENEHSNAPKNRLDHRHHAIDAAVAAVTTLALMQEIAKAARRAEDKNLDRQFEDLPHPWPDFREELGEKLKRVTVSHKPDHGRKGRPSKHRDVTAGRLHNDTAYGLTGELGRDGKTPIVVHRVPLMSLKPADLTDPARISDKTLREALCAAARDRTGKEFEQALARFAEDHPTFKGIRRVRVREPLNVIPIRDRNGRVYKAYKGDANARWEFWRLPDGGLKTVVVTMFDAHQYGVDTRPHPAAKRLLNLRQDDLIAVERNGAPREILRVAGFNVAGRLTLAAANESGNLKERDGLSNDPFKYIYLQGRSIVKAKARQVRIDPLGRVFDPGPRE

SEQ ID NO: 6773 - protein, 933 aa, unidentified
  REGION 1..933: note = Description of Unknown: Cas Enzyme sequence
  MOD_RES 53: note = Any amino acid
  MOD_RES 163: note = Any amino acid
DSGRLDRLAQEIGVQGAADKLPYVLRAAALDHPLEPHELGRALYHLAQRRGFXSNRRSPRRDDEEGVVLSGISQLRDDMARTSSRTLGEHLSRIDPHQQRIRARYTARAMLIDEFEAIWASQQRFHPSILTPELKKRIYHRIFHQRPLKSQSDKIGRCELEPXRRRAPWALLAAQRFRLLQSVNNLRVRNEFGVEYELTPEQRQVLIAELDRKKEVTFDRIRRLLKMPDVTFNLERGGEKRLRGNETNAILAKVFGDRWWEFDLDTRNAIVEDLLSIQKAETLERRGREVWGLDAEKAREFANTRLPDGHCRFSRRALAKLLPYLEEGLNTQLAIERAYPGHRLVGRAHELLPPVQQVLPDLSNPAVIRTLTELRKIVNAIIKRYGRPAEIHIELARDLRRSRDERQRLQSENRKQEAIRKAAAEEIRAAGEEPTRNNIERLLLAKECEFTCPYTGRKFSMAALLSEESPIDVDHIIPFHMSLDNSFANKTLCFADENRHVKRGRTPFEAYGNTPRWNDILERVRNFKSRLAGEKLYRFQLHGEELERWLSDFASRQLNDTRYASRLALRYLSLLYGGTADGVDPEGKRRIIVVTGQTTAHIRNWLQLGSILNDGGEKTRDDHRHHAVDAIAIALTSQRTVQMLSIASRNQLLRKGRLYGDPEPPWPTFLEDVRKTISRVVVSPRVERRVRGPLHKDTFYSPRTEEGAKSPEGRYVYYTKALANLSLSEVENIADDGVRRLVIEALAGGDPKDVFKDDSRLPRFIRRDGTTVPIRKVRIRDKLPVTPIGKDERLRFVKTEHNHHLEVFEVTDSKGKTRWEGRVVSMLEAYDRVKRKLPVINREHPGGGRFLFSLVSNPGGDVIELDEPDGTRALYIVESIWMEGNNARVQIHPINRAIRPKSTPAKPLINVLKRRRCRKVSIDPLGDVTYAND

SEQ ID NO: 6774 - protein, 994 aa, unidentified
  REGION 1..994: note = Description of Unknown: Cas Enzyme sequence
IILNTLQKIKLYLNQEFFGMKNILGLDIGVASIGWAYILEPENSTENYSIKGMGVRIIPLSSDENNQFIKGQAISKNADRRMKRSMRRNLHRYKMRKHFLTTLLNELNMMPDSSLFKLDSLNLYGLRDRAVREQISLQEVGRILYHLNQKRGYKSNRKAIIEEEEKSEKKEVKDKGYLDLINDREILIKEKKLTIGQYFYEQLRLNPRFRIKENIFLRSSYMDEFDKIWNIQQAYYPTILTEQLRDRIKNKIIYYQRRLKSQKGLVSKCRFEQHHRVAPKSSPVFQVFKIWQELNNLKITDKEGHVVLLTMDQKQDLFDFLNLNERITHKDLFDKLGLKPFSDYHSNLKKGYLEGNKTIGLLKKKFKELRLDRSDLLAFDFKIEHVEKLHTSTGELLKRLQVDVDFEKQPLYKFWHLLYSLEENEVLIEKLQKSFGFDEFQAKKLCEIDFTSSGYSNLSVRAIRKILPYLAEGKMYAEACKNAGYNHSDSITQDENLKRELLDKLELYPKNSLRNPVVEKIINQLINLINAILENEELGRPDEIRIELGRELKQNAEERNTFFSLNGQVDKRHKAIVEKLQNEYGLKRVSRNDIEKYKLWEEFGGVSPYEPEHPVKFSQLLNGDYEVEHIVPRSRFFDNSFSNKTIARKQLNSDKNNFTAYDYMNSRGNQAFHNYVEFVNKHFYKKDGISKSKRDKMLMSGEEIPNDFINRQLQETRYISREVKNLLSNVCYNVYATSGSVTDYLKHIWGVEEVLTSLNWDKYSDERKEVFTNKEGKVIKRIKDWSKRDDHRHHAIDALIIACTKQSYIQQLNQLNQNFETYADLKTSGRKFPLPWNDFIEATKKATANILVSFKAGKKVATKNANKIKRGKQLIKEMESLTPRGFLHKETVYGQIKQYEKVKLSVKFDRVEEIADEKVKQILLDRLSDFDNNPKMAFKENKMNPLPETLKEITVFKKEHVVRYPLNANFKLADVEYIVDKKIRELVAGRLSQF

SEQ ID NO: 6775 - protein, 1122 aa, unidentified
  REGION 1..1122: note = Description of Unknown: Cas Enzyme sequence
MKDVQKLSYRLGLDLGTNSIGWAMLALNQENQPYKILDAGVRIFSDGRNPKDGTPLAVARREARGMRRRRDRFLARKSKLMNCLINLGLMPKDETERKKLESLNPYELRTKALDETLNPYELGRAIFHLNQRRGFKSNRKEQIAEDKKLSETKENQVLLAKKIIETNSRTLGEFFYKERILKELTARAKPDESGLYPTRVMYENEFDEIKKTQFQNQKLGEENWQKIREIIFNQRPLAPQEKGVCQFINKFNSLPNWATELFENHKKLSEKNRNSKGLTRAYLGLPSYRKFRILSEINNLKIIRNNREEILLDAPQKRKLIAYLHEKKSATLSSLRKQIGYASEEFQFNFEGGKRDKLQGNETEIFLKDKKYFGEKWHNFSLEQQDEIVEFLLDSEKEEDIYQKALNNWKVSESQALEIKKITPNNFKSGVGNLSKELLQKLVVEIEEKNCRYDEAIKNLGFHHSKREADEIQDHLDYYGKAIPASTVPVKIDKTKNPEKYTEEEKYGKIANPTVHAALNQVRKVVNAIIKENGNPSEIHIELARDLKISKDEKREIESAQTKNQKENEDLKKELENLNQRNAYENRLKLKLFRELEKANNGVACCPYSGRTINITNLFSHEIEIEHILPFSKTYDDSIANKTIAYRSENQKKGNRSPFEAFGDSTFERIQNLPKNKKWRFYENAMEKFSDENGFQERQLNDTRYLSRIALQYLAQICNSDKIKVANGKLTSLLRHHWGLNSILNKEIATTTGEQTLETENLREATFDAETGEVFESKKQEKDKKQKPKNRDDHRHHAVDAIVIAMTETRLLQQISRDNARGHDLDRLVINLPSHWNRFREDAVEAIEKIVVSHKPDHGKNTKLHDETYYGILKEPFHLEDGKKSKEPYNLVASCSILSLKKAETKFIRDKNLREELIKLSEESSSDKEFQTKFLPEFSRKTGIKNIRFYDKNQSIIEISHPQKNPRFSKAVKTNGNHHIAVWKMPDGTIKTDVVSNFRMNCPFEIKENERREKFVNKQKKFSHHQDYEKLKPHPAAKLLIRLFKDDLVRLEENEIIKTVRIAVIASSGQCLYFDHKNASGDVASKKSFYLNEKGILMKKIRKIFVTESGKVFDSGPILKTT

SEQ ID NO: 6776 - protein, 1488 aa, unidentified
  REGION 1..1488: note = Description of Unknown: Cas Enzyme sequence
MSKIFGLDLGTNSIGWALRNPNVIGNQIEKFGVLTFNKGVGNSKTGEYSYAAERTKKRSTRRLYQARKYRLWATLEVLIKEGCCPLSIEDLNKWRHYNKEEALKNNNGGRIYPVWSTEFDSWIKLDFNNDEKPDYTSPYQLRKELATLKLDFTQEENRFKLGRALYHIAQRRGFKSSRKGADDNKEKEANDNEVIDLQYSEKKKNKVIAELSEKYEEAKTIGWLFALLESNKIRIRENITQHVIRENYKEEIKYIFQFQGLSFEDALYSKLVETGKNKNDGSIFYKRPLRSQKGLIGKCTLEPNKYRVPISHPSFEKFRAWAFLNNLKYKENSEWQPLSIELKQEIYQSLFIGRLKAYFPFSEIITFLKKKGNNWELNYKPKTTVTACPVSARLKDIFGDNYLSVKIKKEQKSKSGKDYYNIEDIWHVLFSCEDPEFVLEFAENKLKLGVDKVKQFVTTWNALPVGYGMLSLNAINKINVFLEKGLIYTEAVLLANIPQILGEKLWQENETLLLDSISDVINENRKQKTILNIVNHLVSTHKNLEENKFGYKDNDYKLVESDLEDIQLAIKEQFGVSKWNSLLNEEQKNIFDIVKDCYQEYFSKQGIVRNSGNKERIVTVKSGSKNYYKTESGYYQLPKLIDTLKEFLCDNFSHLGEYKLSKIYHPSEINIYPPAKEIDGVLKLGSPKAGSFKNPMAMRTLHELRKLMNHMIETNQINNETRIVVEVARDLNDANRRWAIEAWQRQRETENQEFAEAIKQLLNDNNNIKANPENSNDIDKVRLFYEQNTEQSLPEVTEDIQDEKGKRKKLNVKNEAVRWNGHGKKLIDKYRLWKEQGYQCLYTGKLIKLTDLFNENVIDFEHTVPRSKSFDNSLANLTVCYHDYNRTVKKNQFPTQLLNYDIEYDFGGSIGQCSAIIKRLEVWKEKVERIKQQIDFWKTKAKKATDKSWKDDAIRQRHLWQMELDYWKNKLDRFTITEITSGFKNSQKIDTQLISKYAFHYLKTYFDKVDIQKGSITAEFRKIYQLQVADGKKDRSKHSHHAKDAAVLTLIPVAAKRDAILEKYYEAKENKTVYTPELPFKGFKREFVWGIDDNVLINNINSGQELTPAKRKVRKRGKEVIVNGKNRWATGDSIRGQLHQETFYGAIKPAQKGEKGNLLKDENGRFIQGEKRYVIRIPFQYKKDANTLGFKTLDEIKKQVVDEGLKTQIEKQVNEAGGLKEAFEKGIYLLDKKGNYHGNPIRHIRVWASVSEPLAIKKQTNLSDKEYKQHYWAANGENFICAYYKNDFIDKKGNLKKDRELEIINLFDAAHLKKYEQVNEKGELLLYRKDKNNRVIVDENGNKQTPYVILKTGMKVIFYDENIEELRKQENENESGYKKRLGYRIYKVVKFTGGRLTFQHHLEARNDKELEKAYPEKTVFKTDEKNNDVVYGGRGTSGFTEKVSDALIFNSYNNYEPFPKLLYSVNWLDFAVEGYDFEIKIDGTINWK

SEQ ID NO: 6777 - protein, 1327 aa, unidentified
  REGION 1..1327: note = Description of Unknown: Cas Enzyme sequence
MKKILGLDLGTTSIGWAFVSEAENEQEQSIVHRIGVRVNPLTTDEQTNFEKGKPVSVNADRTLKRGARRNLQRYKLRRVHLVKALLQAGIITKDTVLAEDGKDSTHSTCALRAKAATEKIAKEDLGRVLLMLNKKRGYRSSRKVKNEEEGQAIDGMTVAKQLYEEGITPGQLCYRLLKAGKKTLPDFYRSDLQDELDKVWNCQKQFYPEIFTDEFKKDIEGKGLRATSAAFWVKYGFNTADIKGTREEKKLTAYEWRSKATDTQLGREEAAYVIAEINNNMSSSSGYLGAISDRSKELYFNKQTVGQYLYAQLQQNPHTRLKNQVFYRQDYLDEFNTIWEMQSQYHPELTPTLKEDIRDMIIFYQRKLKSQKGLVSFCEFERKTVEVEKDGKTVTKLTGYKVAPKSSPLFQQFKIWQNLHDLRAQNKATKEIREFDQEAKESLFEELNTRGTLTADKALSLLGHKPKEWELNFKAVQGNMTNKVLYEAYLKILELEGYDVKELFKVKGDKDDVTLADIAIEPTEIKKIILSVFDTLKIDTEILDFNAELDGKDFERQASYRLWHLLYAYEGDSSPSGNETLWRLLGSKFGFAKAHAKVLSNIALPDDYGSLSAKAMRNIYPFIKECKYNVACEEAGYNHSSSLTKEENENRQRKARLELLPRNSLRNPVVEKILNQMVNVVNAIIDDPELGRPDEVRIELARELKKNAKEREEMTVSIAKANAEHERIRNILIKEDGIKNPTRNDIIRYKLYHELKNNGYKTLYSNTYIPRERLFTKDFDIEHIIPQALLFDDSFSNKTICVRQENLDKGNKCAFDFIGPYFGEDKIEAYKERIEMLYRLNQKNDGEGISKAKYKKLLMKAEEIGKGFIERDLRDSQYIAKKAKEMFHELCKDVVTTTGSITARLREDWGLTNIMQELNMEKYRRSGLTEMRETKDGNLKERITDWSKRNDHRHHAMDALTVAFTRRQYIQYLNHLNARKNEQDEWHGAIMGIEKKYTTYEFDDAGNKKRRFKLPVPNFREVAKEQLEHILVSYKAKNKVATKNINRYRTAKGERQQVVLTPRGQLHKETVYGKIRRYATREEKVGAKFDEALIQQVTVKAYREALLKRLRENNGDPKKAFTGKNSLEKMPLYINEPARLTVPPKVKLMVLEDNYTIRKEVTPDNFKDKKSIEKIIDAGVRRLLLDRLEAYGNNAKEAFSNLDKNPLWLNEAKGIAVKSVKISGVSNAEALHHKRDHNGELIPGEHGNSIPADFVSTGNNHHVAVYKDADGKLQDTIISFYEAVERVRQGLPVIDRTLNKELGWQFLFTMKQNELFLFPSDTFDPNE

SEQ ID NO: 6778 - protein, 1008 aa, unidentified
  REGION 1..1008: note = Description of Unknown: Cas Enzyme sequence
  MOD_RES 972: note = Any amino acid
MAKILGLDLGTNSIGWAIVDKEGNEFSLVDKGVRIFSEGVKSEKGIESSRAAERTGYRSARKIKFRRKLRKYETLKVLSKNGMCPLSLDEVEAWRKSGFKQYPLNPEFLKWLRTDDDNNINPYVFRDKASKDKVTLYELGRAFYHLAQRRGFLSNRLDQSAEGVIELHAPNIESRIEETTTINDLKIEIQEYFDGLDILDKNAKELDEGEKKLKSLYNALDKIIKANEFEKAKTEIIARLNSKEDQGAVKQEIGEISQAIKDGGFETLGQYFFSLYNKGKIRNHYTARESHYLNEFEKICEVQNLSSINKNENIPEKRYSGLAKELYRAIFFQRPLKSQKGLIGKCSLDKTKSRCAISHPDFEAYRMWSYLNTIKIKTPLDEQMRFLTIEEKQQLIPKFFRKKDNFNFEDLSKELTPKGYTPDFYKSSSAKASSYIFNYKAKDSVAGCVVSASLKNVFGEEWNTKTWTYETKNSKDEFVKREVDYKDLWHLLTVSTSDAYLEEYAMEKLGLDEKRAKSYSKIRLKKDFASLSLSAINKILPYLKQGLLYSHAVFMANIEKIVDENIWKNPEERLYIQNRIAEIIENNSFENSKLEIVNGLIKDCKVNNCYYSLEAESSYKADLVKKVSSFFKEIENQKEIVEDLFPVFIEQLKKYEYISVKRLDEKVLKFLKGENETGQVFCSEEKGTEQEKEKKINNRLKKLFHPSDIDVFKKKVIEDEFGNKKVVLGSPLISSIKNPMAMRALHQLRKVLNALIIEGLVDEKTRVHIELARELNDANKRKAIQDFQKENQSKRAEIALKIKEDYKAATQKDIEPTGDDILRYQLWEEQNGMEIYEASINNGISKKIGIHQIIGENPDYDIEHTVPRSISQDNSLMNKTLCSKKFNRDIKKKQMPIELNNYELILPYIDHWRLEADKLSWEIEQLSKGIKAAATKDAKDKKIRRRHFLTLKRDYLKGKYDRFVWKEPKVGXKQPNPRHWNYYQVFSCVFKLLFHKSGKCKRGNGCRI

SEQ ID NO: 6779 - protein, 1445 aa, unidentified
  REGION 1..1445: note = Description of Unknown: Cas Enzyme sequence
RSVRRLRERYLLRRERLNRILNILGFLPKHYAEQIDFEDRLGKFLNGTEPKIAYQNGDFLFKSSFEEMLDEFKKSKLGSEEGKKKVPYDWTIYYLRKKALTERIEKEELAWIILNFNQKRGYYQLRGEDEEEKPNKLEEFYSLKVVDIKVDDSPNKKGDTWYSLTLENGWIYRRPSKVPLDDWLGKTRDFIVTTDIDDQGNLKLDKEGNPKRSFRAPSEDDWGLRKKKTEKEILDSSRTVGQFIYENLLANPNQKIKGKLVRTIERKFYKDELKQILASQKRFHSELSDPGLMVDCVRELYKHNHSHQNFLGNRDVVHLLVDDIIFYQRPLRSQKSSIGNCPLESKTFEKDGGKKIAPYKVAPRSHPLFQEFRLLQWISNLRIIRKEDDTDVTMDFLGTQDKTQALFDYLMTQSEVDCSKLMTFLLTMEGYKGKDLKAQVGKFRWNYVYDSETGESKTYPANTTRAEFLKRLGKVTGFNHEMYTEQFEESLWHLVYSVTDKIEFEKALRKFARRNGLDVNSFVENFKKTPPYKSEFASYSLKAIKKLLSLMRFGSRWEEKVIDQETRKRIENILTGEYDADLKDKVRELFKDFHTVQDFQGLPVWCASYLVYGRHSEASELIKWNSSDEMAQYIQEFKQHSLRNPIVEQVVLETLRVVKDIWDKYGYGQKDFFDEIHVELGREMKNPAEQRARLTNKISENENTNLRIKALLMELLHDPSVENVRPYSPMQQEILKIYEEGVLKSNIEVPDDILKISKTAQPSKSDLQRYKLWLEQKYMSPYTGKPIPLNKLFTPAYEIEHVIPQSRYFDDSLSNKVICESAVNKLKDNRLGLEFIKSFYGQRVALGFGEEVEIFSEDAYKAFVQDNYAKNPAKKRKLLMDELPEQMVERQMNDTRYISKFITSILSNIVRSDENDTGFTSKNIIPGNGKITSALKQDWGLNDVWNELILPRFERMNQITGTTAFTVWNENYQKFLPTVPLEYSKGFQKKRIDHRHHALDALVIACATRDHVNYLNNEHALGKKYKGKEEKQKRRFDLKHKLCYKKSNGHSNEHFEWVFLKPWDSFTHEAKDSLERIVVSFKQNLRVINKTSNKYFSYKDEDGNLRLDSQGNPIKALTRQTKGDAWAIRKPIHKDTVSGIVSLRSVKSVSLNAALDNPENIVDKKLKKKIAELTKLKYDKKLLLKYFKDRGNVFEGRDISKIEIYYFEDDLAASRVSLDTSFSEKKIQSVTDTGIRKILLNHLAKYEGIKDEKGKLIPAETLAFTPEGIEEMNQNIKTLNGGKYHQPIYKVRTFEPKGNKFQVGFEGNKQSKYVEAAKGTNLFFAIYVNEEGKRSYETIPFNVVMERLKQGEGPVPITNEKGDKLLFHLSPNELVYVPNSEENLTSIDFNGPSKEQVGRIYKMVSSSGPQCFFVKHDVSTPIVNKVEFSALNKTERAIDGAMIKD

SEQ ID NO: 6780 - protein, 1095 aa, unidentified
  REGION 1..1095: note = Description of Unknown: Cas Enzyme sequence
MNGGIMDWRLGVDLGANSLGWAALTLDRGGNPVSVLAIGSRIFSDGRDPKSGASLAVDRRAARAMRRRRDRFKQRQAALIKYLIRDGLFPADQSERQRLAIEDPYRLRARALDEALSLPELGRVFFHLNQRRGFQSNRKTDRGQDEEAGKIAIGVDRLVEKMREKDARTLGEFLHLRRQEAEDANHMPSVRTRLRPETGENAKGDGYDFYPARKLIADEFEQIWAAQSDHHPDVLTPDVYRRLHEIIFHQRPLKAPPVGQCTLVPGETRLPKAHPLFQKRRLLEEINALTIVRAGEVAQRLTPDQRDMLFLLLKTRAKATFAAMRKALKLDPADRFNKESENRTELKGDEIAAEMGKKTRFGTRWPHLSTDEQWEVVRRLMAVESEVDEAAYRDWLTATYDLSPEQALAVLGAHPPQGHGRFGPTATTTLIDSLLHDRTEDGRVVVYSEAVQRAGFQHHSDFRDRRDNEDAAELPYYGVALERHIMPGTAEPTDPEEMRVGRLTNPTVHIGLNQLRHVVNRLIRAYGPPKEIAIELARELKLSEDEKKKRNRENTDNRRAAEERSTKLGEIGQRDSGANRARLKLWEELNPGNVLDRRCIYSGKQISIDMLFSDKVEVDHILPFAETLDDSNGNKLLCLREANREKRRRSPYEAWGHTDRWPATAERASRLPKAKRWRFEPDAMQRFTQEGGFLARHLVDTQYLGRLAREYLSWLYPGRGEGSNPVWVSPGRLTEMVRRKLGLNDLLPDHNFGGGADQPKNRLDHRHHAIDAVVIAIVDRGMLNAIARASGESGSEGRERILVPAPWDGFRDDVRSTVNRIIVSHRPDHGTVSKAGLKPGRDQTAGRLHNDTAYGLTGETDAKGNSIVVRRVPLSSLKKPADIARVRDPLLREALMQFSQGLDGKAFEARMTRFPELGPLLYRGIRRVRVTEPLTVIPIRDQAGRAYKGYKGGSNYRYDVWEMPDGKWIPQVTSMFDAHQSVTVDRPHPAARKVLSLHQSDVLAIERTLNDRQLMIVTKFWQNGQVRLVAHNESGKLDDRHKNSDDPYINFSPTCGGLKKLRARQVRIDELGRVLDPGFPARKTVRPTRPRGDVA

SEQ ID NO: 6781 - protein, 1135 aa, unidentified
  REGION 1..1135: note = Description of Unknown: Cas Enzyme sequence
MYSIGLDIGIASVGWAVLNEADGSIDDLGVRLFTARNSDNNAERREHRSSRRLLRRRVTRLRDTKKVLEAAGFVHEPQFDNVSPYEIRVRGLESKLEKGEIYRAVTHIIKRRGISYLDGENVEAESNGQSFKDEVNKNARLLQDHTPGEIQYERLLKDGKVHTGFNDKHEYQLNVFTVRAYANELERILRTQQEFYPEITEEFIQSFVRKGNAENSGLVYRKRPYYHGPGNALNNSPYGRWADYAVTGKPANNIFDQLIGKDLIGELRASGISLSAQKFNILNDLNNLTIQRETSKLTTDEKSRILNHLMTEDIKTFGPKDLAKFLDIDFKDIKGWRVDKNEKPQIHNLGSYRPWRRIFAEYSIELNDLPIETIDAIAKVITLNTDLDAVEQTIALELEDIDEKVKDIIFNNFHKLKVKGSNSTWYSFSTKLMGILIPELINTSEEQNTIIERLKIKPKLRNKFADLPHIPVEEITDEIFNPTASKSVRQALRVFNQLIDHYGKENIGHVVIEMPRDKNEDDQKKTVANMQKNNENRKKQSEKYFLQKSGWSEERLKENSRKRQFAQKLSYYYEQDGRCAYSGKAIKPEDLLTNATEIDHIIPLSISLDDSINNKVLVTAQANQVKGQRSPYQAFMESGEAMGQTWAEFEAWVVSRKYKKYKRNLLLEKGDIFNPEVRQKFVARNLNDTRYASKEVLNAIQSFFYTSGAKVKVVNGSFTHTLRKKWGDALDKTRETHHHHAVDAVLCAVTPFVKIDRFEYRLSNDNVPSMVDTDTGEVIPYSEYKKMKYYDRYTYQPIWADFVQRLLPTKLYPQIKFSHQVDRRANRKVSDATLYSTRVVQNISTKRGKEVITEESYVIAKIKDIYSVDGWKDFDKNRDKLLMKDIDPKTYEKLIQIANEYPNKQDVEDQNGNKKVVDVSPFKIYCEENDVPYVQKYSRKEKGPAIKSLKYYDKKVGSHINITKDETGKPFEKTKNNKQVVLQSLNPWRTDVYYDSEKDAFQLMGIKYKDLKFINGEYGIPQARYDEIKEEEGIGPDAEFRFSLYRKDGISISNGEETLEGLYHSRTKLNKNYFEMKPFDRSKWDSKENLTIFGNVTPNGQFTKSLKTGYKITKFYTDYLGKKYYINKEKLRGII

SEQ ID NO: 6782 - protein, 1404 aa, unidentified
  REGION 1..1404: note = Description of Unknown: Cas Enzyme sequence
MKKVFGIDLGSNSTGWAIRNLDLEGNQIEDFGVITFEKGVASEKGNEFPKVQKRTESRGKRRNYQAEKYRKFGILQFLIERNMCPLSVEDFNNWKTYRKGKKREYPQSKEFLNWIRFDFDGDGLPDFHLFGKDKNESYYIFRAFAGNPQYKDVFTNDPQILGRVFYQLVQRRGFKGRDEEEAKTMLTGSDKNGTKGRNDIEEYLDKHKTLGAALYHYQKDFGGRIRQRYNLRKDSEAELKWICDLHNISKDDYSKLWKAIIWQRPLRTQKGLIGNCIYEKGKKRVAVSHPLYEEYRTWVFINNLNIIPPLDENKQEYIQAKIYPIFYKSKPDFELSEIDKQLKKDGAKRTSKHHEKTKVLSVKLLKQFQDIFGVNWKDILKWDINGERNSQPVKKSHTEYTFEDVWHVLMTFDGQENLKKFALEKLNLDEEKANKFSKIKLQQGFATLSLSAIKKILPYLQKGFLYSHAVYMANLYKMLGENEISETLINHFSEEISKILNLDSANRKNAAIVNSLISEMLNDENRYYITDERDLDSTENKLVLKSIIDNYGQESWDKLEEESKTNIVTYVSRKYLEFLKKSFFDKKNLFVQPERIDEKIFNFLKDTYHISEDMKKYLWHPSEQENYAEADNYLEYSVGKKKYYVKENNRSGFLTRNPDAEFEGREIKLLGNPEPLSKGFKNPMALKSLHKLKNLVNYLLQAGKIDEETKVVIEIARELNDKNKRKAIEIWQKEREKENDAYRKELAIYREQFPNVNLIDEDTLVRKIRLWHEQNKICFYTGKPISFSDLIIGNKYDFEHTIPASISFDNELKNLTIADSGYNRLQKGKKFPTQLVNYDIEQVINGEFYNPIIRNIEFLFGERKVEYKELKGKTERIVTWKKIEELEKLFDEWKKKASYASTKEYKDFCIVKYHTIKMDLDYLKAKLATFTVTEYKAGWRNNQLRDTQIITKYALPYFKTLFKRVSVEKGGVTDIFKKVYKVQSKDSKKDRSVHSHHAQDAAILTLIPNAFHRERIIKAYQNEIDNRTGKTYHEIPMDWDNFSQNYILELKDKVLINNLTDSRTITQTSKTIRKRGKIVYDIDQAGNRKKRVAKGDTIRGQLHGETFYGAIKQPVRDEENKILFDENKKMILKDEIYLAVRKPLVYKKDANSPGFKSLEEVEKAIVDKDLFKIIKKQVEETDFKTALTEGVYMLDKKGNKVNKIRTIRCFENGLKYTTAIKVHNHSFVSDKEYKKSTLATNGENTYCLFYKSDAGKAMRILSIVDLAEIKLKNIQNLFTEPEFSSFESGKGKNKINLPLYSILKSGDKVLFYKESINELKDLEKPELSNRMFKMYQFEKDGRIKFRHHLAAGIDTELKKDNPEYSSVNFNDKQIFLRLSQGQWNFAIEGKDFEMYIDGTIKWNF

SEQ ID NO: 6783 - protein, 992 aa, unidentified
  REGION 1..992: note = Description of Unknown: Cas Enzyme sequence
MAKNILGLDLGTNSIGWALINQDFENKQGKILGMGSRIIPMSQDILGDFGKGNSVSQTAARTGYRGVRRLRERFLLRRERLHRVLNIINFLPEHYASQIDFEKRFGKFKEETEPKLAYNKDGFVFKNSFEEMLVDFRNHQPQLLENDKKIPYDWTIYYLRKKSLSQKIEKEELAWVLLNFNQKRGYYQLRGEEEEENPNKLVEFYSLKIVDVLADEQQKGKSDIWYSLVLENGWVYRRSSKIPLFDWKDKTRDFIVTTDLNDDGSIKTDKDGNEKRSFRAPAETDWTLVKKKTEQEIDKSHKTVGAYIYETLLQNPKQKIKGKLVRTIERKFYKDELKQILEKQKEFHQELKNDDLYNDCVRELYRNNEAHQLTLSKKEFVHLLMEDIIFYQRPLRSQKSSISNCSLESRKYQDENGVEHIQYLKAVPKSNPYYQEFRIWQWIFNLNIYKKDDDVNVTKEFLNTTESFENLFEFLNNRKEVEQKVLIKFLLEQKDFKGKLLNAEAEKFRWNFVEDKKYPCNETKTMISTKLDKVENISKDFLTREAEQNIWHIIYSVNDKVEYEKALKSFSRKNNLDENSFFEAFKKFPPFKSEYGSFSEKAIKKLLPLMRLGRYWNEDEILKYSDDYFKNIESLLGVLKQRDKKISDADRQNYNKTINNKLREELENFQNAEIESFQGIRLHIAQYILYGKHSEGDNKKFASSDDLEEFLKEFKQHSLRNPIVEQVITETLRVVKDIWLKYGNGAKDFFNEIHIELGREMKQTKDERESATKRITENENTNLRIKALLAEMMSDNSVENVRPYSPMQQEILKIYEDGVLNSGIEIEDEYLKISKTAQPSPSDLKRYKLWLEQRYKSPYTGQIIPLNKLFTPEYEIEHIIPQSRYFDDSFSNKIICESAVNKLKDNYIGLGFIKQFGGTIVECGNGKSVTVFKQDAYEDFIKKHYANNRGKRNKLLLEEIPEKMIERQLNDTRHISKYISGVLSNIVRVEDG

SEQ ID NO: 6784 - protein, 1045 aa, unidentified
  REGION 1..1045: note = Description of Unknown: Cas Enzyme sequence
MAISGAYRLALDLGSTSLGWAMFRLGKDGSPTAIIRSGVRIFSDGRNPKDGSSLAVTRRAARAMRRRRDRLLKRKSRMLGQLVRHGFFPADEAARKALERLNPYQLRAKGLREALTPGEFARALFHINQRRGFQSNRKTDRKDNDSGALKQAIHQLRERMAASGCQTVGEWFWQVRMQQRPEGVAGQGVRARYRETPYTTDEGKKRIDKSYDLYVDRAMIAQEFDALWAAQAALQPALFTEVARADLRDTLLHQRPLRPVRPGRCTLLPDEERAPLALPSTQRFRILQEVNHLRLLDGTLSEVPLTLAQRDAVVAALEAHSKRSFDQLRKLLKLSGSVRFNLEDAKRTELKGNATSAALARKDLLGAAWAGFAAELQDEIVWQIVNEEGEGTLIAWLQQHTGVDEARAEAIANVALPEGYGSLSRKALARIVPELQRDVITYDKAVQAAGFAHHSDLGFDFDHESDEVEQVGERTIASTGEIKPVYAFKELPYYGRALQRHVAFAKDKPRNDEERYGKIANPTVHIGLNQVRVVVNALIRRYGRPAEVVVELARDLKQSREQKQEAQKKQADNQRRNARIRERVAETLGISTERVRASDIQKWILWEELSFDVADRRCPYSGVQISAAMLLSEQVEIEHILPFSQTLDDSLNNRTVAMRQANRIKRNRTPWAARADFEAQGWSYEGILQRAERMPLRKRYRFAHDGYERWLGEDKDFLARALNDTRYLSRVAAEYLRLVCPGSATRVIPGQMTAMLRAKFGLNDVLGLNGEKNRNDHRHHAVDACVIGVTDQGLLQRFAQANAQAREGGLTRLVESMPLPWDTYRDHVERAVRHIWVSHKPDHGFEGAMMEETSYGIRKDGSIKQRRKADGSAGREITNLIRIAEPAQSSRHGVNAEGRPLPYKGYVGGSNYCIEITRNAQGKWEGEVISTFKAYGIVRAGGWAQLRNPTQGQNGQPLVMRLVIGDSVRLEVEGREQTMRVVNINGNNGQMFMAPVHEANVDARNRDKQDAFAYTSKVAGSMQKAKARQVTISAMGELRDPGFQG

SEQ ID NO: 6785 - protein, 1135 aa, unidentified
  REGION 1..1135: note = Description of Unknown: Cas Enzyme sequence
MNKTYTIGLDIGIASVGWCVLGETHIIDLGVRTFDKAETAKEGESLNLARRNARLMRRRLFRRAWRLKKLARLLESEGLIADAKAFQPEHAFSRPLWQLRVDGLDRCLNDEEWARVIYHLCKHRGFHWISRAEAKQAEGDSKSEGGKVKQGLAGTAKLMAEKGYRSAAEMVLGEFPEAQRNKQGEYTKALARELLAKELALLFEKQRELGNPHASSALQTAILGNGDKKSGLFWQQKPALAGADLLKMLGTCTFEKGEYRAPKASFTAERHVWLTRLNNLRIVTDGVTRQLTEQERQLCLALPYQQAGDLTYKQLGTALTKAGLLEAGSFKFTGLAYPTEAQKAEGKAKDPESATLIKIPAWQELRQTLTKAGLDDEWKKLSGDALCGQPEILDQIAWVLSVHKDDDEVRTELAKLPLPNRDALIDALLNIRFDKFHALSLKALRAIVPPMEKGLRYDEACVEAGYHHSQLHKVGEGEHKYLPPLYAGRDQDGRMRFAEDADIPRNPVVLRSLNQARKVVNAIIRRYGSPAAVHIEMARDLSRPLDERNKIRKEQDEYQARNQRDREQFIELFGHPPKGLEFEKWRLYREQNGQCVYSQKPLAPSGNVAEIFLEGSTEIDHALPYSRSFDDSKNNKVLVLTRENRDKGNRTPYEYLGGAENSERWQLYVAFVEANKAYRLAKRTRLLRKDFGAKEAEEFRERNLNDTRYICRFFKNYVEQHLKLAEGSEAKRCVVVSGQLTNFLRARWGLLKVRSDSDRHHALDAAVVAACSHSMVQRLSNYSRTRELEQVRDGFVDIETGVIVNPTMHQQLREHFPDPWPYFRHELEARLKIDSPELLREEMARLGSYSEEELATLKPLFVSRAPQRRNGGAAHKDTIYGQPEKFKEKGSVSQKVPLSSLTLKDLDLLADPHRNTKLYGAIRERLEAHGGKGDKAFPASNPLRKPDKDGNPTGPIVRTVTKVIDKLSGIPVRGGIAKNDTMLRVDVFTKAGKFHLVPVYVHHRVTGLPNRAIVAFKDEDEWTLIDESFEWCFSLYPNDLLQVTQRSGETVFGYYRGCHSGTGALNIALHDRFAFGEKTTSLACFQKNPNKPIPNDKLGLIEGVGVKMAAKLKKFHVDTLGNLYPAPLEKRRGLA

SEQ ID NO: 6786 - protein, 1408 aa, unidentified
  REGION 1..1408: note = Description of Unknown: Cas Enzyme sequence
VNGFKIVLNNTILPVKFQIMRKILGLDLGTTSIGWALIEEAEHENERSRIIKAGVRVNPLTVDEQRNFEQGKSITTNADRTLKRQMRRNLQRYKLRREQLLELLKLNQLVSDKSILAEHGKNTTFQLWELRAKAAVEQITLDDFARVLLTINKKRGYKSSRKAKNEEEGTAFDGMAIAKALYDQNLTPGQYALKFMREGGKTNPEFYASDLRQEFDRIWDFQKQFHPELTEDLAAKLRDLNAGRTKDVLKASKFPTYEPKSKGRLEKLVEFLELRVKALTQKIGLDELSEVFIELNKGINSTSGYLGDISDRSKELYFNKQTVGQYLWTGLQKDRHYRTRGQIFYRQDYLDEFETIWETQAKYHPQLTPVLKEEIRDAVIFYQRKLKSQKGLISFCEFESKTIEVRTAAGTKKVTSGPRVIPRSAPLFQEFKLFQQINGIRIKPKGTRTELTLNEDDRMALFEELNWTKGMTPETVLKKFGYKKEEAFLNFKSLDGNRTNAALLEAYEKIMEKTGHDIDLSKLSVPQKLEAIAAVFSELGINTDILKHNSTLPKKAYEQQASVQLWHLLYSFEGDESKSGNDKLKAKLHEKFGFPEEVTSIMANVTFLDDYGSLSAKAIRKLLPHLIDGKLYNEACEAEGFSHSHAETSEKRDSRPLKDQIELLRKNSLRNPVVEKILNQMIHVVNAIIATYGKPDEVRIEMARELKNNAEQRKEMFDGMNKTQREHEEIKKKLQSEYGLSYVSRNDIIRYKLYEELRPRGYKTLYSNKFIPAEKLFSKEIDIEHIIPQSRQFDDSFSNKTLEYRAENIEKGNQTAYDYIASKRDEQGLKLYESEVYDLFKAGGINYAKMNKLLRKGDALKDGFLNRELGDTRYISRKAREILHDAIRITSTTTGSVTSRLRKDWQLENVLQELNWDKYDKLGLTYYEINKEGKRLPRIKDWTKRNDHRHHAMDAITVAFTKPSHVQYLNNLNARMQGDKEANSIRGIENKLLDREDDGKLRFKAPIMPLSQFRAEVKEVLESILVSHKAKNKVVTRNINKFKTAHGIKQQLALTPRGQLHNETIYGSAKQYVTKEVKVGGSMDEATILQVTKKRYREALLERLKAFENDPKKAFTGKNSLDKNPIWLNEAHTEQVPEKVTLVSLETIYTIRKTVAPDLNVEKVIDAQAKRALEKRLAEFGGDPKKAFANLDENPIYLDEKKTTKLKSVKVTGLTKVFPLRPVNNHLGQKIQDSNGREINGHFAGTSNNSIAIIYKTNDGKLDDYVVSFPEMVEFKLQGGLDIHQFIPADAEIVCTLQQNELFLFPNPEQDFFPHEVNLADKQMLKIISNNLFRVQMISSIQYPQGKVRDYAFRHHLETQVKRKDPQGKPLDESNVKHFTSRNFKSLNGFQDIVKVRIDHLGQIVRND

SEQ ID NO: 6787 - protein, 1049 aa, unidentified
  REGION 1..1049: note = Description of Unknown: Cas Enzyme sequence
NKGVGLGKTGEYSYAAERTKKRSTRRLYQARKYRLWATLENLINEGYCPLSIDDLNKWRHYNKEEARRNNNAGRTYPVWNTVFDAWIKLDFNSDGKPDYTSPYQLRKELADTKLDFTQGVNRFKLGRALYHIAQRRGFKSSRKGADDVKEKETNDNEVMDLQYSEKKKNKIIVELFEKYKDAKTIGWLFALLENDKIRVREAIAQYAIRENYKDEIKYIFQFQGLNFEDALYIKLVETGKNKNDGSIFYKRPLRSQEGLIGKCTLEPNKYRAPISHPSFETFRAWSFLNNIKYKENNEGKQLPLELKQEIYSELFFRKSKGYFPFSEIATFLKKKGKNWELNYKPKTTVTACPVSARLKDIFGDDYLNVKIEKAKAPKSNKAFYDIEDIWHVLFSYEDQEYVAQFAENKLKLGAEKTKQFVIAWNACPVGYGMLSLNAINKINMFLEKGLIYTEAVLLANIPEILGEELWKENEDLLLKEINNVINENRQQKTILNIANNLIAKHKNLESEKFGYKNNNYKLVESDFTDIQTAIEEAFGVNRWNEKTDNEKKNIFDTVKDCYQAYFTKQGIVRDAGSEERIVTILSNEKKYYKTETGYYRLPKLIDTLGEFLIDNFNIDERLLSKIYHPSEINIYPPGKPDPKDGVLKLGSPKTGSFKNPMAMRTLHELRKLMNYLIETNQIDNETRIVVEVARELNDANKRWAIEQWQKQREAENLEFAKVINSVLKDDTQSSNADNIDKVRLWFEQNEKVEQILPLFLEEIEEETQDEKGKGKKSKKKKTTEDEIIRYSEYSKKMIDKYRLWKEQNFQCLYTGKFIKLTDLFTENVIDFEHTIPRSKSFDNSLANLTVCYADYNRTVKKNQIPTQLANYEKDTKDYTAILPRLEKWKDKVERIKQQIDFWKTKTKKAADKQWKDDAIRQRNLWQMELDYWQNKLDRFTITEITSGFKNSQKVDTQLISKYAFHYLKTYFDKVDVQKGSITAEFRKIYGLQIADEKKDRSKHSHHAKDAAVLTLIPAAAKRDAILEEYYEAKESKKDFKEALIPGFPN

SEQ ID NO: 6788 - protein, 1104 aa, unidentified
  REGION 1..1104: note = Description of Unknown: Cas Enzyme sequence
MENNEKKYYLGLDIGTNSIGWAVTDESYKLVKKDGKHLWGARLFEEGKDSKPRRTARSNRRRLKRRRFRILTLRELFNNEINKVDPNFFKRLDLSFFHKEDIEKAKDYLHIDGDINNNFIFEDKKQVKEYYKKYPTIYHLRKALIEDNKKHDIREIYLAFSHMIKYRGNFLYSNFKSPDDIDIISIFNDINENIKSICQNNDPFDGVIPEFIIDKDKEEKIKELYKKESRKSSLKEELKSILNINHKYLQSLIELSNGTKKKIKELFPYYEDEELNKEEIDLGSETLEEKINSKLNNEEEVSLILNIKKLYDTRNLLFTLKGETLISNAMVNIYNEHKRQLKIIKELLKKYDPELYNKFLNEKYDENEKTIKPEDLPLISYSRYIGKNIEKKKKSKFKLGINSIKYQVFSKTLDKVIKDIENKIDKESIEDTKKLDYIKKCQESGILLIKQNSSNNGVFPYQLNKFELEKIIENQGNYYPFLKEKGKSFIDPNKEEYKLVSLLEYKIPYFIGPLSDKEISEDKNLKNHWVMKKSEEKIYPWNFYDVIDENKSAIGFIENLLNKDTYILNENTLPKKSLYIQFFQVLNKLKEIYKQGEDSKIILSTNKIEGDEDKLSSIIKSDLSSFIDFKDIFGEEFYKSKELIKKTEDIINILSIFTEEKPLNNALKQLDLRDEEFNKIKKLKNYNGFSPLSKKLLVDIKVNIVNEYGEVSEYQYSILDIMLKEGLHFMEVYETKDETKNSYKYPFKEEVEKLNEEFLKIQDLSPYEIIDEYPLSNLAKRPLRQVYKIVKELNHILTASNKSYNEEENSNKINCFSKIFVETTRKKEESKETKSRESQLRYFYNAAKNIVDKEEVSSLNEELTKNASNLKSKKIFLYFAQLGRDVYTGEKIDLSTLLTNNNIYDIDHIIPRSYIKDDSFNNIVLTNKQFNNGLQNQYPFVKLLKKEGIEWIKKLNSIKVNNISTYMSNEKMKKILRPGELSDDELSGFINRQLPTTNQANKYSIELLKQITSLEDKNIIYSKASNVSDFRNLFNLYKIREINDFHHAHDALLNIVVGDIYDQKFTNLKTKAIIENYRKKYGDEEFKARINLDPERIFKHEIKG

SEQ ID NO: 6789 - protein, 993 aa, unidentified
  REGION 1..993: note = Description of Unknown: Cas Enzyme sequence
QILGGLKKAGIDVGVLDCDMEQRLWHILYSIDDKREIRKAMTKFAETHSFNHDFIDVFSKMPPFKKEYGAYSAKAIRKLLPLMRMGKYWKAENIDPKTRERIEKIINGEYDETIKNRVREKTINLEELDGFRGLPLWLACYVVYDRHSEAKDTTRWSAPADIDQWLGNFKQHSLRNPIVEQVVTETLRTVRDIWKRYGKIDEIHIELGREMKNPADKRARMTARINENENTNLRIKAMLAEFVNPEYNIDNVRPYSQGQQDLLHIYEDYAIGNIAENDEDFDFVMRMAKTAQPSKADIMRYKLWLEQKYHSPYTGEMIPLGKLFTPAYEIEHVIPQSRYFDDSFTNKVICESEVNKLKDRQLGFEFIKAHHGEKVSLSGGGEVTILSVQEYQLLVQKNYHDNRTKMKKLLMDDIPDQFIERQMNDSRYISKMIKSLLSNLVREENEQEAISKNVITCNGSITDRLKHDWGVNDVWNHIVIPRFKRLNELTCTSKFTTTSASGHEIPDMPLELQKGFSKKRIDHRHHAMDAIVIACTTRNHVNLLNNEAAMSRNNANRYQLQRKLRRFESVSVSRDGVVKQMEVAREFLKPWPTFTTDVEKALQNIIVSFKQNLRIINKTTNIYQRIEDGKKRTARQDKGDSWAIRKPMHKETVFGEVNLRMIKEVSFNEAMKNPKAIVDKDLKEKIKEKQKLGYNLKMLKQYFDNNKDAWADINLKKIKVYYFTKDTKDRFFATRKALDTNFDEKKIRSSVTDTGIQKILLRHLDECGGDSVEAFSPDGIDRMNHNLRRLNDGKAHKPILKVRVYEKAEKFAIGQNGNKPSKFVEAAKGTNLFFAVYEKEEIGKNGVVERKRSYATIPLNVVIDRQKQGLPSAPENENGQQPLFVLSPNDLVYLPTKEETNSGIINEPLDVSRIYKMVDASGIAVNFIPHSVANIIYSLPKELAQKFCADKIVQNEFGVGSPKSKNERAITGEMIKETCIPLKVDRLGNIVKT

SEQ ID NO: 6790 - protein, 1314 aa, unidentified
  REGION 1..1314: note = Description of Unknown: Cas Enzyme sequence
MKQISSYSIGLDIGTSSVGYSVIDNQGNLLKFKKQNMWGVRLFEEGKTAVDRRIFRATRRRYDRRRERIRLLQEFFASEINKVDSDFFLRLGESKLWLEDRTLPTKQTFFDELGFTDKNYYKKFPTIYHLRQLLINHTEKQDIRLVYLALHHIVKYRGNFLYEGQRFDLMGSQQLRGTLVNLLSLTGERLNCENVDTVADEIIVKIDTPKLTKSQRTEQILNCLRFDKEDKSFFTNLVKALVGQKARMDQIFAEDNQDEAKSIALSEDEKIEDFAKELDDEQVDFLEAMKAVYSGMVLKDIIKGENVRYLSDAKVLIFEKHRSDLDKLKKIYKALGSAEYRAMFKIKVGSKPTKEKSYSSYRLGEKWCSQADLYNKLKKDLSEVKDPANIKLSKECLDDIESETFLPRSTTKSNGVIPYQVHLAELRKILENQGKHYKGLKDSSQKLETLVTFRIPYYVGPLVNNTKSAFAWMSRKVDKAKIYPWNFEDVVDKETSAEEFIFRMTGNCTYLPGEKVIPKKSLLYSEYEVLNEIKQIKANSHFLPLEEKQAIYTDLFMKHKSVSENLIKNYLIREWHYSQDTSLTGFQMEEGFASSLTSHIDFSKILGDINIGNISMIETLILWITLFTDKSLLRSKIVKNYPILTDNQVDRIVKLNYSGWSRLSRKLLEGLPIINSKGRRQSIIDTMRLSNMNFMQVITNKELGFDQLIENESKEYAERESNDFIDDLVTSPKTKRAIKQSIQVVEEIVHILGKQPTRIALEFAREEGVKKRTRPRFNKIEEKYKDLVQSNEHLELLNELRQNQKRLDDRAVLLYFEQNGKCLYSGKRLNLESLSQDCEIDHIIPRSYIKDDSFENLALVLKGENQKKSDNMLVHKDIIRSHIAWWSELKRTGMMGEKKFNNLTRDSFETNELKGFINRQLVETRQIIKHVANLFRSIYPESTVHEIKADLTYNLRDQFGYIKVREVNDLHHAHDAFLTAIMSHHIVSCYPKLADEFDYGSYLKFASNRLQALRRAKNGFLIGRFAEKIPDMSTGEVIWDGENEVNRIRKCLAYKDCFISKKTEENTGAFYDQTLYGPNAKNNLLAQNEKLDPKKYGGFSSEKEAYATIIEYGKENHRQKKIVSIPIHIVSLAKSKPTIIEEFLLKEYENVRILTQKIGQLQLILYKGHEFYISSADEIHNAKQLILDAKSLGIISRMLTEPQHVDEEEYSYLYDVLLVKIKRHYSFYKSFSEKLSEAREEYVICDIESKAKIIREVLKVTKAAPIRANFSNLDFGTMTSSEGRTRISLNIDETIFVYTSVTGMLSNSKEGSKL

SEQ ID NO: 6791 - protein, 911 aa, unidentified
  REGION 1..911: note = Description of Unknown: Cas Enzyme sequence
MKKILGLDLGTNSIGWALVEIDDKNRIVKILGLGSRILSMDAGEISKFESGGKLDSMAAKRTTDRTIRKLNERFLLRRDRLHCVLNLLESLPEHYKLEIDFENEKGYRSGKLKKGADIQFAYVKDRNGKSEFLFIDSYDNMVRDFRLAKPELFKTKINGKETKIPYDWTLYYLRKEALKRKISKEELAWITLSFNQKRGYEKTIGQDEKEEKAGELSEVFIGTVTSVKEIGNKDSLNVFEITLADQNEIEIYKYKEESRFQITSIGDLKELEIISKYDENGDIDKDKVEYSIKELRKLKVDNVSNTNRKIKENFVYEIELETGWIKEQQSKYFPKWKDTQRDFVVKTTYDKNGSRIEKGADKGRNLKSPDEKDWNLLKLKTDTELSSYNTKNKTWGVASYIYDSLLKNPNQKIKGNLITVIERKYYREELEKIFECQKEFHEELRNKELYKEAINLLYPHNENHRKKLEGILNSENTQAQALSKLITDDIILYQRDLKSKKSLIADCIYEKVKYFESDKEFNKPLKAIHKSNPLYQEFRIWQFINRLKIIKLEGGQSGEINQDVTETLLGNEKKIILFKYLNNREYVEQKDILKHFKLTEITHKWNYEKDHKEPCNETRYKFILRFKRIKDFNWEEFLSLDVEYRLWHFFYSVKKQEEFKTGLKTLFEKLLYDKNMELKFKDALVQNFNSFSGYSNDYGTYSEKAIKKLLPFIRMDKKWEESVSELNVLQIRNINEFDKCNERTNKEIARYKDRFDQILARLKSISDKDNINTVADDVVSKGVITSFWGFTNENQLQGLALHQACYFVYNRYSEVGDVQQWKTPYDIENFLRNEFKQHSLNNPVVEKVLVETLQIVKDIWMNFGDKIGIDENGKPIFDKLFDRIHIELGREMKKNEKERQKASRQNNEALI

SEQ ID NO: 6792 - protein, 549 aa, unidentified
  REGION 1..549: note = Description of Unknown: Cas Enzyme sequence
MKKILGLDLGTNSIGWALVEIDHENGIVRILGLGSRILPMNVGEINDFESKGTIKSSTSQRTDNRGVRRNIERFLLRRDRLHVVLNLLNTLPEHYKIEIDFERNGKRCGQFKDYKEPKIQYVQNKINNKKYDFLFEDSYREMLRELNIEHKKKKLIPRDWTLYYLRQKALTKKISLEEFAWVLLSYNQKRGYEKIEVENKTTKENEISEELDLRVKDVTEQIDKKGNIYFKVELDGNDGLIYNEYSTSQMTFKDDLKEVKITSKIDEFGNITSKEITIVDIYSLTIQRVNYEKDGDKHNFTLMYQNGWQETKPPVKKYTSKYSNVINKAFEYIVETVYDEKGTIIKQQGKDRKFREPDFSDNSNDWTLLKKKTEKEVLSFNWDNNYRDDLKNEPKKFISPKIFDVLKNDAQNENREWTKIIGGIFQVVERDFYREELAQIISTQKQHHTTLDDKKVFEDCVKVLYPNNDSHAKTLLSNKDAIQHLLIEDILLYQRPLKTKKSEITNCKYEVRQWKDVLDKTGKPVEMVDLETGEVTIKKVPIYYKVVSA

SEQ ID NO: 6793 - protein, 1310 aa, unidentified
  REGION 1..1310: note = Description of Unknown: Cas Enzyme sequence
VTEEYFSKEIYQELFTLLNNKNSLKQDGFISFLKDKFSWNKKDKDNFIWNFPEDDEIKGNETRVSFAIRFKRNGFAGYANFLTQEKEIALWHYLYSVSYKERIADNYKSIKSFFSKFFEGTNVQDDVKEKLIKDFANYPKFASKYCAYSEKALKKLLPFIRMGENQFNGHFDLAEFKSDLELINYNKTKILSHIGFNSDNRTTLSIEDKQNLELRKQKLFDAIWKYSVNERIQEILKRLKIIDFSADEIDFSKVISNGNHNGNVPFPKGLFSTFKSFEKQEDFVNLNLTQASYLVYGRHSELAEAKYWTSPKQIRDELHQELKQHSLNNPVAEKVILETMQIVADIWDYYGTKNIDETYQKLFDEIHLEVGRELKKSAKEKQNITDKQGENKTQNKRLRQTLEEFLSQSPYNAIYQNSDHFERLKIVEDGAAHTKNLDKSFFNDKPYTKKEIEDILKKPFISKEDFEKYKLWIEQGYKSPYTSKMIKISDLFDGKRYNIDHVFPQASVTNDSLSNKVVCELEINKLKSSQTGREFINNPKMRSVPCLAHKSKLNPEGFVDIIDDYAYVNNVKSQFSGNKRQILLSKEIPSNFTNSQLNNSRHIARKAMELLSHIVREQGEIEFRSKNVLPVTGEITSKLKRTWKLDEVWRELVSPRFIRMNELTKSNLFGQMQISKSGEKYFDCNIDDTIREKDSSYDIKRIDHRHHALDALIVALCTEEHVNYINNINANATSDNYGKQKQIEKYRETLKRKIMFSKPNKEKPNDKDWFYMLPGQIRKVGVDKFGIETVLKKSYYHKGLAFKEDYKEMVLSALQHTIVTFKQNMRVVNKTGNLYNNTSNKNKFEIQKGNEAGNSYNWAIRRSLGKSTYYGKVYLGEIENKQLHKTLREIYHTDERIIDSKLREKIIVIKNESNDFNEFEKQVKREFENITIELKVYKVASRELLSEKFNRKKIEEITDTGIQKILRNQLRQFDTVKLPLEDALTYYDYLLERPEIEAIIQSEDSKFNSVDDFVTHLKSNSYKYKKVDYNTLNVFIDQIQERDFRNEFKEHIDERPEIAFTVDQIDKMNQPENLKRLNEGKNHTPIKKVRSSNGYGNQRQVSDEPQSVKSKQYIVNDAGSNLYLGVYERSYIDKNGDNIIERKFQDIGLIELIEKLKQDSENRINPLPEKIYDDKGNEYNWKFTISPLDLVYVPNEEEMMNPSLVDLNNLNKDQISRIYKYVDGNVDIANFVPYSVAQPIWKFHDDKKKKEIYNQINEKYSLQISEKELIKDEFGFGSQQTKNQNMIDGKTQIKKICKKLKVDRLGNISL

SEQ ID NO: 6794 - protein, 1498 aa, unidentified
  REGION 1..1498: note = Description of Unknown: Cas Enzyme sequence
MEYSKKILGLDLGTNSIGWALVNAEHDRTKEIIGIGSRIIPMSQDILGKFDSGNSISQTAERTGYRGVRRLRERHLLRRERLHRVLHVMNFLPKHYEKYIDFENKLGKFISDTEPKLVWEQNEEGNFDFIFKTSFNEMVEEFKVSQPQLFDEGKLIPYDWTIYYLRKKALKHKIEKEELAWLLLNFNQKRGYYQLRGEEEEDNPNKLVEFHSLKVIEVTADEPQKGKPDIWYSIILENGWIYRRSSRTPLFEWKDKVRDFIVTTDLNNDGTIKVDKDGKEKRSFRAPSEDDWTLLKKKTESDIEKSNETVGTFIYNTLLQNPTQKINGKLVRTIERKFYKQELKAILEKQKEFHSELNNEELYHTCLNELYGNNEAHRNSNANRDFTYLFLNDIIFYQRPLKSKKSLISNCKYEVRTFINKETGEKQKEAIKCISKSHPLYQELRLWKFIQDLKIIEREKDINGKLNTDVDVTTEFLKTEDDYVELFDWLNKTKEIKQDTLLSSYFKIKKKKGEEKLSHRWNYVEDKEYPCNETRAQFLNRLGKVSNVPENFLDKETEIQLWHLLYSVEDKLEIEKALRSFAVKNNLGDDFVEVFKKFPPFKKEYGAYSEKAIKKFLPLMRMGKYWELDNIDEKTKLRIDKILSGECDETIQNRVRERAFKLNSIADYKGLPEWLVSYIVYDRHSESGDISKWKTPEDLEAYLRTFKQHSLRNPIVEQVITETLRTVKDIWKHYGDFTEIHVELGREMKNPADKRKTMTAQITDNENSNLRIKYLLAELINHSDVENVRPYSPSQQEILKIYEEGALNNPDFEVPEDIAKIAKQSQPSKSELIRYKLWLEQKYRSPYTGEMIPLSKLFTSAYEIEHVIPQSRYFDDSFSNKVICEAAVNKEKDNALGYEFIKNNEGRIIELSYGKSVKIFTICQYEDFVKQYYGKSRGKMKKLLMEDIPEAFVERQLNDTRYISKVVKGLLSNIVREDGEQESTSKNVISCTGGVTTILKQDWGLNDVWNRIVTPRFERMNELTKSSNFGQWTNKDGKKVFQTEMPLELQKGFNKKRIDHRHHAMDALVIACATRSHINYLNNESAKPSAKESRARLKNKLCYKAKTDDKGNYKWQFHKPWNSFTEDAQVALENIIVSFKQNLRVINKTVNKYQVIENGKKVIKTQEKGDSWAIRKPLHKDTVAGIVNLRFKKSVTLSAAIDQWEMLVDKGLKTKIKQLINEGFDKKKILKFFAEQENKWLGSDITKVELYYFSNDKEVLVASRVSLDTSFGAKKIESVTDTGIQEILLNHLANYNDQPELAFSPEGIEEMNKNIVVLNNGKFHQPILKVRTFEPKGNKFNVGVTGNKKDKYVEAAKGTNLFFAIYVNEEGKRSYETIQLNIVIERLKQGLSEVPEVNDKGDKLLFHLSPNDLVYVPFEEETDTLSIDILNEESSKRIYKMISSSGTQCFFIPNNISTPILQTIELGANNKSEKAWNGTMIKQVCIKLKVDRLGNISL

SEQ ID NO: 6795 - protein, 1485 aa, unidentified
  REGION 1..1485: note = Description of Unknown: Cas Enzyme sequence
MKKIGIDLGSASLGWVITEDGVILKKGVTRFDTGMMKGQSGGYVSPTRDRREVRSKRNLIRARKYRKTELLKVLVGNSCVPLSNIELEVWSKYKKGRVQKFPENESFLKWLACDFTYEGGVKYKNPYELRVKALDEKLTNHEFGRALYHLVQRRGYKDIGETDSETEKQISRRSESGFQKALDENDQIISKALLNEFLNKNKRARNQYPYREEYRHELEELCKAQGYDISKSAEKGENYNDKFIENLWKSIIWQRDLKSQKGTIGKCTLEPKKLRCPVSHPIFEIFRAWSFINTIMYFDENDEKQSISKENKKKLFEFFLKKDKNFKFEEIRGFLDKQLQTNKKYNYPIDKNGKYDTSVSGMPVCKGLIDIWGDEARKALDIIELQNIIQKAKSGGFGNALKIANNYSIIDLWHILFAFDKKTTKEKDFLITFAKEKLNMVDQKQIEKFVKLKDKFTQGYADLSVNVMCRIIPFLKEGYLYNESVVLAKIPEILGKNWEADRNKILITAKEANKLYEWNKIIIGITNNLIDRHKGLKKDNEIFAFNDYKYTLDDKDIKSISMACQGYFGEKSWSKKNNKNEIIEAVKQKYQEYFKDQKRSYRELITLTDIFNEKLKEQNINLDANQLYHHSNTENIYLKKCKTDSETEKPILPKAKNKFGFVVDILPGVQIDSIKNPMFNKSMSILRRLMNEFIKEDVIDKETEIVIEVARELNDNNKRIAIERYQNERKNNRDKYREFLSEFKKIENPGLNVEESIPTFELWTEQIFEKTNDENGKPINNINRIEVLKEKDAIKRYELWTEQKGQCMYTGKMISLSKLFSNEIDIEHTIPRSILPDNTMANQTVCYAWYNRDKKKNQMPFYCDNFDRDIDGWGTRIEPRLNNWREIRDNWKNRYNKSARSQGNEDETAKNKRIQEKHYCKMHLDYWNDKIKRFEAKEVTDSWARRQLVDTQMVSKYAREFLKTYFLKVAVQKGTVTAAFRKLYGFQEEDEIKSRNKHTHHAIDALVLTLIPTNSSYRERIVKEYFKAIEDNDKEKIKEIQKTEIPQCFNVQKFITEIENSTLIYNFEKDTVVKQTSKIIRKRGKRQYLKDKNGNFSLDKDGNKILLIAQGDTARSELYAQTYLGKIKDVERDEFEKEIKIEKLNLSLKVKGFAVKDGVNWKFKTGKDEYCFVKRENINKVKASDSSILSIVDPVIRELVSKQKNNTEIKDYQGNIIRHVRIQTKTGKEIKDRVNYLSEHDYKNKFYAETGSIPYAILLQQFNNDGVKREMIPIASFEISKMYKQAGKFDVEKYVQDFQHQYINWNKELLKVGQKVFVLKEDTDYENRTKIDFQRSRLYVISQFSKGSIWLNYHLSALSKDEVKNAVSLAKDELLFKYEQEHNIPEIVEDLTIVDNKERKEDFENRKYRFDTLEKSFRLKRLVKVIGIERTKKIKKELDKFKAIPSSIEIEEKTFLLKMSKEKWNFLLEGKDFEMKLDGSIKFKY

SEQ ID NO: 6796 - protein, 1077 aa, unidentified
  REGION 1..1077: note = Description of Unknown: Cas Enzyme sequence
MSAIGKRNLIFSFDVGHSSIGWNVLKETAATPEEVALGTVTFESDGCLASKRRVHRGMRRNIRSRRLRIADIEKLFIHQGILSAEQIEEKHKPGAGNSSPWLLSAAVLASGGTFVLRAEELFDVIRWYAHNRGYDGNRRWAHNVEDGDGDSNREKAAFSLMDEHNTSTMAETICAQLGLKPDGQQKASMAAYKDSEIGAAFPRKTVVAEVERILEVHVGKVDGCSTEFIETLCGEDDNAWKTISVPDIKKPKTYRGGLLFGQKVPRFDNRILPFCPVTDKPTPLKSCMEFMEFRGAMFLSNVRVGSEDGFELRPLSSDELNIVWDRVRERGYLTTKQFEDLVRGLEGVQKDNLAALMTIEAADKNLVTDPALKLISSSTVLKSIMPLVSDATREEVLSKLRKKHGVTIAEMIVDLAESEELSTALTAAYKKESKKKKEKYGSMDRWVDQQTFAAAFDSGRAPYGRSVMKQAVKEILSGKDPYSEGGCLYLTEEMIKRQEGRSLESLTNNHLVRHRLMILKRLFKDMVKEFCDGDKERIRSVVVEVNREVSSMSGKSMKLIKQEEGLKRADHKKARLRMEKAVEESGENIRVGAGLIRKARIAQDLGWTCPYTGEPFDELTLIHKQVDLDHIIPRSERLSDAMVGLVVTFSEINRWKGARTAYQFISEEQGKRVPGKPNLSIVSLSAHISFCEEKGKRFKRQILRMQNRRQKALLPDVKRRLARMSFLLTESYIEKEFTPRDLTISSYVAKLAVGQIKNEFGSLPKKPPVISLPGRLTGEARKSWKLLGLLSAVNEKITSDMPKNDIRGLTHLHHALDAAVMGLMAHCADNLSDGTTWQLLLKRNLRPDEKNRLKANMKNISFDGNRAHLLDVPDEIKEQLRKCLLERRVVQHVPSSMDGMKVEENTRGVIGFDEEKKKVKLRQTDNETAEVSEKLVGYKAKGSKLAVQKGVRVINQNFGVALTNPPQIITWHKVFPELKEIEQKTGKWPQVLRNGMLILVPNGNYSEVSKVWKIFSVKNEARYPALDMGLPDALKPLKRGVNLNSLIRDGLSIVDNDLTGDGICHITSSTLEAQPSA

SEQ ID NO: 6797 - protein, 1553 aa, unidentified
  REGION 1..1553: note = Description of Unknown: Cas Enzyme sequence
MKKILGLDLGTNSIGWAVVEADIEKKEGRIEDVGSRIIPMSQDILGKFDSGVSISQTAERTGYRGVRRLYQRDNLRRDRLHRVLNILNFLPKHYKNAIDFEKRFGQFKNLKEGEKETKINYYINEEGKFQFIFMDSFKEMVNEFNKAGQNTKIPHDWTLYYLRKKALTQKISNEELAWVILNFNQKRGYYQLRGEEEEVKDGKIKSFEILKVKNLIDSGEFIKKTGDKLYDVYFENGWKYDKQVTKTENWLNKTKEFIVTTSTIKSGETKRTYKAVDSEKDWIAIKEKAQQDIEAFNTKNNTLGTATYIYQTLLKNPTQKIRGKLIKTIERKYYKEELEQILKTQIELNADLQNTNLYEACINELYQRNENHKNNIKKKDFFYLFVSDIIFYQRPLKSKKSTISGCQYEFRAYKRLNKETGKTEIAKDAIKGISKSHPLFQEFRLWQFLKNLKIHKKEDVVDGKTTVNKDVTCEFLNLEEDWANLFAFLSEKKEIESKQLIDYFYKEGIINKVEKGNYRWNYVEEKKYPCGDTRAQFITRLKKIKNFDIDRLKLNKAGDKLITDLWHIIYSVKDKNEYEKALGTFAIKNDINKDAFVDSFIKFKPFDNDYAAYSEKAIKKLLPLMRRGKYWSKGEVSEKVQERITEYMQRVNSISVDKKDNSFDNYLKDSIADSDIPIQVIKSFIPFKGKNPLTALNTYQACYAVYERHSEVSEIQRWESPEDIDKYLTNFKQHSLRNPIVEQVVTETLRTVRDIWAEHGDFNEIHVELGREMKNPADKRKKMSERVTANENTNHRIKEILTELMNDGVEAVKSYSPSQQEILKIYEEGVWNNPDSSFDKVSEDVVEKIRKNAKPTKADISKYKLWLEQGYISPYTGKIIPLHSLFTHNYEIEHIIPQSRYFDNSLGNKVICESEVNRAKSNKTAYEFIKEVGGSIIGEFPVLKLEDYDSHCNKYFKNSRAKLKNLLSEEIPDGFIERQMNDTRYISKLIKGLLSNVVRENNEREATSKNLIPVNGSITAKLKKDWGLNDKWNELIRPRFERLNKMTNSNDFGYWDYQKDRNGNNIGKQFFRISVPTEIEKGFTSKRIDHRHHALDALVIACTSRKHIQYLNSLSNEKEKYGLQPALLVKNKEGHYTKNFIKPWESFTYDVKHNLEHTIISFKQNLRVINKTNNKTLQWVKQADGSLKKQLKKQEGINWAVRKPLHKETVSGAVNIRDEKTVTFNTSLLDKLAEENLNEKFILLNKKLTKKIKQLKKAGLDNKKIMSFFKADDYKFEGESIKKVEVYFYKKATASRKDLSEIKTAKLVAAITDSGIRKIIGNHLKNYLDPEGKPKFDLAFSPEGIDDLNKNIIVLNNGKKHQPIYKVRIFEQGSKFAVGDKGVNTQKYVEAAKGTNLFFAIYETQNKKQETIRTYETIPFKEVLEHQKLRATLNKEERKITEEIPINAEKGNFLFYLSPNDLVYVPTEEEVENPNSVDFQNLTKEQIGRVYKMVSSTGNQCFFIKEEVAISIKNKYEFSSLNKMEKSIDELMIKSRCWKLKVNRLGKVISCKR

SEQ ID NO: 6798 - protein, 1377 aa, unidentified
  REGION 1..1377: note = Description of Unknown: Cas Enzyme sequence
LEIDLVMKKILGLDLGTTSIGWAFVNEAETENEKSSIAKLGVRVIPISTDEETDFQKGKAVSINADRTLKRGARRNLDRYQLRRKALTKILIDESFISKDTILSEEGLNTTFATYKSRAKAAKVKISKEEFAKALLMINKKRGYKSSRKAQSDDEGTAIDSMEVATKLYDNNLTPGQFVYEILKNGKKHVPDFYRSDLQNEFDRIWNFQKVHYPEMLTDKLKDDLKGKSKKQTWVICKEPFQIVGISLKGKQAEQKLEKYRMRSIAHTEKLELEYLAIVLQEINNQINNSSGYLGAISDRSKELYFKKQTVGEYLYNQLKENPHARLKNQVFYRQDYLDEFEVIWEKQKEFYPELTKELKTEIRDVIIFYQRRLKSQKHLISHCEFEKYHKAIPKSSPLFQEFKIWQIINNIEIRHISSRTIYKNEQIEQEVKEVLFNELNIKAKLTNAEVLNILVDKPKEYELNYKELEGNRTNAELYKAYQEILKLEGEEYDFKTLKADKINDIVNSKFAELGITQEIMLFDAEKQTNDFDKQPIMQLWHLLYSFEGDNTRTGDEKLIKALKDKFGFKPEYARLIANVTLQADYGSLSSKAIRKILPYLQAGHPFSQKEGENKIIGACEIVGYNHSHSLTAEDFKNRVLKDQLELLPKNSLRNPVVEKILNQLVNVVNAIINDENLGKPDEIRIELARELKKSANERKEMTDSINKATIRHEKIRKQLQSEFGITKVTRNDIIRYKLWEELESNGHKTLYTNTYIQKEELFSKKFDIEHIIPQAKLFDDSFSNKTLSVRQVNLDKSNDTAYDFLKGKLNDEEFNQYLARVEKFYKEKKISKAKYNKLLMKLSEVPDGFIDRDLRNSQYIAKKAKQMLEEVVRTVNTTTGKITDRLRSDWQLVNVMKELNIPKYEKLGLVETIEGKNGQTEKRIKDWTKRNDHRHHAMDALTVAFTSYSHVQYLNNLGARKNETHKKYHTVYGIEQKYLYRNEKNKLLFKPPIPINEFRTETKKYLEGILISFKAKNKVVTRNKNKIKTKSKDKYIEKIELTPRGQLHKETVYGKIEQYETKEEKVGTKFDLVKIKQVAKQLYREALLARLAEFEGNPKKAFGGKNAPSKNPIYTDDAKTIELPEKVKLVWKEDNYTIRKDISPDLKIDKVIDVGIKRVLQERLEEFSGDAKKALVNLDENPIWLNKEKGISIKRVTISGVSNAEALHHKKDHNGELILDKNGSKQAVDFVSTGNNHHVAIYRDEKGNLQEEVVSFYEAVHRVNAGLPIINKNKEDLEFLFTMKQNEYFVFPSDDFDPKEIDLLNPENANLISPNLFRVQKFTIKDYFFRHHLETTVDNIKETKGVTWKREGLNGIEGIIKVCINHLGQIVKIGEY

SEQ ID NO: 6799 - protein, 1497 aa, unidentified
  REGION 1..1497: note = Description of Unknown: Cas Enzyme sequence
MKKILGLDLGTNSIGWALIEQDFENKIGSILAMGSRIIPMSQEILGEFDKGNSVSQTAARTKFRSIRHLRERHLLRRERLHRVLNILGFLPQHYARQIDFDKRLGQFFEEKEPKVAWKEMPDNKFEFVFKKSFLEMVDDFKKNQPELLNRKNRNGEDAKIPYDWTIYYLRKKALSQKLEKEELAWLLLNFNQKRGYYQLRGEDDEDATRTAQTRVYFDTKVISEITDTGAAYKGLKVLLIKLSNGDTGKYFSKDIPNWIGVEKNIIATIELDKDGNDKYEDNGTLKRKFSIPTEEDWETKWKLIKIKTEKDIKDSNNTVGTYIYDTLLQKPKQKIRGKLIRTIERKFYRDELKQILQKQIEIQPEMFNRDLYNDCARELYRHNKDHQFTLSKRDFIHLFLDDIIFYQRPLKSRKSSIGNCPLESRKYKDKNGIEQTEHLKVIAKSNPYYQEFRVWQWLYNLRIYLKYNEQDVTSEFINSADVLENLFQFLMTKKEVNHEETLKHLLETKKLKPKELKAEVAKYRWNYVYDSVNNESKSYPCNKTGYEIRKRLEKVANVPNNFLTFEIEYQLWHIIYSITDKNEFENALKSFALKHRLDEISFVENFKKLLWEEKDYGSYSEKAIKKLLPLMRLGKFWNWDSIDIKTKDRIGKIITGEYDTEIKNRVREKAIHLTEQNHFKGLQLWLAQYIVYDRHSEAALAGKWKSVSDLETYLKEFRQHSLRNPIVEQVITETLRVVKDIWTKYGNGQENYFDEIHIELGREMKNKADERKQITNQVLENENTNLRIKALIMELKENSDGKLPVENVRPYSPIQQEALKIFEDGVLKSGIEIPEDIIKISKTAQPSKSELIRYKLWLEQKYCSPYTGEMIPLNRLFTEDYQIEHIIPQSRYFDDSLSNKVICEAAINQLKDNQLGLEFIKNHHGQIVETGKGSKARIFTEEEYRDFVKRHYDKNRGKHSKLLLEEIPDKMIERQLNDTRYISKFISNLLSNIVRAKENDDGVNSKNIIPCNGKITSILKQDWGLNDVWNELILPRFERMNQLTNSKVFTAWNENHQKLLPTVPLNLSKGFQKKRIDHRHHALDALVIACATRDHINLLNNKHAKSNERFDLNKKLRKYEKVKYTDKWKNKSIEREIPKDFLKPWNNITENTREALEKIVVSFKQNLRVVNKTVNKYESYKDENGNLRIGKDGKPKKDFITQIKGDNWAIRKPMHEQTVSGIVSLPWLKVGKKEIITASRKAVDKSFNLEKIKRITDRGIQQILERYLTQDKFKIINSDGTISHNSELAFSPEGIEYLNRNISVFNNNKPHQPIFKVRVYEKGSGRFVLGTKGNKKSKLVQGAPNLFYGVYQEKNGGRNFETIPLNIVIERQKQGLSSVPETNEKGDRLLFHLSPNDLVYIPTEDEKENITRIDFRNLSAEQIKRVFVVNDFSSTCYFTPNHLAANIAPKEVDLNFDSVKNKLTGSFDTKTASFEGKQIKDVCVKLRADRLGNVSMG

SEQ ID NO: 6800 - protein, 1026 aa, unidentified
  REGION 1..1026: note = Description of Unknown: Cas Enzyme sequence
MRILGLDAGIASVGWALLEIGETDETADAETAAEESGVIAAEGQIIDCGVWMFEAAETDKEKKPKNTIRREKRGLRRVIRRRRQRMQAVRRLLFAHHLLPSAAPSALALGLDPWTLRAEALDRPLRPEELAAVLGHIARHRGFRSNAKPRAGANAASEDSKMLKAIEATRERLSQWRTIGEMFARDPAFASRKRNREGDYSRSVLRADLEKEVRQIFAAQRRLGNAHATPELEQDFTACAFFQRPLQDAESLIGFCPFLPGERRAARCSYSFERFRLLARLNTIRLIDGPTERRFTPEELAKASADFGSQKRLTWKWLRRTLGLPSSVRFEGVLPEDEGERDIVARSGNAAEGSHTIRRVIGEEAWARLCAAPESLDALAAILSFCSDLGAIRSRIEALGLPEEITARLLDAAERGEFSAFRGTGHISAAAARRLIPYLEQGLVYSEACARAGFDHAARPETALEEVRNPVVRKALGETLKQVRAIIRAYGRPDRIHLELARDLGKSEEERREITRAIEKRNRERDRLRKEFEECLGRPPSSEELLRFELWKEQGGYCLYTGREIQIQALVGSDNIVQVDHILPWSRFGDDSFRNKTLCYASANAEKRDRTPFEWFTETKTPEEWAAFEKRVMNCPEMKRGKKAHYLLRHAKEKEEAFRTRNLNDTRYLARLALDLIARHHYPEADGRRHVFARPGELTAKLRRAWGLESLKKGASGQRRSDDRHHALDAIVVAACTESMLQRLTRAAQRAERQGLARDLAGTILPPWPRFREAVGEALERVFVARAEDHRARGEAHEATIRQVREREGKVVVFERWPIDRLELKHLDRIKDAGRNAALIAALRRWIEAGKPKDDLPRSPKGDVIRKVRLQSEEKPALCLRGGTASRGEMVRVDVFREKKKGKYYLVPIYPHEIVTRTAPPDRAVAAHKEEVDWPVMDEKYEFLFSLYPQSLIKAVEPGGEEIFGYFRGIDRSTGSVKIIRPEDPNRFRRIGTRTLRSLRKFTVDRLGRIAEVEREVRTWRGAACP

SEQ ID NO: 6801 - protein, 1470 aa, unidentified
  REGION 1..1470: note = Description of Unknown: Cas Enzyme sequence
MKDNHLISPISLDLGAAKTGVFHAIYPSGISLADLSKLGSRSAYVADIPERGYTLLQTGRTANRHARRGHTRNRQAKKLLLQVLQHVYQFPANKYQEGISHLMNRRGFTYVESQMDQDKIDSIPDERQAELIALLEDKGQTAVAALFEQSELSDALNEMAYHHTSDLELTKLNVAEWCAADKKRAKDLKPLMVAFDFYIKELTAGSKYRAKYFAAIKKDINLLRRHPVKACRKLFFALQDYSKRRNLDMVHQFYQLLCHINNFDRKLLNAIHSKIDGQTDAALIETTVSGLFGKWICKQWAMSKANGAARLTEIRALQQNWKQFAQQTPDKVFDFLISTDPRLTIPPYESHTNRHPPRCQTLTLNPDELDATYPEWKNWLQLLKEGDSTNKKLIDYQEKLSQVVSGKGNPLITEQELFARQLQLVLDTSKNRDLLRLNEIWSQFKKRKALKRQNADLSKPDANLDKLLTQTKLPVSLHPDFHNEPAQGSFWHLVNRYYQTRRRARDGRYFLFYDRTKPEAQRWQRDGNLLMICTHRPRQMRHQALTDIAGLLGVSESQLPEDMGLLEKQFLQIRGLKSVCEKAYSAQKRHGADLKQLLHTDSDLIKENAKVPALINQLAAQLALTEELQTTFCERNQSFYVLAQLYPLVWGDRSGFGKTCPVCAQDNAVRMSDSNNQPQASRLSTLSMRLIDGALKRLLTHQAHHIANRIWPEIERRAQGIKKVTVPLILEQNRFDFTENLPALKGLPAAKKPAKTLDLKGKKNERIQQASKGVCPYTGATLTENSGDIDHIIPRSGRYGVLNDEANLIFASVTGNRTVKRDSILTLADLAPAYLKRQFGTDDVQAITQQIEHQLWAEDKERFAFGHYRQFIALDEATQVAFRHALFLAAEHPLRAMVLDAMGHRHKAKVNGTQRYMAQLLADIFTAKAKGTALQGTLEFDYFEVSSNGLDEDSTVALRRLIRTSTVSPELDLTKFDKQPGKTQHDYSHVIDATMAFLIALEKHQGEGALQLNLAEHETVWGELDENGVLTAKVFEKIAVDPQQLAEPVKVVPRSSFDNTLKLQQGAKSHEAFSRPIFRKNAIGLEFYDLSILDGQVYKGYMLPEGDSSLFKVANAKPADKQLDMLQWAHNNSFYRLQQHGEQAVYHPNKQKLTELLFNTLNAAKNRGGFDTEADPTKLALWLFGKPGGAGLMYFYSTNASMTEAPAIVKKQTDSPYYNQWLQHYEQWLKIAPDTKVDKGVWIIAPEQLAAWHKHCRQYLDIPVTDQAHKPVRSYGMRAITTGSGAMALVRRYTAGGDALYQLQAFDNATLSADEIPAFALSSPNVALLKKERITKGYPTQLTAKKTFEPQIIPVQTFFKADAVKELGLPDGIEVFVAKPTQAEVRNIPVDWFMKHLLQPGDGGKSWKEQKTLAISKQPDADDTVNQDQLQRVLARGCKSDKRAGAAMVGDTLVLSIPYASASLSKLLAE

SEQ ID NO: 6802 - protein, 1165 aa, unidentified
  REGION 1..1165: note = Description of Unknown: Cas Enzyme sequence
MDNKRMISPIAVDLGGKYTGVFLAHYAFDEDPANGIRQGHLLVIPEDQGKITWSQTSRRLARHQARNYKRRKLAKRLLSCVLSAILRRTLAAGERNALNGLLNRRGFNRMDVETDWELLEEASPEWHAEQFDQWFNAEKTLAEQLSGLLQRTDELDNIAGDLGSCSSKRDVKKAVKAFFGEERPEVVKAHSQILEAMAKARDSLSLGARHRREYLQNIKTELDRDSRLEALRKQLDSSELLNLVGNISNLQWKPLHWYFDDKKMAGGRDYFDDARLLRVLVRWLENWRPQNEVEKQNRKAHLEALKRMTALQWLKETDPATTIPPYEDQNNRRPPKDQTLWLNPDALTRKYGTNPAYGLPNWQLWTRNLRKADRNRGWDDQVADIVGRCERKSRRGRMQENRTDYEDALFLMRLLDRSRAHDPYALRALAKGEVSTGLETSKEHLARDLGTQHLPGFLNLCRDYYAEIQRARSGLWSADPDNLLEAADLNPPRKSRILHILVGQILGEHFSERDLKTFVEQCWLAREGRSTVRSRAEKVEKTRKKYGNSFDRLLKRAQYLVSTGQKLNKKSYEAAILAAADAAEQACERIARYLDHDDDKKQRYNNCFSIAQLYTLLETDRKGYSRTTLAVHKENSWRMEMIPCADSSETAARCSRLSADAVRPFDGVLRRIIERQAVEIARLKAEQIKTALGDKKEPLTIPVLIEENRFEFVKGIKVVKNTKKDKKTIDELNSLIDQETKEWADKFTRIRQDSQGICAYTGDSLDDRNGELDHILPQSFSRTRSGTVFNSEANLIWVSRRGNQLKKDKRYRLTDLSPRYLEAHFGTANTDRISEFIESTLKGLPENKPFDACSEDERKALRHALFLEDNSVAFSIAIQRLATRMKSHVNGTQAWFARTLIRMLTAQLKQEGLTDIEFSVHRIPADQVGLYRQQLATAAPELNKEDIQGAYSHVVDAFSTYVTGLQNHEPAGASGVLAEDSQWALRALPSSLQIHQLERLKPYSDRKNQSGIRIFKDGIYAEHFLPLWWNAEGVWAGFNVSRKGGGEPSASVKVEGRNPESLLKILEPVLEAPLPDKAPERMPRCFQVDKTKAISVLHSGELNGKSAPDDLLAALRILYYTTQKQNVTQRLLDELWSFLVYGEIEGWRILLIDSGKNHNQQRMIR

SEQ ID NO: 6803 - protein, 1121 aa, unidentified
  REGION 1..1121: note = Description of Unknown: Cas Enzyme sequence
MRESAGYVLGVDVGVASLGVALLDVDAKGNILGVRRASAFIYPAGGDETAERRLARSVRHRYERRRRRLKALRRMLRDAVGASPGFDEDLSADGSGAGATSRVALRARGLTEPLAADDLARAVLHIARNRGMRLTRVLGEAADSEKARQELGQMAAESEATRERMADAGALTPGAFLHALEQADAPDHRRPQTRRRRGGTATHRFLRTQVEDELRRLLDAQAPHHPGLTPDVRQAIHATAFEERPPQPPAPGPCRYFWSEETRMRVASDLYQTKRVYEEVNNIRVRYSDGSAEKLSLADRDKIAARLLAGENLKPTAIKKLLGLKGAGITVSLESPTGEERELKGHAIRARLKGTPLEAAYADPANRDAIDHLLRDEKDVEALAARLVQDHGVAPEDARRLATGLSLPTGTAPMGQKATRLILDQLTADVISHTEAVTRAALPEPFADGEQRDRLPYYGQVFPHLVRPVRVADGRPGFGHPAAPLEIQFGRIPNPVVHKAFNALRKVVNAILKEEWPPLRVQIELSRDMKKTQEQRDDDLKRINRDRRKNEDYDQITLAHGRQPSRKNHRRLRLAERQNWLCPYTGRQISPETLFDGTFDLDHILPRSKTLDDSLGNLVVALEEANKAKGDLSPHEAFAGGYVDPGTGERSSWEQIVKRVKSFQDGWKRVRKFSPEAMKRFEDQDAFRDRFETDTSYIAKTAAQYLRLICPDVRIVNVRIVHEVRHHWGLTSLVAQIQAEEDGCTAEEVQAELAQEGEEARRRKKSRADHRHHILDALVTAAIPLSVVQQLQTAAGRGFRGDDGPAVRPPGAFPVRAEAERVLRAARVVHRPDHEVNKRLHQEMAWGVLARFADGTYLARRRVRLTEDTVRDLAALDGLTVDEGLIQRLSSDMAAGQARLYWKADDPVAALRAVAGDLESVRDRILALYEQEPETEAVVSSDGSDRRQRKRPEPERLAAALARYRAETGRRTVLSFARRSLFLMGRSDEDGRPKLAYETKGNAWLDIRRGDDGKPTWEAVPRIIALNTYDEGPGPPLLRLFVDDTLEVSAQDGGRILCRVVSLSTGDVQLLPVNDARPAKQSVHRSALRFTSLAKFLACDPVLVVLDPLGRIRWRGPRRNW

SEQ ID NO: 6804 - protein, 1051 aa, unidentified
  REGION 1..1051: note = Description of Unknown: Cas Enzyme sequence
MQAKEVVTKWTNHEFYQSALVLGLDIGIEGIGVWLRKGQECLWARTYETTIPESAPLMGRRLKRSARRSRQSEKHREVLLKAFCARYGLPWAPINSNPFKLRLRAVTKQLASKQALVICLRHIIRHRGYDYHLTNEGNYPWGDELNLNQAVAWAQSTCCNPTLAEKLRYDLANSGLTQEKLAGFFAALSKAEAEYAKQPIRTMLEAHFAEKSHLRPPARQHNFPRELVKAHLVEICRHHPHFFGGPEKLEAALRELIGDNAHPDCILDYHRKEPGALAARKVKPCPFAPLLFDGEKSKCDPNFLLPIRKFKLLEFLASRTFVSEAGQRLLATAPLFGWLVETLAQDAAAVTAKQPRPTTRDLRKEFAKLAGVKLASDKLSHNGDFFEQLKDLLSPKMSVLKARASLSAKTAQRLCELALIDGFQPERIQHHLQAYYQWRIDSMRGYGVYPQVEFLLGRRSKSGKQAVPGKLRQILARPEVQARLDGKTVPDYVVVECVGDVPRHRLDKLEIQKDQKAKRAFKEALFAKHHVEGTATDSDRKRVLLYDQQGGSRGEAICPYTGRSLGDNPLSPKLQIDHIYPRESGGISEMVNLVLTHTETNLAKGKRTPWQAYSAGWDAALANLGKMQWNKAKKALFQRQETDCPDWKNMTRMSQLARQLKDEVAHWLGIKGQPLELARRIGTPSGFLTSVCRQSWRDKLPDKNRANQRHHLWDAAVIAHIPPGPGLNHAHYGGIFYQERGEEAGQIAWRALPDLGPDVIAFEQAHAADCLVEKPRQNKSKSSRAEETIYGMDAEGQLWARKEILKDGEPVKGVEKILEQAGFPTGPKDLLPRKRMEDWLAGHQGKPLRLANKTEVRRVPVAAGEESPTALVPHKNHEGTVIGYKKAKETYWRCEIWLAPDKDKKGRPAYQRRLIPHPRGLVALRKRGLSWKHKAEGATESLRQQVCGKLAPFSKKVGSFAKGDLVRLPLDANGDICLPPAEPFCWLWYRVSAIQGDGKVEMKMAEFKERDGTPLRNCTRKSLDQQPKEAEKLAQLLALTKAHGQPPHPHQ

SEQ ID NO: 6805 - protein, 1021 aa, unidentified
  REGION 1..1021: note = Description of Unknown: Cas Enzyme sequence
MKILGLDGGIASLGWAIIEEGEETGRIIACGARCFDAPETPDKKIPTNQIRREKRGMRKVIRRRAQRMMALRRLLHEHGLIAGAKRDALQLGIDPWKARAEGLDRALAPAELAAALGHIARHRGFRSNSKRDSAANAADETSRMKSAIATTQARLGKFRTVADMFHNDPEFDRRKRNRDGDYSRSVLRSDLEHEVRRLFDAQRRLGNPLATDTLREAFGEIAFFQRPLQDSDHLVGFCPFVAGERRAARRAPSFERFRFISKLNNLRLTRPYAERLSADELAFAEEAFGATKKFTFKALRKLLKLDTAVRFEGVNAEDEGNDLVARSGNAAEGTAVLREALGSLWPSLVSTPERLDAAAAVITFRDDVASIRAGLAETGLGSAALEALMVALEAGRFAQFKGTGNMSAAAARAILPGLRQGLVYSEASAAAGFNHAARPAVRLDDVRNPVARKALGEMLKTVRAIVSKHGLPDLIHVELARDVGKSAEERDEIARGIEKMNKQRDRNRQQVAELLGRDPRGDELLRFELWQEQKGFCLYTGEPIPCEALAATDNRVQVDHILPWSRFGDDSFANKTLCLARANQNKKGRTPFEWFSAERTAAEWQEFAARVDDCKAMKGRKKRGFYLRKNAAEVEEAFRNRNLTDTSYTTRLLLDVLKGFYPDDGQIHVRARPGALTSKLRRGWGLQGLKKDAQGKRLADDRHHALDAIVLAATSQSMVQRLTRGFQEAERKGLAREFSGEFVPAPWPGFRLDAEAAVAGVSVSRPERQSVPGEVHKATIKRVTPDDEGRPVVSVRKRVEELKETDLDLIPVPKPYGRISDPAKLRNLMISAIQEWWAAGKPKNSPPCMPNGDPIGKVRVVTNDKPAVSVRGGTADRGDMVRVDVFREIDAKGRTRFHMVPVYPHQLVALDRPPGRAVVAHKIEEAWTDVSASPYFYRFSFFINSLIEITKPDGELILGYFKGLDRSTANITIADMKSASYLIRGIGSKTLIDIRKLKIDRLGVTTNIPQETRTWRGAACT

SEQ ID NO: 6806 - protein, 1124 aa, unidentified
  REGION 1..1124: note = Description of Unknown: Cas Enzyme sequence
VKQILGVHIGTETIGWALVRYSTSPRIVNMGTRIFSSFVTHLGEGDRETSNAAARTQVRNARKLHLRKTYRKHKMLSFLTQYGLCPLTADELAVWRKDGTSTHAVKMKKWFALNPYELRAKGVTSKLSKLELGRILYHMTQRRGKILTNEKNKSKAKILLNGLPAVNRLGIHHADQQMTKQQLGEYLNTLLPKKGKPYSYQHTRVRNRYLERRMYHDELKALFKTQKKYHAFLTEPFIQALIGNDGNKGILFYQRPAQYRKLRGVASTCPYEKNKKSMWQSHPLNEWYNVYCWLDSIRLYGKPLDEKQRKEALKVPTQFAGFMFKKVRIALGVEDTFAFNYEDSAKIYLTKTISHLARNTAFGQRFLSLSEKEQHELWHDLHFYSDKALLTKRLQKRWKLPLEKAKAVAGIKLKPGFGMLSMKAARAILGYLKEGHAIKRAIILGGVTNAIGTQRWNSLNKKTKENITYFVAAAIENNKIEDPDWICDFANVFDIQLNAKKLYLIEQHEEVDLLPVSADEDRSIMRKFKPVAQKPIFELRKLINNLIKEYGSLDQINFALSNEIKINANQRKAQLISKKIRELELPKIHDAVLAAGQNPTHTNLFKYKLWLEWNKICPYTNTPIPLQKLFTDEISIVYIHPWERFFNDSDRNKALCMTFFKENIINKTPYEYFSTQPSGVWERVKTRVLEQLLNGSGKHGPYLKYKHFTASNYVQDSVAQEFDDRHHMAFKVKKYLSRVADEVFAVRGNTTSSLRRKWGISNTPYSFFKKTRGLNSREPAVVALVTALNTPSYLKELRNWNRYEPLPYRGVFPTPWKLFTRDAIQAHKTISISIDTQQQVVRRMAQKKSAVIHLTPKGKLHKDSYYAKRKSYDGTEAFHIRKPINSLTTAKQVSKIVDKGIRELVYDQIDLCGGFIEGKIPKNALVVANDTGWETKIFLPNKSGDKVPVRSVRMRENVGNAVQLSEGENKYVNPRKNHHVLIYLTTDNTYNEHVVTFWEAVRRRRNNEPLYQLPSDGRMIITTLHINDCFILGLNHKEIYRRLKGGVSLWENVYRIQRISSKYYEFRQVYDLDTYDQTYPNYIRILNFGKKKTGWLTHKPFKVSISVLGQITPFYKLLKVPDMH

SEQ ID NO: 6807 - protein, 1465 aa, unidentified
  REGION 1..1465: note = Description of Unknown: Cas Enzyme sequence
MEKILGLDLGTNSIGWAIREVNPELENQIIDKGVLTFDKGVGEGKSGEFPLVQKRTESRSKRRNYQAEKYRKWALLETLIENGMCPLSIEELNEWRKYTKGVGRKYPQSQTFIQWLRFDFDGDGKPDFEHYGISKHDNCYAFRWLAVSDKENDKNYFKTNKHLLGRIFYQLVQRRGFKSMSEDDAETDLIENGRPKKEPTGKVIPNEFEVVGVKVIDSLIKDKYKTLGAALYMGQKNKQLESVNHNRIRNRFTYRHHFENEIDTIFSNLGYDLQSEFCKKVKKAITWQRPLRSQKGLVGFCTLDRPLKSKTGLYYKAGKKRIPLSHPLYEEFRTWVDINNLNIEPPKETDKLKFIEEFVLPLFNRASDFKFSDEKDKEGKVKTKGLKSIIEKAGGKVLSNFDQELEEESEGKKYRANTFLNKIEKIFGEDWRKILRWEETLNGINKSGNYLRVEDVWHLVYDSTITKQQTDKLGERLIPILKKHFPSIDFISKDIDSFKLNKGYASLSASTIKTILPYLKQGMLYSHAVFVANLEKVFNKKLDVELLTEIKNDYTQILKKQKADKEIYSVVNSLISDRFNERDRLSMGENYTLDKFDLKDIDDKIKDNFKKKVWNKKAEQEKFDFIEKVKELYLTFLRQSISIDKAKQFYKIFRTEDKIIDLLVNKYKADRKRIDTFLWHPSEQEVYSPAYIKANDDGEVITNQNGNEIYFLGDPNPISRGFKNPMAIKTLQYLKKLLNYLLEKEKIDANTKVVVEIARELNDTNTRKGIKKYQDERKKLREKYKKAIQEHYDEIGETSKAISDEMIDRYELWEEQSKKCMYCDKTIECKEMLDGTAQIEHTVPESISRCSELFNLTLAHQHCNTAKAKRLPIQWSENYELIKDKIKFMYAKYMNYREKVEESFTKAKTAKDKAAKDKIIIERHYNKIHLKYWRKKYEAFVIEEVTNEFRRQQLTDTQIITKYSLPFLKTVFNRVEVQKGIDTSLFRKIYKVSPKLERKDRTVHSHHAVDAAVLTLIPPSSIKEFLRKEYHTAHENGTLNSYKFPNPRNWDNYKSEYIRNIENDVLINFQPQFRTLTQSVKYERKRGTKIPLTVDKKVIYQKDKDGNILYKKNNKGELEYKRNHLGELLKDDQGNNIPIPLKEFKKAQGKTIRGQLHQESVFGAILKPLYDDNNKAINVKGKFLHEDKVSYVKKSHLEINTLRGFKYDKKEKDIPKFLKQFEDIIDPYVRKLVITNIEERLEKGIDPEQVFVQPIFMIDKNGKQVHQIRRVRVFQGNINPPEIKKMEETFLSKHKHKQFTYAANTDYVSMACYKGFDENKNEKYHFKPFTALGLAKENVVPENEFQNGISYKLLWELKPGMKVIVKKYLEEDIKLLTLKETSKRIYKVATVSPRYQGEYEYFYADIDFHLCVISSEIKHPTRGKKINFENPRENPLVRLNLAVSHFLIEGKHFQIKPDGSISWLF

SEQ ID NO: 6808 - protein, 1118 aa, unidentified
  REGION 1..1118: note = Description of Unknown: Cas Enzyme sequence
MSKKILSLDLGITSIGFSVLDELKNDRYSLVDYGVSMFDKPFDKDGNSKKLLYSETESSKKLHKLRKVRKQNLAQLFEDFGLGNKESLLSHEKKNLHGNKWALRAKKVFESKLEIYELFSIFYLLAKHRGYKSLDSGDLLEELCQDLGFHVKEVQTKKDDEKGKIKKALQNIEVLKENSDKTVAQIIYEVESLKENPIFRNHDNYHYMIRREYINEEIKKIVQAQKEFKLFGADFDFDKFTKELIKTIDNQKESTNDLSLFGKCEYYPNEIVAHQYSLISDIYKMYQAVSNITFNKKPIIKITKKQIKLIADDFFNKIKKGRNIADIKYKDIRKILSLSDDIKIFDKADSRSNKGKKEENIIIKFHFVNNLSKIDNSFILKAFEQKNKYEILRKIFDVLSHEKTPKTIYEKLKNTVDEKTIIDLIKNKSGNSLNISSFAMIKFIPFLEEGLSIDEIKEKLKLNRKEDYSEFKKGIKYLHVKTYEQDDDLMINNHPVKSIVSATLRVLKHLHVKYGPFDEIRVESTRELSQNEETKKAIDKANRALEKQIDTIVENKEYQKIAEHYNKNLRKYARKILLWEEQERFDIYTGESIGFEDIFTNSVDLDHIVPQSLGGLSVKHNFVLTHRDSNLKKSNQLPMNFISDKVSYKNRVNHLFEVHKINWKKKINLLAINLDEVFKDRFESKSLRATSYIEALTAQILKRYYPFENEKKQKDGSSVRHIQGRATSNIRKLLHVKTKKRDTNIHHAIDAILIGVTNQSWLQKLSNTFRDNMGIIDEEARSKIKKDVPYVDGMEVKDLVAEIETRYNIYGEESVFYKDIWDKKKTVNFWVSKKPMVSKIHKDTIYSKKENNIFTVRENIINKFVALKITVLTKPDEFMKKFKKEILEKMYIYKTNSNDAICTIVQQRATDIVALLNTFIWIDTKDKEAMSGAKTKLDSLIHSSLTDNNENIIRKIKFYQTNLTGFDIRGGLATKEKTFIGFKANLTDDKLSYERIDVANFEKVKKENDNSFKVFKNDLVFFVYPNGSFKGGKIVSFLEEKKMGAFSNPRFPASIGLQPHSFLTLFNGKPNSHKQQSLSKAVGIMKLNLDIFGTIKSYQIIGNVKSELLEFIKGVKNG

SEQ ID NO: 6809 - protein, 1132 aa, unidentified
  REGION 1..1132: note = Description of Unknown: Cas Enzyme sequence
MDDMEIEMNKKVLSLDLGITSIGYSILDNIGNDRYKLIDYGVSMFDKATDKDGKSKKLLHSASKSSTKLFHLRKNRTKNLAILFEKYELGKVDVLLNQERENIFINKWYLRAEKAFSESLTINELFSILYLMAKHRGYKSLDTDDLLEELLRDLKFEVPEKKEKDVEKGKIKKALKTIEELRELNPQKTVARIIYEIEIQKEIPTFRNHDNYNYMIRREYINDEIRKIVLAQKEFGLFGETLDVEMFVKELISTIDNQKDSTNDMSLFGNCEYYPEYKVAHQYSLLSDIFKMYQSVANITFGKIKISKEQIKIVVDDFFKKIKQGKNIADIKYKDIRELLKLDDEVQIFGKEDYRLDKKGKKVHYTVTKFHFLSTLGRIDNSFIKIIFEQDNKFEILREIFDVLEFEKAPKSIYTQINAIFLKYALVDDEKLKDETIINLIKYKSGNSLNISAHAMIKFIPYFEQGMTTDEVKQELNIERIEDYTKYKKGIKYLHVNTFEKDDNLEINNHPVKYAVSATMRLIKHLHVTYGVFDEIRVESTRELSQNEETKKAIDKANREQEKKFQEIIENKEYQEIATHYNKNLKRYARKLMLWEEQDKLDIYSGKVIGFDDIFSNKVDIDHIIPQSLGGLSVKHNLVLAHRDENVKKSNQLPMHFVKEKVEYTNRVEYLFKEYRINWKKKINLLAMTLDDRYKDTFESKALRATSYIEALTAQILKRYYPFPDKQKQANGQAVAHVQGRATSNIRKLLGVKTKVRDTNIHHAIDAILIGLTNKSWLQKLSNTFRENMGVIDDKARKNIKKELPLVEGVEPKELVELIEDAYNIYGEDSVFYKDIFGNIKVVNFWVSKKPMSSKIHKDTIYAKKPNGLFTVREDIIKQFIALKVTNKTDPEVFIKAFEKKVLQKMYLFNTNPNDVICKVIQGRADEIKILLNSFIDLDIKNKELMSEAKEKLDTLIHKELLDNNGNAIRKVKFVQSNLTGFDIRGGLATKEKTFIGFKATHENKKLNYERVDASNFKRVQKENDGSFKVFKNDIVFFVFKDNSFRGGKIVSFLADKGITAFSNSKYPSNIQQQPHHFLTLFQGKPNSHKQQSVSKAIGIIKLNLGILGNIKSYNKFGVVSKEVELKIFHKE

SEQ ID NO: 6810 - protein, 1072 aa, unidentified
  REGION 1..1072: note = Description of Unknown: Cas Enzyme sequence
EMLTKDEFIFCTYSILTDRGYNNMFSISNEDGIINEAVSKNAKEYEEKNLALPSMVLTTHRKELEKQYQNIPIRNKKDDYVNSLDRAMHIEEFVKVVQSQANNTNIFDSSKECTKFIEEMTNESEVNTPFYQRALKSFESMVEYCSFYDAFNSKGSYKKTPLSNIKNIELTLRQKIDNHEAIISKTGELKKFTKEEINKIVDFWIQTPSSNEINAGNIFKSVGFKDVKLNIAENSSQVILNILAHRHILEVLKKYEIDFMGKDNNFYNDILLELYYFKNDSSRIEHIRKHIEKYAPNLEEEFVYELAYLDNMDGFASFSLQFINEVLSKMREEGKTHYEALESLGYYSKYLGMPPYDYLPPLEPTKKDIEWLTKNVKGFESKHLFYQPMISPKTKRVIAVLRKLVNELITQYGHIDEIRIETAKEMNSKTEKEKIDKNQAKDKKKNDEASRFLKANEIKETRKNLQRAKLYIEQGKDACICLYSGEPITLEDAFDEEETEVEHFIPRSVIWINSYKNKILIKKTANQNKGSDNPVLYLKSIGEWDNFRGKVDDTFMAFNKKDWLTKEDIIESVMQKEHWRDSYLNDTRSATRVIQKYLNHYLYPQKNLHGKEEKRHIFSVSGRAVSELKYMWGIHTIMPINEEDKKDRTTNYHHTLDAFTIALCSSAALTTLHNFFIKKENKYKTKALKEKLASNLPHSTKGENVVSYLKNLVQKYETNKLLICPYNKRKTNMKGFKDGNLKLYLTQDKANNNILAEMEKVSIDTSLLIKIVGGFPKDRNDAEVKKAMLSIQERLHPRKQKKIIEALAIYVEELLALRTQITLIEKEINSFKKGLKTGKQHKEANDIVKENMQPYIEQKDDLQKQLHNLKCSFTVKGGKRQIVKSLKLYNTKVSQTKADAIVFPHRDSKKIERLTIKTFTKALEDKEAFVIKANDSTLNVKLFNTIEGQKVGLDYFSGEVNKDIETKINPKYRELVENTSDVLTLYKNDIIKVSNTKTGIVEYFIFNGGGNISSTNTSANNKVSIKNINTNTFLKKEKKGGFKQILEDNRTPSKTTIISKVKVDFFGNIIEI

SEQ ID NO: 6811 - protein, 1005 aa, unidentified
  REGION 1..1005: note = Description of Unknown: Cas Enzyme sequence
MSKKILGLDLGTNSIGWALFEGNEQKKPVKLIDLGVRIFQRAVEDKTPTPKNHARRNARMARRIIDRRARRKQKMLSFLVQNGFLPKALQNNSQPEITLNELGDPYELRAKSLDSPLTEFELGRAILHLVQRRGFQSNRKTLLGDMIDDPDMLAIFSEEDPLENKEETAFKKDIAVLREKIQAENCRTLGEYLNGLPKGQVKRNRAREGGALRTDRQMYKDEFWQIIKAQRPHHPNLETIQEVLYEIIFFQRPLKLKKDRVGKCSLEPSKSRAKKAWQAFQRYRYLQDINSIRIFESYTSQWNELTSTDREKLIKLFEHDAKPTLDKIEKTLGLSRNHQLNFESATNKNFKGNLTVIAIRKEYPAWENLSQNQQKALEEDLVTFESKKALKSRLINYWGLDLDTALNLCLVELEPEHSDISLKAINKLLPYLEQGMIFSDARVAAGYGYEVKQIEVLDELPAPPDIPNPIVMKGLHELKRVVNAIIKEYGKPDVIRLEMARDLEMNSKRYKAFTSQQNKNTKLNEEAQSQFENIAGQNKHLGLSKYASHTDKIKYRLWQEQQNRCAYSNKQISLTELFTGAVEVDHILPYSLTLNDSYMNKVVCFASENQYKGQKTPQEAFGSDEEKWNQIEHAIANWYGKGLSSKRDAFYQTTDDLDKDFIGSQLTDTRYISREALHYLKKLGVDVNTVKGQVTSWIRHIWGMNSIIDQNKAQKDRADHRHHAIDAAVIACIDRSFYNTVVSVAKKLEKTGSEINIKDLHIDTLFSDYRQQVAKRLDEIIIAHAPERKITGALHEDTGIGYIDGVGAVYRKNLDENFTARNVGNIIDPVVKKLVENHLELHGGRPKQAFTSKTPLFHLDGKTPIKRVRVLQSKATLSDLEKTKLGIKDQKGKVFKWMTLGNTHHVEIYQHKKTQKYKSVFVTALEAKQRVNQKQSPIKSVLDDEHDFLFALHKNGLVQVNDGDIFRVQKIETTSNRLMLRNHVASTLNNKEQEIHKSLSTLLKD

SEQ ID NO: 6812 - protein, 914 aa, unidentified
  REGION 1..914: note = Description of Unknown: Cas Enzyme sequence
MSKKILSLDLGITSIGYSVLDEHKSDKYTLLDYGLSMFDKPIDKDGNSKKLLHSVSASTTKLYALRKERKQNLAKLFEQYKLSSYVALLQQEKENSYINKWELRAYKAFHEKLEVGELFTILYLLAKHRGYKSLDSADLLEELCEKLNIEIENSSKKKEDDEKGKIKSALKTIENLRLEHPQKTVAQIIYEIELQKPNPTFRNHDNYNYMIRREYINDEIQKIIKAQDDFGFFGNDFNVKEFTLSVIETIDDQKDATNDMSLFGKCQYYKEEIVAHQYSLLSDIFKMYESIANITFNKEGAKITPSQMKLIADNFFAKIKKGKNIADIKYKDIRKILKLEESVKIFNKEDSWLSKGKKQEHTIIKFHFINNLSKINSEFIVEALEQENKYEKLKEIFDVLAYEKAPHAIYEKLKEKIKDEKTIVDLIRYKSGHSMNLSSYAMVKFMPYFEQGLSTDTIKEKLELNRKEDYSAFKKGIKYLHINQFEKDDDLKINNHPVKYIVSATLRLIKHLHSVHGAFDEIRVESTRELSHNEQTKKDIEKANRALQKEIDAVVANVEYQTIAQNYGKNLQKYARKILLWEEQERLDIYSGKTISVEDIFTNIVDLDHIVPQSLGGLSVKHNFVLAHRDANVQKSNQLPLNFVADKQAFINTVEDLFESHKINWKKKKNLLATNLDEIYKDTFESKSLRATSYIEALTAQMLKRYYPFTNEKKQSDGSAVRHIQGRATSNIRKLLGVKTKLRDTNIHHAIDAMLIGFTNQSWLQKLSNTFRENMGVIDDEARANIKKEFPIIELVINDEVKYVEPKELMELVEDNYNEFGEESVFYKDVWGRVKTVNYWVSKKPMVSKIHKDTIYAKKGDGLYTNRENIINQFINLKITPTMSADKFYESFEKKILYKMYVYKTNPKDVICQV

SEQ ID NO: 6813 - protein, 983 aa, unidentified
  REGION 1..983: note = Description of Unknown: Cas Enzyme sequence
IMKHRGHFLFEGNSMEAISNLEAVFNKLMVELNDEYELELVCKDLKSVEALIQDRNLSITAKKKKMEQLLISEAEIPKTKQIKAICHVLIGASVDMRVLLADDTLVDDNDKGLKLKFGDGKFEERYDEFERILNEKIYYVESMKAIYDWGILSNILKGHEYLSDSKIEIYKNHKADLKVLKEKVKQYIPEKYGEVFNDPKQKANYCAYIGDTNKSGKKVKTDKKCNQEDFLKYLKSLFKAIKTENDRVYANMIESMEKGTFMPKQVSKDNSVLPYQVHLKELRAILKKNKEHFQFLDDIDQNGYQTMGKLINLFTFRIPYYVGPLNDAHKDTNGHCWITKKKEDEKIRPWNFEEVVDIDQCAEDFIKRMTNKCTYLVGADVLPKDSLLYSEFMMLNELNNLRINGKKINHEIKTEIIEKLFKTHRKVTVKALVRWLKNNGYEEPIEISGIDGDFKSSLQSYIKIKEILKERINNREMVENIIKWIMLFGDDKKLLVHRINSTYGETLSNNIIKRLCTLKFTGWGRLSKEFLTEIYHVVPSTGELVNIIQGLYYMPEEETSKNLMELLSKNYDYLEKVEEYNGAITEEYNGINYKMVEEQYVSPAIKRSIWQTLKIVEEIIKVKGYEPEKIFIEMARGSDEKQGRTKSRRSRLQELYESIKGETRDWVKEIELKTDGELRSDKLYLYYTQMGRCMYSGEAIDLARLSDKNIYDIDHIYPQSKVKDDSLSNRVLVKKSLNMEKSNVYPLSNKVRKNMYPLWKSLLDKELISKKKYDRLTRSIPFSDHELADFIARQVVETRQSTKVVANLLNKVYANSKIVYVKAGNVSRFKQHFGVVKVRELNDFHHAKDAYLNIVVGNVYDTKFTSNPYNFVVKNRIYSMNEKVLFGKDLVKNGRIAWEKGKSIGVVKKQVGKNNILFTRYAYEQKGQLFNLLPVSDGKGQLPLKGDDRLKNISKYGGYKSIAGAYFVLVDHEVKKNRIRSIE

SEQ ID NO: 6814 - protein, 1499 aa, unidentified
  REGION 1..1499: note = Description of Unknown: Cas Enzyme sequence
MVHKVHVISPIAIDMGAKNTGIYLNHFEEGEDPTTSHNAVGSTLVIDSNSITWSQEQRTTKRHQVRTSKRRKLAKRLLHLILQQHYGLNLAQGQIAFLNGLLNRRGYTYLVEELDEALVKQPHVANYFCQQFPEIFTEAAAFYRDFLELSNDFEQASQLHEKLTLSKTEAKQAIEEKENKQSFAEAYTNIKEALTKQIKSENEGHKYRAEYLKNIHTDIHNTELLNPIIQKISANDLANLIGNISNLQLRVLRKYFNDEAMKTGDIWKPEKLRVVFFKWIRGWHAKQENEKQNRAQILHLQNSDRAMIEILATLDPKKTIPPYEDQNNRRPPKDKTLRLKPSSLDKQLPDWETLTQSLIQHYCLPPIQENHIEKIDITENLQACTSVQKRQKETQARHILANALHRILDRTSLLDPYKLRWQVNHSTTKDALKAKQRLNKHSQNQADTLIDFAAKYYQEVEMAKQGLWSDNEHTLFYCCDTNPPQKGNIQHKLVGHILREDFTPERLQTFIDECWNVRINRSTMKGLAKKIEDTRKDYGNAFNHIARTIQNRRYVSNHQSVSEQQQTHWQNYEQTHSDVITAIENAELIATTLDEYLKHNKQSKYNNPFSIAQLYNHLETEKTGFSKTDKFNTEENAWRDKEEQLDVLNAQGHPETRTASNGVRLTADSIRPFDGMLARILDRQAYEIATLKIEQIEKANIDPHAELLVPILMEQNRFKFEQDLAEIKANGKKKNDAAQKLEKQQANWQTKTDRIQKNKRCPYNGQIIGKGEIDHIIPRSQSRKQGGVIFNSEANLIYCSGEGNHQKGDQRFHLAQLHPSYLIEIFETDKVASIEQQIRDFVTALNTNDVVSFHTLDATEQNYLRHALFLPELDHHTFPILNTRFKTLVNGTQGYLGKKIRKLLQEKYPNIQVKTYQVDAQDVSQIRTTLGTYDPKYAKQDRQGAHSHVVDAALVLAAALQNEKIAQELKTIHTTELSERGEWLSALMPTGSDVKRINRKSKYRKKLESTQIFKEGIYGERFMPILIFDEKLHYGFTPDNAALIKPNKKHGFSSFEDYFELLKPFLYTGKKNNKTPVVGNLADNSQYDYLTIDKTKALEHLQKCAKQVCTETEMQQAVQLEKLRYSIEKKEIKSVLLKDKKFIEALDDKKFKVASIELPAKADWLRLINHPIKDCFGETTTLKNCFGLSIQVEIDQPEMVNFWQMLSQESGITIETLQHHLFKRTPKGELAAKLAIIPKRVFEQKMKEIDTLQTLKNNARLQSSFGVEFKRQADRIPQQSWQALFKAFFHTDKLKNQHTHKQIRKDYSLPIVSAPSGGFRIKRKNPVTQEPVYQVSGIEGFATKGLDSELQKPAHIDQLMQSENIAALETMHKIEHACYYDEWRSIPVPDELAEQVDLIEFALGSKDRFNIRLSLSMTQLMALAPAITSYTQLPAEIQDQLWKFKKSKLLDSDLLGKPRSNLFLEQVHPHRIVFSYKVDSTTAVMKEAYKKGQPITEAR

SEQ ID NO: 6815 - protein, 1242 aa, unidentified
  REGION 1..1242: note = Description of Unknown: Cas Enzyme sequence
LFLSYQNINFMPSYNLFWRKMKRILGIDTGTNSLGWAVIDRDDNGLCTLIKKGSLIFQEGVKIEKGIESSKAAERTGHRALRKQYFRRRLRKIEVLKVLVKYGWCPYLSPEALHVWHVKKQYPMDEDFLSWQRTDESLDKNPYAYRHICLHEELDLDNEAERFILGRAMYHLAQRRGFKSNRLEQDNEDSKEAGTVKEGINSLSKEMKDSGYEYLGDYFWYLYQENKKVLEGGKNRIRTRYIDRESQYQKEFYAICEKQKLSDEQIRELERALYFQRPLKSQRHSVGKCTFEKKKPRCADSHPSYELFRMFHFVNNIKVMGPYDVELRPLTSEELEKIKPLFMRKSKPQFDFEDIAKAIAGKNNYQYIKDAGNKLYKFNYRMTQSVCGCPTIASLVNIFGEDYKNAIAETYTLAGRKTKDEMVGDVWNVLYSFPDKENVKKWGMERLQLSDEDAERFSKIHLSHSFASLSLSAIRKILPWLEQGLIYSHAVMMAKIPDIVGHDIWMEHGETIKREMLEFIVNFNPSDEMMQGTLDFCIKDYLRNNFDLKPGAADALYHPSMIETYEDAKKNEQGIYQLGSPKTNSVRNPMAMRSLHKLRKVINRLLREKIIDQNTEVHIEYARELNDANKRWAIAEWNKDREKNRAKYATEIKKLYKEETGEDISPTNEEILKYELWTEQHHICLYTGKQIGISDFVGPNPKFDIEHTVPRSVGGDSTMMNMTLCCSQFNRDVKKAKLPSQLTNIEEIRVRLADWKEKINQLRKDADRVRTHSGMAKDIKDRLIRKRHKLRLELDYWQEKYRRFQMTEVPEGFSRRQGAGIGLVGKYAGLYLKSLFHKPNDRQKSNVRVVKGATTAEFRKMWGIQDEYEKKSRDNHIHHCIDAIVIACIQAGEYNSVARYYQQYEEYERQRAQKPTFPKPWPTFTEDIKSLANETLVVHDTPDNFAKHTRKTVFTTTGKHIAQGDSVRSSLHKDTYYGAIKRDGEIKYVVRRTLSSFEKASEIETIVDEAVKNIVKKAVEGKNIKEALATPIYMNKEKGIRIKKVRCYVNSVKNPVDIRSHRDVSDKEYKRTFHVLNDENYLLAIYEGVVKGKTKTEFELIRNIDAAMYFKPSTDRDDFPSIIPETSPKGYPLKHKLTVGKMVILYESTPEEIDFCNIVDLGKRLYKITGLSYLPVGSGYGTIVMRHHQEARMAKEIKAKNGAYKNGEDYRPSIIMLHTQFQALVEGEDFEINALGEISLKR

SEQ ID NO: 6816 - protein, 919 aa, unidentified
  REGION 1..919: note = Description of Unknown: Cas Enzyme sequence
CALPIYIEVFAGKKMYKRKDVDASPELFDSPEDTLLTKGRRYLYQEEKEVLAKELFVKKSLKKEYVLKLLFDNPQDLDMNFEQIEGNDTGNALFSAYSKMIEKYGYEPLDFGKPTDKIIEQLQVIFTDLGWNTDLLFVDLNREGKDLEKQPYFRLWHLLYSFEGDDTPTGNGKLVEKLMELCHVEKEYVVELANISFQNDYGSLSAKAIRKILPYLKEGNRYDVACGYAGYRHSKSSLTKEEIENKVLKDKLDILPKNSLRNPVVEKILNQMVNVINAIIDTYGKPDEIRVELARELKKSAKEREEQTKAIAKSTREHEEIRKVLQEEFGMINVSRNDIIRYKLYEELKDNGYKTLYSNQYIPKEKVFSKEIDIEHIIPQARLFDDSLSNKTLEYKAINIEKGNKTAYDFVKEKYGEKGLQQYLNRCESLFKGQRTKLRKLKMEQENIPEGFIDRDLRNTQYIAKKALAMLNEICRRVVATTGSITDRLREDWQLVDVLKELNLPKYETLGLVEVYEDKDRRKIKRIKDWTKRNDHRHHAMDALTVAFTKDAFIQYFNNKNAAWQADCKEHSNIIGIKTRYFENGKALPPMPLVRFRAEAKSHLETLLVSIKAKNKVVTNNVNCTKRKGGENKKLQQTPRGQLHLETIYGSHRQYVTKEEKVNASFDSSKIATVCKLAYRNALLERLAAFGNDPKKAFTGKNSLEKNPVYLDKEQTARVPERVRTVELETVYTIRKPVDPNLSVDKVVDAKVRSILEQRLREYDGEAKRAFVNLDENPIWLNKEKGIAIKRVTIRGISKAQSLHDKKDKNGNLILDETGKKIPVDFVNTGNNHHVAIYRKPVLDKTGQRILDDEGNPVYELDEVVVSFFEAVTRMNLGLPVIDKNYNKSEGWQFMFTMKQNEYFVFPNEKTGFDPKEVD

SEQ ID NO: 6817 - protein, 1356 aa, unidentified
  REGION 1..1356: note = Description of Unknown: Cas Enzyme sequence
MLDIKDLSRRRRMIKKDYNIGLDIGATSVGFAGIDEQYDPIKLKGKTVVGVNLFEEGQTAADRRGFRTTRRRLNRRKWRLSLLEEFFDPYITPVDPTFFARLKESNLSPKDNNKNFSGSLLFPDITDQKFSEEYPTIYHLRYALMTENKKFDLRAIFLAIHHMIKYRGNFLNSTPVAHFDTSKIDFAGDFNELNNLYLNEDPNNIFEINLQNVKEISDILLDHSIKKFDKQKQVAKLLLTSQNDKELDKRNKQIATQISKAILGYNFSLNEILKLEAVNKSKWKLNFSSADIDDTLPDLISELDESQESILNIILSLYSRLTLNGIVPSGMSLSEAMIDKYGTHKEHLDLLKKYLKTLPIKNRKEIAEAYAEYVGNSSKKSGHISQEEFYKAVKKNLDKSETAQEILGLISEEKFMPKQRTNQNGVIPYQLHQKELDQIIVNQSQYYPWLAELNPVKEHKDAKYKLDELIAFRVPYYVGPLVDPKTTLQTEQGNKNASFAWMVRKENGRITPWNFDKKVDRISSANNFIKRMTTKDTYLIGEDVLPAHSLIYERFKVLNELNMIRVNGKKLSVSVKQNLYNDLFKQQKTINKKKLANYLQANLGIPERPQITGLSDPEKFNSQLSSYIDLQKILGSEIVDDPNKQDDLEKIIEWSTVFEDSRIYKVKLQEIGWLTEKQKNELVSHRYQGWGRLSRKLLVELKDKNGRSILDILWNSQPTFMEIQSRPEFAEQITNENQDKLTEDNYENVLDDAYTSPQNKKAIRQVIKVVDDIVKAAGKAPKLISLEFARSDERSDRTKSRKSQIQKIYETTAKELLKDDQLIKELGSVSDLSDRLYLYFTQLGRDMYTGKPINIDEISTIYDIDHILPQAFIKDDSLDNRVLVRRQDNNAKSDTVPALKFGKMKPFWNKLQKHGLISKRKLDNLQTNPESMKDWDNKAVGFVNRQLVETRQVIKLAANILASRYPDSKIIEVKASLTHQMRESFNLIKNRDVNDYHHAVDAYLSAFVGQYLYNRYPKLQPYFVYGQFKKFDKQSTRIGMKTNHFNFLYDLEPESKNVKIKKPTKIINKETGEIIGDRDELVAKLNRVYNFKYMLVSQEVYTKTGPLFKETIQPHGDKDTLIPIKKNKPVKIYGGYTGNNDSFMSLIKLNKKYKIVGIPQRQKNALEKVNDQNNYLRELHRIIENNIKNKEFEILIPKVMFRQLINDGKEKYTLGGSRERYSSTQLIVSHKTLLTLRGKNKEDKDLNNQFIEAYNDIVTRIKKYIPLFDAKKLIELKPKFVLLEQEEKRKILIEILRAVHCNKKNGNLKAIGGPSAFGRLQKRSGIILSPNACLIYQSPTGLFERKVYLNTISPLK

SEQ ID NO: 6818 - protein, 1371 aa, unidentified
  REGION 1..1371: note = Description of Unknown: Cas Enzyme sequence
MTEKNYSIGLDIGTNSVGWAVITDDYKVPAKKMKVLGNTDKKYIKKNLLGALLFDNGETAEATRLKRTARRRYTRRKNRLRYLQEIFAEEMAKVDESFFYRLDESFLTTDDKDFERHPIFGNKADEIKYHQEFPTIYHLRKHLADSHEKADLRLIYLALAHMIKFRGHFLIEGELNAENTDVQKLFEAFVEVYDRTFDDSNLSEITVDASSILTEKFSKSRRLENLIKHYPTEKKNTLFGNLVALALGLQPNFKTSFKLSEDAKLQFSKDTYEEDLEELIGKIGDEYADLFTSAKNLYDAILLSGILTVADNTTKAPLSASMIKRYNEHQVDLKKLKEFIKNNASDKYDEIFNDKDKNGYAGYIENGVKQDEFYKYLKTTLSKIDGSDYFLDKIEREDFLRKQRTFDNGSIPHQIHLQEMHAILRRQGEHYAFLKENQAKIEKILTFRIPYYVGPLARKNSRFAWAEYHSDEKITPWNFDEIIDKEKSAEKFITRMTLNDLYLPEEKVLPKHSLVYETYTVYNELTKVKYVNEQGKSNFFDANMKQEIFEHVFKENRKVTKDKFLNYLNKEFPEYRIQDLIGLDKENKSFNASLGTYHDLKKILDKSFLDDKTNETIIEDIIQTLTLFEDRDMIRQRLQKYSDIFTPQQLKKLERRHYTGWGRLSYKLINGIRNKENGKSILDYLIDDGYANRNFMQLISDDTLPFKQIIKDAQIIGDIDDVTSVVRELPGSPAIKKGILQSVKIVDELVKVMGHNPDNIVIEMARENQTTNRGRNQSQQRLKKLQDSLKELGSNILNEEKPSYIEGKVENNHLQDDRLFLYYIQNGKDMYTGDELDIDHLSDYDIDHIIPQAFIKDDSIDNRVLTSSAKNRGKSDDVPSLDIVHDRKADWIRLYKSGLISKRKFDNLTKAERGGLTENDKAGFIKRQLVETRQITKHVAQILDSRFNTERDENDKVIRNVKVITLKSNLVSQFRKDFKFYKVREINDYHHAHDAYLNAVVGTALLKKYPKLAPEFVYGEYKKYDIRKFITSSGDKATAKYFFYSNLMNFFKRVIRYSNGKVVVRPVIECSKDTGEIAWNKQTDFEKVRRVLSYPQVNIVKKVETQTGGFSKESILPKGNSDKLIPRKTKKFRWDTPKYGGFDSPNIAYSVFVIADVEKGKAKKLKTVKELVGISIMERSSFEENPVVFLEKKGYQNVQEDNLIKLPKYSLFEFEGGRRRLLASASELQKGNEVVLSRHLVELLYHAHRVNSFNNSEHLKYVSEHKKEFGEVLSCVENFAKSYVDVEKNLGKIRAVADKIDTFSIEDISISFVNLLTLTALGAPADFNFLGEKIPRKRYTSTKECLNATLIHQSITGLYETRIDLSKLGEE

SEQ ID NO: 6819 - protein, 1464 aa, unidentified
  REGION 1..1464: note = Description of Unknown: Cas Enzyme sequence
MENKEIYFGFDMGTENIGFAVCDENYKVKKVNGRKAWGVRLFDTAETAVQRRTYRAARRRLERRKYRITLLQELFYEEIKKKDPNFFFKLNENDLHLEDKEYKTKYSLFNDEKFTDKQFYKKYPTIYHLRNALMNEPASDIRLLYLAIHHIVKYRGNFLRSGEINDVTDASEFFKALNNALENLSSEVNDFDNDQKITDIGKFDLSRLNELTSLVKDNTIKRKDKILKAKELLSSKNTSQNKIIEAIFGGVVNVEQIFGKDKYDVELLSKAKFYLSEEVEEFLPILEGELNPTDYEIIVCMKNIYDWQVLLSLLKGKSTLSEAMVDTYNEHKKDLKNLKYIVEKYLPSEKDAMFGEPSTNGKIDDKIDNYTKYIGGGYYGGAKLGRKYEDGKLVVDTSVVSRNGRLGKTCTKEDFYKYVNKLLKNITIDEDDEKGKRILEDIKSRIENGDFMPKIVSKDNATIPYQLNENELNKIIEVNKEKYPFLLSADDGIAVSKKIKSLLTFRMPYYVGPVKENANSKNVWSVRKESGRVTPWNLSDKIDLNESREKFITRMTCKCTYLKNEDVLPKNSVLFSKYVALNELNKLKVNDKEIDVDLKQKIFNEVYLNKTVNRKNIAKCIKNITGNDVTLSGIDENLHGNMNTYQKMKKAIGDKVDKYPDMVEDIVKILTIFADDSKAVGDLLKERYSSILSVDEIKKLKGYKYSGWGSFSRGLLQGSAMGTHGIMLTDSQKNLKDIIDIMWETNQNFMEIINSEEYDFADAVRGYEKENEITENLDIAYDDVEELYCSPSVKRSIWQAFLMTKELVKLCGVPRKIFIETTRSNTDEKKGKRTQSRKEQITAMYEEAKKQNKYLYKEEIAEMMSKADKKSNGELNSEKIFLYFMQLGKDMYSGKPIDIDQLRDYDIDHIIPQSQVKDDSLNNKVLVHKTLNGKKDNTYPLPSEFRQPALWDNLKKLKLLSDEKYHRLTRTTRISDLEKEKFINRQLVETSQMVKLTRDILQKYFEGITGDKKAVEIVMSKAGNVSDFRKDYGLTKSREINDFHHACDAYLNIVVGNVLNEKFSHNKDYRENQSDKTVDKSYNFRKAFYSSVYSNREKRYVWTAQNKDGYYPTINVVKKELESFDFAMSKKLTTGKGQLYKETIFKAEDNPNMYPRVEKVDKNGVINPRADVTKYGGLMSSKVAYFVVVDSEEKKGKNKGQKRRSIIDIPIYYAKRIENSKTTINEYLETNPRVNLYKPTLAKIEGLKDSKLLVGSLLDFGNYKLRLAGAKEKVLTFHNANELFVGKKMNDYVKELALVNEKIKKDFIKRKTDKGDLSDDEFRRKLFVEQEEEKTRRENDPEQKNKSRILHVTKEKNNELYDLFLDKVSNEKSPYTYLPSYASYINTLEKGKGKFYKMDEYDGLRCLLNLIVAFQCNAKTVDASCIGGSKEICRISITKDITNIPITFISQSVTGLKEKRIKIN

SEQ ID NO: 6820 - protein, 902 aa, unidentified
  REGION 1..902: note = Description of Unknown: Cas Enzyme sequence
MKKVKELFIKYKLVSKKELEGIYIIDKNTKDVWDLRAIALDKLLDRKDWARALTNIAKRRGYKSNRKTDEEDKEVGRLSKGTLENKKILEENGYRTIGEMFYKDQKFKNNKRNKDGEYNNTVFRTMLIEEIKILFEKQRYLGNIYANENFEKEYIEVISFQKPYITPELLDRMLGKCTFEKDEPRAPKNSYTFERFMLLQKVNNLKINIKGEEIFIAQEKKKEIINMAYEQSEIKYYQLRGKLNLPIEARFAELDYNKNRKNKETSEEDQIKEIENAKFVKLEGWHKIRLALKSKGKEKKFELIKDNPQLQDIIADALVRNKTDETIKKYLQEKNIDEDLIDATLTINFTKFGHLSYKAMKNIIPELERGLTYDKAAEKVGYDFRGVKNKLKCKLPPVSELDDIVLNPVVLRAMAQTRKVINAIIDKYGSPKAIHIETARELSKSYDDRRKIALKQKENFENNEKLKEYIRENFDIEPKPFDIVKMKLWREQGGKCAYSQKAIPAERLYEENFVQVDHIIPFSRCFDDSYNNKVLVLTEENQRKKEKTPFEYLCGDARRWHAFEEFVEINYKFNTKKKQNLLIKKLDENKSKEWISRNLNDTRYIAKFLYTYITNNLKFADSELKRKVYTINGQATEILRHYWGLKKDREVSDKHHAQDAVIVACATNENIKKISDFSRNKILKINNKLIDQDTGEILDVKYNTEISIKLPWSRFREELVARMENADINGELYTLKHGKFNNYDDIDVSKIKPIFISRMPERKISGRAHKDTMRSQKFIKKGYNYTVVKKNLKNITKQEIEAIINNEKYKMLYENDKIMYDDIYGKMKSADFKADKAFAEEYRKYSKNGNSPIVRSIKVPSLVTSGVKLKNGAIVENANMARVDVFEREGKYFLVPIYISDF

SEQ ID NO: 6821 - protein, 1338 aa, unidentified
  REGION 1..1338: note = Description of Unknown: Cas Enzyme sequence
MGQGYFLGLDMGTGSLGWAVTNDKYEVLRKHGKALWGVRLFESANTAEERREFRTARRRLARRNWRLQVLQELFAEEIAMVDPGFYLRMKESKYYPEDKRDINGVCPELPYALFVDKNFTDKDYYQKFPTIYHLRKMLMNTIETPDIRLVYLAFHHMMKHRGHFLLSGNINEIKEFKVTFLQLIHNIKDEELEFYLSIGDKECEIIEEILKDATITKSIKRSRLWKALGAKTTCEKGILNLIVGGKVKLSDIFDNKDLDESERPSISFSDSGYDEYIGAIEAELGEQYYIIESAKAVYDWAILVDVLKDSPSISEAKVKIYEKHKADLAYLKNIVKKYLTKEDYNQIFVKTEDKLCNYCAYIGMTKKNGRKVDLKSKCCGKEEFYDFLKKTVVKKMENQKESFYLKEELEKGTFLPKQVNKDNSVIPYQIHQYELDKIIENLSDKIPFLKENGDKIKQLFAFRLPYYVGPLNGEKFSWAIRRSNEKIYPWNINEVIDFEESAEKFIRRMTNKCSYLYGEDVLPKDSLLYSKFMVLNELNNLRINGEKISVELKQRIYEELFCKTRKVTQKKLKKYLCLEGITGKEVEISGIDGDFKASLIAYHDFKEKLTGVELSQRDKEDIILDVVLFGDDKKLLKKRIDKKFPNLTDNQRKSICTMSYKGWGRLSKKFLEQIEAPAPKTGEVWNIITVLWETNDNLMEILSKKYSFANAIEEFNCESKEINLGYKAVEGLYVSPAVKRQIWQTLKVVKEIEKVMGEKPKRVFVEVAREKQESRRTESRKKQLQELYKVCKTEERDWIAELENYKDHQLRSDKLYLYYTQKGRCMYSGEVIRLEELWDNRKYDIDHIYPQSKTMDDSLDNRVLVKKQYNEEKADKYPIDQKIREARSPFWRSLLQGGFISKEKYERLIRKEEFGERELAGFIERQIVETRQGTKAVAEILKQVLPETEIVYVKAKTVSQFRQAYHEDSVFIKVREMNDFHHAKDAYLNIVVGNTYFVKFTKDAAWFIRNNPGRTYSLKEMFTGKYDVERSGEIAWKAGSNGSIVMVKKQLSKNNILITRKAYEVKGGLFDQQIMKKGKGQIPIKGKDDRLADIGKYGGYNKATGTYFMLVKSKDKKGKEMRSIEFVPLYLKNMFEQGEDVALEYLREERNLKEPEILIKKIKTDTLFNVDGFKMWLSGRTGNQLIFKGANQLVLSENDCRTLKKVVKFNQRKKENKNITITEKDEINAEILLQLYDTFLWKLQNTVYKVRLSAQEKTLKEGREMFRKLSLEEQGLVLYEILHMFQCQSVSSNLRSIGGPGSAGILVMNNNITKCARISIINQSPTGIYEQEINLLKV

SEQ ID NO: 6822 - protein, 1392 aa, unidentified
  REGION 1..1392: note = Description of Unknown: Cas Enzyme sequence
MSKKILGLDLGTTSIGWAFVTEAENDTEQSSIKRIGVRVNPLTTDEQTNFEKGKPVTANADRTLKRGARRNLQRYKQRRQNLVAVLLKSKIINSDTILAENDKQTTHSTYALRAKAASERIEKEDLARVLLMLNKKRGYKSSRKVRNADEGPAIDSMATAKRLYDEQLTPGQLCYQLLLAGKKHLPDFYRSDLLAELEKVWQFQKKFYPDVFTDTLRKAIEGQGKEGTRKRFLAIAQTYTAEIKGTREEKKLKAYEWRNKAFHTKLAKEEVAHVITEINSNISNSSGYLGAISDRSKELYFTRQTVGQYLYKQLQNNPHARLKNQVFYRQDYMDEFEAIWEVQASYYKELTPALKAEIKDIIIFYQRKLKSQKGLVSFCEFESRVVEKEVNGKRIERKIGYKVAPKSSPLFQEFKIWQNLNSLLARYKETGEVKALEQDAKQILFEELNVKGNLSKEAILILLGYKPKEWELNFSTVEGNRTAQAFYETFFKMMELEGHDEVEWKELPVVEVKKIITSFFKVQQINAGILHFNAERDGKAFEQQASYQLWHLLYSYQEDDSKSGNEKLYDLLFRKFGFKQEFAQLLANMPLAEDYGSLSARAMRKIFPHIKEHTYDKACALAGYNHSSSLTKEENDKRPLKDKLELLPKNSLRNPVVEKILNQMVNVVNAIIADPALGKPDEIRIELARELKKNAKEREEMTTQINKATAEHEKIRQILIKEDGIKNPTRNDIIRYKLYQELKNNGYKTLYSNTYIPREKLFSKEFDIEHIIPRSLLFDDSFSNKTLCVRQENLDKGNKCAAEFIGPYFGEDKVQDYLGRIKMLYELNVKSPGEGINKAKYQKLLMKAADIGQGFIERDLRNSQYIAKKARTMLLEICRVVVPTTGSITDRLREDWGLVNVMQELNMDKYRKLGLTERIEKKDGGIKERILDWTKRNDHRHHAMDALTVAFTRRSHIQYLNHLNARKTDSPLGREIIAIEQKETEMVIDDTSTKKRKFKCPLPNLREEAKKHLENVLVSVKAKNKVVTKNKNRSKTRSGARVKTELTPRGQLHKETVYGKLRQYATKEEKVGAKFDEQLIAAVASEKYRKALAERLNQHGNDPKKAFTGKNSLDKNPIYLDGQKQAVVPEKVKLVWLEADYTIRKEITPDLKIDKVVDVGIRRLLQNRLDTFGGNAKEAFSNLDKNPIWLNEAKGIAIKRVTISGVKNAEALHIKKDHQGREIVDEKGNKIPVDFVSTGNNHHVAIYRDADGNLQDNVVSFYEAVERAVQGLPVVDKALNQDMGWQFLFSLKQNEYFVFPSTDFDPSEVDLLNPANYKIISPNLFRVQKFSKLSYGNSIVREYVFRHHLETTTDEKKELKDIAFKDIKSLPYLQGIIKVRINHIGQVVKVGE

SEQ ID NO: 6823 - protein, 1181 aa, unidentified
  REGION 1..1181: note = Description of Unknown: Cas Enzyme sequence
METKRILGLDTGTNSLGWALIDRTGDNCRLIARGVHIFPEGVKIEKGVESSKASERTGHRALRRAYYRRKLRKLRLLRILSDNGLCPTLSQPLLSAWRLRKIYPATDDFMSWQATDDIAGKNPYADRCDCLHRKLNLDTESDRYKLGRALYHIAQRRGFRSNRKSEGKDNEDGKVKSGIDELSKAIEREGCTYLAEYFLKLYQRGERIRTHYTSRDSHYLEEFKAICRKQELNPELTEKLEKAIFSQRPLKSQKTSVGKCPFEPSKTRCHVTHPDFEEFRMLQFINNIRIRTDFDSQPRPLSANERKAIIPLFMRKSKKTFDFGDIAKALIKKSGHAQFNYPSDLSVSGCPVTAALASIFGSDWQRGIAEVYVDAKDKSISQITDDIWHVLHFFENADKLRQFAIDKLQLNEKDATSFSKITMPEAYGSLSRKAISKMLPLLRKGLIYPHAALLANLGSVMPPYEWNIEPMREAAIDKIVHHLEAYDPKTTPGTLEKWLKDFLKETYLVTDEALKKLYHPSQIETYPKARPDNEGLVLLGSPRVSAIRNPMAMRSLHQIRHLVNALLRKGLVDETTEIHIEFARELNDSNTRQAIYRENRENEKERAKHAIAIAEHLGIDASDVSERDLLKYRLWTEQKGICLYTGNQIGIADLFGSNPKYDIEHTIPRSAGGDSTQENLTLCDARFNRETKKTRLPSELPNYAEIIERVKFMKEKADELTKRIRRLRTDPSMDKAKKDGTIQKRRSLELERRYWLGKYHRFEMESVPEGFSRRQGAGIGLISRYARLFLQSVFKRVDTVKGAATADFRQAWGIQEEHTPKSRVNHTHHLIDAIVIACIDVADYQKLATAYRRDGYHDREKVFLPLPWSTFKEDIQQIQLSTLVSSDTPDNMHKRGRRRIGDKIHTCDAARASLHRDTFYGAIKCNGTIEYTISKLLSKLKKEDIEKIIDPVVREKVRDAVTRLGFKEAMASTIWMNEEKRIPIKKVRCYAKHVKHPIFIRKLRDISSKDYRRHHHVEPGENSKYALAIYAGKDAKGKEKRTFTIINNLEAATHYAAKGRGMDNTAFIPQTSPQGLPLLCILKKGTKVLLYEDSPEELWQASPNELQRRLYIVTGFSSEGKTTLVHNQEARPADELQITYGRFAEDSEFRSKMSLRHSQLKALVEGQHFTLDILGNISFIK

SEQ ID NO: 6824 - protein, 1015 aa, unidentified
  REGION 1..1015: note = Description of Unknown: Cas Enzyme sequence
MATMRYRLALDLGATSLGWAMVRLDAENSPCAVIKAGVRIFSDGRNPKDGSSLAVTRRDARAMRRRRDRLLKRKARMTLSLIEHGFFPLGEAERKALVTLNPYLLRAKGLDEALNPAEFARALFHINQRRGFKSNRKTDKKDHDGGALKQAISKLRLALKEEKCRTVGEWLHKRDFAGETVRARYRQTKIVKDDGKARIEKSYDLYIDRSMIEDEFDALWAKQAALNPTLFNDNARDDLRDVLLHQRPLKPVKPGRCTLMPEEERAPLALPSTQRFRMYQEVNNLRVLRDGLKEAALTLQQRDDLVAALETSSKRSFTQIKKLLGLGGAVQFNFEDPKRQELKGNTTSAVLSKDDLFGKAWFAFNEAKQDSIVLQLVKEENEAKLVRWLQVETGIEEHRAEAIANAGLPEGYGSLSTKALARILPELRRDVVTYDKAVIAAGFEHHSNISPAATGEILQELPYYGMALQRHVGFGSGIPEDKDEKRYGKIANPTVHIGLNQVRLVVNALIKRYGHPSEVIVELARDLKQSKEQRDDENKRQAENQRRNARLRADIASVLNISPERVHAADIQKMILWEELSDNVADRRCPYSGVQISAAMLLSAQVEIEHILPFSETLDDSLNNKTVSLRQANRIKGNRTPAQAKDDFAAQGWSNASMLERAEGMPKAKRYRFAEDGIEQWRKDSDFLARALNDTRHLSKVAREYLSLVCPQNTRVIPGRMTAMLRARFGLNDVLGVGGLKNRNDHRHHAVDASVIAVTDQGLLQRFAHASASAREKQLNRLVESMPLPWDSYRDHVQRAIERIWVSHKPDHGHEGAMHNDTAYGLLGKGRVRVHKMVDGKRERFEDNLKVIEMTNAKATARHGLLPNGEPRPYKGYKGDSNYCIEIVRNEKGKWDGEVISTFEAYQLVREHGLGRLRNSSVSLSGKSLVMRLMIDDAVRLEVEGKQRTMRVATLSGNGQVFMADAHEANVDSRNRDKSNAFAYVSKTAGSFHKAKARRVTISPIGELHDPGFRG

SEQ ID NO: 6825 - protein, 989 aa, unidentified
  REGION 1..989: note = Description of Unknown: Cas Enzyme sequence
AALELNDSNAPISILDTGVRIFSDGRNPKNKEPLAVKRRIARGMRRRRDRFLRRKEVLLKYITKCGLFPILKDEREGLKSLDPYELRKQALDNKLEPFELGRALYHLNQRRGFKSNRKESSKGESKINKPKIVKLGDDLALSKSRTLGEFLFNRLSLRSPIRFRAELGLYPDREMYQHEFQEIRKIQEPIQQLTKEQWDKIHSIIFYQRPLKSKKLDIGRCSQFPDEIRAPKASVTFQRYRLLSDLSALRIMDDQGFARDLPKDIKNKIYQELKGKKKLTFDAVRKLISADSTLKFNLEHSKKKDLIGDNVWNILPKEVRKVLEAKELEELDGIIEILTEAENEEEIKQTLKVKGITEDVIQKLCELGWEDFPSGYAHLSFKAMRGAIAIMEEHFCSTTEAFLALKGSDIEKRQMLNDLPYYGEVLISSVTGGTESGKTPEEKFGKIANPTVHIVLNQLRKLVNALVKEYGKPTQAVIEVTRELKLSREAKAELTKKQNENEKRNEIIIQKIKDLGIASPSREDITKFKLWEELSKDPNNRCCPYNPEKKISAAMIMTDAVEVEHILPFSMTLDDAMANKTVALRESNRLKGNRTPYDAFKDDPDRYARIHNYVMDNGGMPLNKRWRFMPEAMEKFNKENGFIARQLNDTAYISKIAKKYIEFIVPEVWTIPGRLTALTRHSLGLNSILSNGDFKNRGHHGHHAVDAVILALQSQGYLQRAAKLNEKGNSDKIQMPEPWNNFLQEANKKIHEIVISHREDHGKEAAFHEETYYGELKNPSEDQISKGYNLVIRKSVFDLKEKQADAIKDPGLRKKAIQAVQLERWNDFLGILNKQGVKKLRVLDKNASAKKIIHGQGNQHYKMVIPDGNHSLDVWKCPNGEIKFTTQTFFDVNKNTIPEKPHPAAKKLFRLHKGDAVRLQKGGHDSLMIVKTIRPSGELIGIVPHASVMGGDDVTMWQMFNKFKKDKLRKVQVTILGGVVDPLKEIWNE

SEQ ID NO: 6826 - protein, 1027 aa, unidentified
  REGION 1..1027: note = Description of Unknown: Cas Enzyme sequence
MNYRLALDLGTTSLGWAMIRLNDNKEPTAIIKAGVRIFSDGRNPKDGSSLAVTRRDARSMRRRRDRLLKRKARMMRTLIEYGFFPQDATERKALELLNPYALRAKGLDEALTPAEFARALFHINQRRGFRSNRKTDKGASDAGALKSAISQLRTAILEQNCRTVGELLHKRFTNPDILPKDRTVRARYREKRVTTDAGKAKIEKSYDLYIDRKTIKDEFDALWAKQAQLNPTQFTENARADLKDVLLHQRPLRPVKPGRCTLEPDEERAPLALPSVQRARMYQEVNHLRILGESLHEQVLSLAQRDDLITALEANSKRTFTQIKKLLGLGGAAQFNFEDPKRQELKGNTTSAILSGDKYFGKAWFNFTEAIQDEIVTQIVKEESESVLIRWLCEQTRVDEETAERIANVGLPEGYGSLSAKALAKILPELRRDVITYDKAVLAAGYAHHSHLNPSKVTGEILPSLPYYGEPLQRFVGFGTNNPSDTDEKRYGRIANPTVHVGLNQVRTVVNALIKRYGHPSEVIVEVARDLKQSREQREEESKRQALNQKRNERIRRDIANAKFNGNEYLVKHADIQKWILWEELSFDPVKRLCPYSGRQISVDMLFTDQVEIEHILPFSMTLDDSLNNKTVSMRSANRDKDNRTPWQAFGEREVQGYDYAAILQRAELMPKGKRYRFGADGYQQWLREDKDFLARALNDTRYLSRVAKEYLTLICPQNTRVIPGQMTALLRAKFGLNDILGLEGVKNRNDHRHHAIDACVIGVTDQGLLQRFATASATTREKQMDKLVEKMPDPWPTYREHVKRAIGHIYVSHKPDHSHEGAMHEETAWGLRDDGVTTRRVRNSETGYREREYKTRSVITFNSTRDLNRHGLDENGQVKSYKGYVGGSNFCMDIVKNAKGKWEGEIVSTFTAYQIMREHGREKGLAILRSRTTSISGKQLVMRLQNGDIVKMMVDERWCLMRVVKMGANGQMFFAEHNEANVSERNLSKDDSFSYISKMAGSLQNTKARRITISPIGEVNDSGFKE

SEQ ID NO: 6827 - protein, 1207 aa, unidentified
  REGION 1..1207: note = Description of Unknown: Cas Enzyme sequence
MHYTISLDTGTNSIGFTLLDNNNTLLELGVDTFPMGNKEEKGIEKSRSAERRGYRGARRNRFRYHLRRAQLKTFLQPLGMIPDWSEKITAFDLYRTRKEAVEQQITLQELGRILFLFNKYRGFKSSRKEVGKDPEKEKEEGAIQSEISWLKNRMSVHNCKTVGHYFFKMFEKSHELQQRGEWHNPDEPYDERGLDGAEKFSLVNSRGIRREGRHLERALIEAEFDLIWQKQRTFYPTILTDTNYHQIKNRCIFYQRPLKSPKKFIGKCSYEKSKPCAPLSSLPFQEFRLLKQLLDIRITDEKNPQVFNVPLDDEQRGMLFEELNNRKSLSFSDAKKLLQLPKNVKFNTDELGKDLIGNKTRAFLRQALGETLFQDIEQQGQLEKLWHVIYMHQDEAWLREKLAQKWKFSPDIIDTIIEIYLEEGYGSYSTTVLQKLLPELRKGVHERDALKKAGYEVEQNAANRPLKPRISELKNNELRNPVVEKATMRVIRLVNQLIKKYNINPEQLTIRVESTRELKKPKQERQKIRNQNLDTEKRRKEYAAFLTKYGKFGIVYPNSAVINKFELWLELGENQENLKDFQKFILDSKDFDLHFEKYRLWLEQGMKCPYTFKTIPLADLMSPEIEIEHIVPYSRSMDNSFVNKTLCFTEANKQKSNSTAFEFMRDKGPGTLIAFKEHIKKVFAKSPEKQKRFLQEEVPPSFRPDQLTNTSYIARQIRSKLQEVSRDVQFTTGAATSELRRIWRIGSLLEEVMYEETTGIEMWRHFANRTDENNRTEIENFKQWQAQFGKGKNRSDHRHHALDALVIGFCTPAIVQQISTFHRVREELKIANADHDGLLFSKELEYRLPRLPIQKSSIREALKRILVASQVNQRLLVAQQNHSKKKGGQHTQAVQSLRGALFKETFFGKIQKPHPNAFDKHEVFVTRKALTPELIKSSKDLEKIVDVQIREILKRRLAQYGDRGDKAFSEEEMRRNPVYMYSLNDYPNHSANPSSKKGNTLPVIKKVRTISKNVRSFVAIPAKDADGVIVASNRYAEKNENYIMAFYQLLTTNKKGKTKHVCDFKLLSTVEAVRKRQQGEPLFADELTNEKGETLPLNPLCPNLKKGDFVVFYEKTPDEIQWNDPEDLSKRLYQATGLSEGIKSKIYPFGYVSFAKHNHARYNASYESKEFSLGESMPFLIMSHIQLKAVKVKVSQLGEVTPLSLSI

SEQ ID NO: 6828 - protein, 1455 aa, unidentified
  REGION 1..1455: note = Description of Unknown: Cas Enzyme sequence
MSKTIAYDLGTNSIGWSIREDQKEGNQILNAGVITFNKGVGEEKNIEYSLAASRTGRRSLRRRYQSHKYKLWSTLEILIINGYCPMTIEQLDQWRKYTKGIGRNYPTNAVLFNNWIKLDFNNDGKPDYTSPYELRSELINQKLDFTIEENKHKLGRALYHIAQHRAFKSSKKVQSDDSKEVKKEITDEDLIGAESKKVETFTKIILSFGIEIKETVGATFYEAEKKGIRIRENLHQYVVRKQLQQEVKSIFDFQVLSFNDLFGKEIAKSSVFWNRPLRSQKGTIGKCTLEPSKYRCSVSHPDFEFFRAWSFLNNIKFRNKQENDSQWTKLPLEIKEAIYQKLFLGRLKADFEFSEIIDFVEKYNQHRNWDLNYKAKTNVAASPVSARLQAIFGENWKSFTHKTAKTRINKKGIAHNITYTIEDIWHILFSYDDEEEVERFASENLELNDKQTKSLLLLWLKMPVAYGMLSITAIKNINIFLQKGLIYTEAVLLARIPSLLKEIWSLENEAFLIREISSVIDTNREEKKDIAIVNNLIAKYKSLELEEQFGYKNIQYKLDSSDKNDVLETCIENYGKKTWEGLNENSKELKIKKINDLYQDFFSNSKRDYFKSPHLLDTLKLFLDNNFDLSKNALDKLYHPSQIEIYPPAKEQYYKHLEQSLTLLDSPKTGAFKNPMAMRTLFELRKLTNYLIITGQIEQETRVVVEVARELNNANMRWAIEHYQNRRREENKEFALAIVEILEEFPNSKANPESNEDIDKFRLWLEQIEDDTINDGKSEYAKYEWANTKSKVYKAVSSAKEMIDKYRLWREQSCKCMYTGRPINMFDLFSENNTDFEHTIPRSISFDNSLANLTVCDFAYNRTVKKNKLPTSLENYENDATINGKYYTAIKPRLIDWEKKVESIKNNIEFWKKKSKQASDKEFKDKAIRQKHLWKMDLDYWQNKLNRFTTEEVTTGFKNSQLVDTQLISKYAFHYLKTVFNRVEVQKGSVTAEFRKIFGVQDPNVKKSRDSHSHHAKDAAILTLIPTANKREEILKKAYSYYESNFKQYTESPYKGFSRNHIDEINDTTLINNVINDQKVTPANKKVRASGKIVYFKDENGNKIIDEKGKPIAKYAKGDSIRGQLHKETFLGAVKLLKKDENGKAIRNENGNFILEDTKYVTRKPLVFKKNADSPGFAKLEEIEKCIVDKNLFQIIKKQVETAGGFKEALTNPDGVWMYSTEKRDKGGKVVKNAEKINRIRHIRVFTADKNPPIIKKQTNQTEKPIIFLENRDHKQNYYATSGDGYLYLFYEGAVKGKLERDYECFSLLQVSKLNKVKATTLEDLFPKTKTVKKTEIPLRAILKSGQKVFFFEEDMEELKDIPKNELMKRLYRITSFKDDGRIYLKYHLEARQDSKITKIASKGDKAGKAVLDDGSSSVDFENPFPKLFISKANFNFAIENEDFIINPDSTIKWL

SEQ ID NO: 6829 - protein, 942 aa, unidentified
  REGION 1..942: note = Description of Unknown: Cas Enzyme sequence
QRMKGIKKLFIDTLSLSHKDLFIGDIDETIYSKQGRLDVWELRAEAVKRSLTAEEFARVLTHIAKRRGYKSNRKVDEKGDSEGKKVLGAIENNLSLLENYETIGQAIYETTKDTGIRRNKKDDYLHSVSREMLLDEVNVVFKKQQAFKNTLATDVLKDAYIEIAFSQRDFASVDGMIGKCTFEKDELRAAKRTYSAEEFVTLTKLINTKVVLEDGSERGLTEEELEKILLLCKQSEKPSYIKIKDTIGLESTSSFKNIEDYEINKETGEFLKNKTRKFVSAFKGYHELRRVVEKSLSKTHWHNIAQDTKLLDEIGTIFSVHKSDEKIKEALDTLTFSMLTDDEVIKLKESLITSISFDQFIYLSLKALGKILPFMREGKRYDEAVASVGYKKEVGTQQKFLRALNKAEQNELTNPVVKRAIAQTRKVINALIREYGQFDKVHIELTREIKKSHKDRNEIKKGQEKYQKFKEEVVQDFVKLFGREPKGAELLKFRLWKEQNGYCAYSGFMGESGYIKPEKLISDVKYAEIDHILPYSRSLDDGLNNKVLCLAKENQDKKNMTPFEYFESIGRDWYAYEVHVNAMKGIKRVKRQRLLKKNFDENSENEFRERNIRDTAYMARYIKSFIEENLELTSSSKKKVVSINGTLTNMLRHNWGVGNKSRDTHLHHAVDAIIIAFATDSEVQRLSTLSAKRDGLVYEKSEEKSKKFRFLPPMENLRDEVQKSIDEIFVSSAPRRKVTGSAHEATIYSSKTFIANKRSDKPSILTESAKLKVVKLNDGKNLAKNESMPRVDIFQHKTNKKYYVVPLYVSDFVKKVLPNKAIVQGKTKEGTPKEWLEMDENYEFRFSLFKDELVEVQTKQTASKEAKNVLGYFVAADSGTAKLIFKNHDNSENDLFKRNSTNSCEVGLGIQNAEYVKKYQIDTLGNRHEIKQEQRIMTKKSK

SEQ ID NO: 6830 - protein, 1066 aa, unidentified
  REGION 1..1066: note = Description of Unknown: Cas Enzyme sequence
MASGQKSQLGIHLDVGHDSIGWCVTRTWPGNEHFLTIPGTGVVLFPADDCLANQRRAFRRQRRHIRATRQRIERMKAVLFDMGVMTEAELKRNLTAAPWKLAAQVLTTGKPLSWPELWAVLRWYAHNRGYDGNVLSSLRSGRIVSAEDVEKNAAARELMAKYGTSSMAETMCNYMKIEPDGKIIASRERFKGLGVSFDRSCVEDEVRRILFTHKGVLKGVDDAFIQLLMASPVTEPHYLRTVEKLPFHIPNRYWGGILFGQLAPRFDNRLIGDCPITGEKLPNKSTSEFLRFRFAMMLAHVRVGADSRPLTADERGRIFEAAGRCGGFTKGSFKKIVGETTGEDVTNIDALLTAPEADKSLVLYPGLFALAKKGLDAFLDSHTLRALANKLFRGKLMTLGDVVALISADKREAAKEALAKGKGTRRGKKKTSDPLKETIVADLPSGRAPYARSILVKATEAVLRGEDPMTKGGVLYRDATKEDVLKESEIDRETNNHLIRHRVKILLRLLRDIVHDYAENNPAQVSQVTIEMARDLKDLSGMTNKQIDIEMRLKTAHHRKAAEKLAELLHCDMADVSAGLIRKMRIAEDLDFTCPYTGWKFDPMDVVHKNVDLDHILPRSQRAADSLDSMVLTFTEVNRMKGARTGLEFVREFGGQRVKGRNNLVVFDEKRYRDFVDALRIDRYADDKKRQKRRQEKLLKLHSEDVGMTEGMLTRTSYITTLASKAIRGFFANCGRTPRIISVPGRVTAELRMQWNILGLLAESDPRVKDENGRLRLKQEIRSITHMHHAVDAITLGLAATLLPADGVLWAMMCKRRVKDEEKRILASTGVFQFSAQDEPRLIELPDFLRREISAALAEQRVVVHQPQERAGLKVQQNTWGVEKIEDGFVYVRQRSRDEKTGKITIKHDCVPLEKAFGASPIKGEGKLKNIKGVLLPDVNFGVTLLKNPKFIRHQRVWDELALVKKEYNGKMPPIVRRGGLIRVLAGNFAGVWRVASVKDNTSGIAVDIVRPNAVKVQNGVDYAKINVRLSSLLKAGLEVVSQTYTGVALCPITSSTSQQMEFRSR

SEQ ID NO: 6831 - protein, 1195 aa, unidentified
  REGION 1..1195: note = Description of Unknown: Cas Enzyme sequence
MKNKKPFFLGLDIGTDSVGYAVTDKEYNLMKYAGEPAWGVTVFDAASLKADRRAFRTARRRLDRRQQRVALVQELFAEEIAKVDTSFFRNLKASALFREDAGCPYPLFNDDGFTDKDYYDRYPTIHHLIIDLMNNSQPHDIRLVYLAVSWLVAHRGHFLSNIGTDNLSDIKDFSSVYTSFINYFNDNDILVPWGEVDVDALADALKKKCGVNAKNKELTAILYGGKKPVTDEEYPFDKASIVKLFAGGKVTLKDLFRNEGYAEFGSVTLSADDETIAELAGNIGDDCDLIYSMRAVYDWTVLVDVLAGSSTISEAKVAVYDKHKDDLAKLKDLFAKYLSKQKYKEVFSDGKQKANYVAYTQHASDDKEIQGTANKEDFCKYLLGFVAKITPKPADVELYEYIKTELENRTFLPKQKNTDNRVIPHQLYEYELCEILKVAENYLPFLKTTEDGITVSEKLVSIFRFRIPYFVGPLNKDSQYAWLERVPGKIYPWNFERMVDLDASEQNFIQRMTNTCTYLPGEPVLPKDSLLYHKFSVLNEINNLKINDIPIAVELKQRIYNEVFLQKKKVTRKYLCNWLIANGFIAKGAEDTVTGIDININSSLTSQIAFKSLLEREVLTEAQAEEIIERSTFAEDKTRLSRWLMKNYPTLSEDDRKYICNLKLKDFGRLSRRFLTEIYGVVDRSTGETSNIITAMWETNHNLMELLSEKFTFREMIDAAVAEYYGTKKISVNQRLDDMYISNAVKRPVFRTLAIVNDVKKAFGTPEKIFIEMTRGATEEQKNKRTQTRKDRILELYAKCRDEDVRDLQASLEAMGDYANNRLQSEKLFLYYMQLGKCMYTGKAIDLEKLGTKEYDVDHIYPQAFVKDDSILNNKVLVLSEENGKKSNIYPISADVRHTMHSFWTMLYNQGLITEEKYKRLTRATAFTEEEKLGFISRQLVETSQSTKAVAELLKEKFPDTEIVYVKARLTSDFRQEFDLLKSRSFNELHHAQDAYLNIVTGNVYNMKFTRRWFNVNSDYSIKTKTLFSHPLSVNGETVWSGEEMLTKVKKTAVKNTAHFTILSHYKNGGLFDQMPIEAAEGLVPRKADLPTEKYGGYNKSSAMFFIPVKYSVKKKTDIIIMTVEMRVGKKFLADEKYAESYTFERLQHILGKPVDSITFPLGLKPWKVNTVLSLDGFKVCITGGAGGGAKLILS

SEQ ID NO: 6832 - protein, 1355 aa, unidentified
  REGION 1..1355: note = Description of Unknown: Cas Enzyme sequence
MSNKILGIDLGTNSIGLSVRNPELSGQVSNQLEYFTSIIFPSGVGTNQSGEFSYAAERTKHRSARRLNQARRYRIWKTLEVLIQHQLCPLSIEELDQWRTYDKNKGLKREYPVHALRFEQWVRLDINGDGLVDYTSPYQLRAELMSRQLDFSQENERYRLGRALYHIAQRRGFKSSKGETLQEQEDVAKGEDMDIATAMKQSEEKKSKDLVAYMEENHCKTVGCAFYQMECAGIRVRANEKYQATRSLYEDEIKQIFAYQEALQDKDQLLQTILSRKKGEGSIFYKRPLRSQKSAVGKCTFEPTKSRCPISRPEFEIYRAWSIINTLRYKTKEDGDQSAARELALELRKSLFEERFANLARDSFKMDDILKWLQKKNTEVTAINYDSKVSVMGCPVLYRLKMMLGEDWLTARLNKHYNYEDLWHVCFTADDNEEVEEFVKNHLNGVPELMKKMLALNGKIKTDYASLSLKAIRNITFFLEKGYLYNEAVVLAKLPEIFGDNWAEVESVILKEWNGISIHQQKQRSCYKIVNTLIAQDKLAEPEERTAFHDTTYLLTESDRKAVTRAIIDTMSYKAWKAMNREEQADFQAQVEEAYQNYFRQEKRTYYEIENQSQALERLLRDNFREYMVGSSFHKLEQGGVLYHPSMVDIYPAVRYTQYIDERGLVSKKMVQSPKTDVFRNPMVMRVLHTLRGHINRLIKENIIDEETRIVIETARELNDANQRWAIQSYQEKRREENKKYREQLLAYLPEDKIKDTDIEKVRLWEEQGKRCLYTGEVIGLSDLLNDNQYEVEHTLPRSKSFDDSLANKTICQTHFNRYIKKNRCPKDLGDMYYPAIEERLKPWDNKIASLKKQIIERSNKAKSASTKEQKDRMIRERHVLEMELHYWMDKVGRFKKSEDDLNLGFRHSQLSDTRIITKYAYHLLRATFDHVSVQRGEMTADFRKALGIQSIEEKKDRSKHSHHAIDAAILTLIPANNLRDRLLELFYQKEESEKLGQDTTWIEKEYAKCLKSCNIHGVEELPTFIEGHILIQYQVKDQALVPSSKKVRVRGKVVKKRDKELFQRGETIRGQLHKQTWYGAIAEPQTDEQGRLIRDTKGHFLTTGKINYVVRVDLKYKKSSTDSGFKTWEELGKVMVDQSLFEYMKKEYPDLEFKDAIEKGLVDKQGKKIRHIRCYTRLASPLEVKKHTHLSEKDYKQFYYADGGEIYVMAKYVSEPQDIYYVVYSLFDVSKNRKENREDIPRNVSYKGKLYHLDSCMHKGQQMLLYREHEDEIRGLPSEVLSRHLYVINRIESDGRIRLIHHLSAKTDKELGNGESIKDYEHLPKKIRCGINGLHYLLEGKDFCITPKGIEFEW

SEQ ID NO: 6833 - protein, 1069 aa, unidentified
  REGION 1..1069: note = Description of Unknown: Cas Enzyme sequence
MRKFRFVLGLDFGVQSIGWAVLPLNPLEIELLKLGVHCFESGTGSEADIEKGSDESRNTARRMARAARRSLQRRSRRMIHLAIELQRLGLLPVCRMRDPEKRNLMFQELDQRLAVFCPVDDRRMAHLLPYILRAKGLDQRLPEHAIGRALYHLAIRRGFLSNRKAQGADDEEGTVKEGIRTLEEEIKVAGCRTLGEYFSTLDPEETRVRKRWTSRQMHEDEFNLLWDSQAKFYPETMTGAAKKRIHRAIFFQRPLKSQRFRLGKCQLEPNCRRAPTASLEMQRFRYWQKILDLTYSFGESVEEIELTRAQQDLLAETLENTDSLTFKAVAKLLGFKPAQQVKFNLERGGEKSLRGNSTSSRLAKALPDRWPKMSEAEKKTLVDEILQYQSESGLQKRLETAFGFQPGEAAAVAATRLEGDYGNLSRRAISKLLPLMIENEKRIHFKEAEKALYPQSSKVGEVLDFLPPLCAEKGAVLTNPVVTRALTELRKVVNAIIRKYGKPERIVVELARDLKRSRKEREAASKKMRDQETKRSKARTKIIKEVHIQEPTHTDILKVLLAEECDCKCPYTGKTISMESLFGAHPQFDIEHIIPFSRSMDDSYMNKTLCEADENRHVKKNQTPFEAYSHDATRWHEILTRIQTPKFPKAKQERFLMERVPDDFSSRMLNDTRYISRQATTYLGKLYGGQIELPDEEGETGRRRIFTCAGQATAWLRDEWGLNGILNDGGDRKNRNDHRHHAVDALAIAYCNPTIMEQFSRAAQLAENLGISRRFARGKVEPPCANFLKIVRKAVDQINISYRSDRKVSGKLHADTFYSKPYLKVNAQGKLQEYRHKRIPLFKLTEGNIKNIVDSGIQKIIQKCLDAMGNEKFENKVKKFQSESNLPFREVTSKSGEKRRILIKKVRINEANATFSVGHGPTLRNVVSDGNHHAEIVATLDSQGNEVRWTGHVVTLFEAVQRRKQGKPVIQRDHGPGKLFKFSLAINEYLLLTKPGSEPKLYRVTSLEKDGRINVKFHTDASTLTDKTKTNEERKFQRNASRLNINKDLRGNAQKVTVDYLGEIHPAND

SEQ ID NO: 6834 - protein, 1371 aa, unidentified
  REGION 1..1371: note = Description of Unknown: Cas Enzyme sequence
MENKNYFVGLDIGTDSVGYAVTDTTSSYNLLKYSGEPMWGVNLFDEAEHCKQRRIVRTARRRLDRRQQRVKLTQELFAKEISKVDSNFYRRISESGLLRSDSAEPYCLFNDKSFSDKDYHKKYPTIHHLICDLMNNKEPHDVRLVYIACAWLVAHRGHFLSDVSIDNVSELHDLLPAYNGLMNYFKEYPFDGDYSDPWTLNDSGIQQFGNILKQHGVSKKKQDLSMLLFNAKRPAKEYMDGEVFPFNVKCIVELLSGGTGISLSELFNNADYEGMDKISLVAKDEDFEAALQNLGDDGELLLRLKAVYDWSVLNDLLSGNQYISESKVDIYDKHKSDLRQLKSLVKKYYDDKTYNQIFRKIEKNNYVSYSGKIKSTDDGYSEFEKCNIADFNLFLKSTLQLGDENKKNKLPVEFVQRILDGVFMPKQVNGDNRVIPYQLYYVEMKKLLGTASSYLPFLSDKDNTGLTIAEKLLSIMKFRVPYYVGPLNKHNNEHAWIERKAEGRIYPWNFEDLVDLDKSEQMFINRMTNTCTYLAGEDVLPKKSFLYEKFEVLNEINNIKIQGKDIPVHLKQALYNEVFLTKKRVSLSAIKKHFRLHNVSEEDVETISGIDKDIKSSLSSRIAFDRLLESKTIGYSDAEAIIKRKTFSEDNNRFKKWLKSNYAHLSQDDVKYISSLSIKEFGNLSEKLISGIKGNKIDFSTGELLGEPKTIIELMWENNVNLSELVLSDAYSFKGTIIAENKLYYSEHKATLSERLDEMYVSNSVKRPIIRTLEIINDVVKANNGTHPAKIFVEMARGTKEDLKGKRTKTRKQQILELYEKVKGEDVRELKKKLDEYGDEADNKLQSDRLFLYYLQLGKSMYSGETIDIEKLSEKIYDVDHIYPQSFVKDDSVINNKVLVLSTENGAKDNVYPISSEIRSKMKPIWDMLLANGLMSEEKHKRLTRSTPFTEEEEWEFINRQLVETRQSTRVVAELLQEKYPNTEIVYVKAGLVSDFRQNYDISKSRAINDLHHAKDAYLNIVCGNVYHSKFTKKWFLDNWQSKNFTTSGKALFNHSQTVDGICVWDGEKSLSQVKSNVQKNNCHMTFFSFMKKHGQNGGFFDQNPIKAVKAPTVSRKTGLDTSKYGGYDGLTTSFLLLAKYKLGKKYVKEFIPVVLLEADKVQNDNKYALEYVKRRLDSKAEDVSLLLDGRPIKIGTVIEVDGLRMLVGGQGSKNDGRIGFKVFTPLVLSYADEKYVKTIESFKNKISRNDKLLYSKEYDTVNKEENAHLYSILQEKMQSRLYLNRPENQVEKLKNNRGIFDASDEKTQCSILLNIISQFNRAALADTQLKIANVCRLNPKLSNWGYSNVRIIDSSASGIWEKQSDNLIVL

SEQ ID NO: 6835 - protein, 1104 aa, unidentified
  REGION 1..1104: note = Description of Unknown: Cas Enzyme sequence
MGNIFAFDLGIASVGWAVVDVETGDVKETGVNIFPEASAAENVKRREFRQGKRLKRRLRTRLDDFVKLWDSCGFEVPNQPMVDIVDLKVKALVDPITKDQLFYVLYNELKHRGISYLEDAADDKESATGAYAKGLQYNQSELTDKYSCQIQKERLAGYGKFHGQNEVIIDGEKITINNVFTIGSYRKEIIRILETQQKQDSSITDEFVAGYLLIFNRKRKYYEGPGNEKSRTDYGIYTSKIDPETGEYITDKNLFEKLIGKCSIYPDELRAAGASYTAQEFNLLNDLNNLTINGRKLEEAEKHSIVDTVKASDSVNLRKIITKTIGENIEQMTGARIDKNNKEIFSTFTAYNKMRKALAKIDVDITSIDREQLDEIGYILTINTDKESILEAFSNSSLSLTTEVAECLINIRKSDSSLFSKWQSLSLKIMNELIPEMYEQPKEQMTLLTEMGFFGSKESEYQGLKYIPVDTDSEELLNPVVRRTVRIAYRVVNALLKKYGNPTMIVLEMPRDRNSEEEKKRIKDSQKKNEQEKTFIDNKLNNLNVKICLADYSEQKNLSLKLKLWNEQDGVCLYSGKTINPQDIIDHPEMFEIDHIIPRSISFDDSRSNKVLVYRNENQNKGNNTPYHYLKSAHADWTLSQFTAFVMQLSKKKEYAISRKKVQNLLFDKNITKIDVLQGFISGNLNDTRYASRVVLNTLQSFFKANSSETKIKVINGNYTHQMRVNMKLDKNREESFSHHAVDAMLIAYSQMGYQAYKKLQDGFIDFETGEILDQRMWDEKMSDDVYKDYLYGKKWSEIRKHITESEKRVKYWFLIDKKANRGLCNQTIRGTREYEGKTYKINKFDIRSKDGAKVFQKLAFDEKERERLLVYKNDRQTFNILVDIWQQYSGDKVQNPFVQYEKETGDYVRKYAQKHNGPKIECLKYTDGEVGACIDISHKYGYEKNSKKVILESGISYRTDVYYKEEKQYYLVGIKQSHIKCKDGKYQIDEESYSENLLNERMISAGQTRLDLQALGYEYCFSLYKNDLLNYEKDGKEYTERFLSRTMPAKRNYIETKPVISMNYKDNHRNYVGLAKTTKIVKIKVDILGNRYRCTHEDFPVFC

SEQ ID NO: 6836 - protein, 1161 aa, unidentified
  REGION 1..1161: note = Description of Unknown: Cas Enzyme sequence
MSKKILGLDLGVGSIGWALIETENNQPSQILGMGSRIVPISNDDSDQFQRGQAITKNADRTQRRTARKGYDRYQLRRALLTQVLRDNGKLPERMDEYVIDLWKLRAEAATEGHQLTLPQIGRVLYHINQKRGYKHSKADASADAKQTKYVQEVNQRYKDIQDKGLTIGQYFYAELQSSMVKAENGVYYTFRIKDKVFPRQAYLAEFDQIMAVQKAYYPDVLTEELIDTLRNRIIFYQRPLKSCKHLVSLCEFEMRPYKKADGSIIYSGPRCAPRTSPLAQLCAIWETVNNIKLTNKNNEEYLFSPEQRQAMVAFLQTHKEMKVTDLQKILGISKKDGWWGGKAIGKGIKGNQTLVQLREALAGQHEDLLRMDIATTDAGLVDVETGEVIEMVDAKVEQEPLFRLWHVVYSIQDKDELRKALLKQFGINDETILERLFNIDFVKPGYANKSHKFIRKILPYLMQGDMYSTACARVGINHSNSRTKEELAQRPLVDKIALLQKNALRQPVIEKILNQMINIVNALKDRYGEIDEVRVELARELKQNKEERESTFKNNTKNERLNKEIVARIQEMGIRPSRARIQKYKMWEESQHQCFYCGKVVSATEFLAGADVEVEHIIPRSVLFDDSFSNKVCACRECNSAKNNMTALDFMQTKPAAELEAYKARVDEAFQTHRISKTKRDHLLWHMEDIPQDFIDRQLRQSQYIATKAVEILQTAIRNVYATSGSVTDFLRHQWGYDTVLQHLNLPRYQQVEGMTELVTYDHCGQEHTEERIKDWSKRLDHRHHAVDALTIALTKQSYIQRLNTLNASREVLYQEWNESGAQTADKEKRTLLENWVSIQPHFDVQTVENQVSGILVSFRAGKRVTTPAKRAVYRGGKRVTVQQGLLVPRGALTEETVYGKLGDKFVVKYPLNHPSMKAEDIVDSTIRELVQARLAAFGNDAKKAFAMPLYSDRAQTMEIKSVRCYTGLQDKAMAEVRYNEQGQAIGFAKTGNNHHIAIYKDAQGQYQENVVSFWHAVERKRYGLPVVIDNPHAVWDILIDKNLPQDFMEKVPHDDWQFVTSLQVNEMFILGMDDLDFEMAIENEDYAALHKYLYRVQKVSSNDYYFRFHTETNVDDKYDRVKNLAKSKELKKVIWAGTNSLMNKNPHKVKITVLGQISLQ

SEQ ID NO: 6837 - protein, 1052 aa, unidentified
  REGION 1..1052: note = Description of Unknown: Cas Enzyme sequence
MERILGLDPGTNSIGIAVRDTSVGGDFCDQLVYFNSCIFKSGVGKDKSGEFSFAAQRTGFRSQRSRLRALRNRRYSTLKVLIEGRFCPLTMDELARWYHYDKNAEIHREYPSGSVSFEQWIRLDFNSDGIPDYRSPFHLRAELVSRRLDLEDLVERYKLGRAIYHFVFHRGFKSSKGETLKEQEESGEALDVTALKKSEEKRSGRLVEYMTAKSLPTVGCACASLLDEGIRVRGSEYQPVRAMLKEELRKILAFQGFVETDNLWQTVLGEKKGVGTVFYKRPLKSQRSNVGHCKLEPDRRRCPQSHPEFEMFNAWTLINNIRIRESEADEWKEIPIGTKRELFDAKFMRLRDSFDFGEICDWLKKKNGAGVVYSKKAGTINFDDRKTVLCCPVCARLKRMLGDDWQTWKFESTVCRAVYRKDGTATEHTVSYNYEDLWHICFSSDESDDVLAFAREKLNWTEEKAMELVRMWFGMRDGYANLSLKAIRKINLFLREGVIYPYAVLMAKVPDIVGLDVFDCRREEIFNALKSVYDDIRQTRLLFEIVNVLISDYKSLDVKEQFAFRNTGYRLDDDDMRDVRLCCERVIGENTWLSKYSGAEREAIVASVAGYYQKFFESGKRDYYRIPRAEIQFEEWLKNEFPERSRSVRLYHPSMIDVYAPAKDLKSSGAGSNVRQLGSPSIDSIRNPMVMRVMYTMRKELNGLLLQGVIDEHTSVMVEMARELNDANMRWAIEMYQRKRENENKEYRGKLEEIYPGRNITEEDVKRYRFWEEQNGICLYTKERISAARLLDGASYDIEHTLPRSRSFDDSQVNQTLCSSYYNRQKKCNRMPCELENYDEILESIRPWIDKVEKVKDELKFWKLKSRKASDKGYKDKCIRQRHLLELELAYWQGKVSRFTMTDIPQGFRNSQLNDTRIISKYLYHYLRTVFEHVEVINGQETAALRKMLGAQSVYETKDRSKHSHHAVDASILTAVTVAAQRNRMLELHYRIEEEEKLGHDVSHLRYKLQKEKMNCGISNVSAINRTIERGILVNHVSKDQTLTPSRRRVRI

SEQ ID NO: 6838 - protein, 946 aa, unidentified
  REGION 1..946: note = Description of Unknown: Cas Enzyme sequence
FRLWQFIQNLRIFEKATDKDVTYAFIKNEDELVNLFDWLNDKSTISQKTILTYPGFNIRKNDQLLYRWNYVEDKEYPCNETRSTMLSLLKKANIDNELLTKEVEEKLWHILYSVEDKGELERALSSFAVKHHLNMSFVDVFKKAKPFEKEYGSYSAKAIKKLLPLMRMGKYWSAESIDQNTAIRINHLIAGEIDDTIRDRVRQKAISLTDMASFKGLPLWLACYVVYDRHSEAKEISKWETPADIDQYLKNFKQHSLRNPIVEQVITETLRVVRDIWVQEGRIDEIHVELGREMKNPADKRRKMTEQITQNEDTNLRIRALLTEFMNPDMQIENVRPFSASQQELLKIYEDGVMGLYPKLPDDILKIQQKFKETEATKRPSKSDIIRYKAWLEQGYRSPYTNQAIPLSKLFTPEYEIEHVIPQSRYFDDSLSNKVICEAAVNKLKDNMLGMEFIKRHHGEIVQIGTRNVTILSVAEYEQLVNETFSRNPSKRRKLLMEDIPEDFIQRQLNDSRYISKVVTSLLSNIVREEGEEESMSKNVIVCTGGITDRLKQEWGIGDVWNSIILPRFERLNTLTDSYDFTAVTTNGHVIPAVPFALKKGFSKKRIDHRHHAMDAMVIACASRNIVNYLNNSSALPTAKTSRYDLQKLLCTKSFEDNPYNYRWIVNKPWDTFTQDVKKQLLEIIVSYKQSIRVINKTSNKYQRIDAEGRKVMVPQTKGDSWAIRKPMHKDTVFGDVNLRFIKTVGLKEVLANPDAIVNKDFRIKLKELIAEGYDEKKIRQYMADEADTWQDVNIKKIEVYFFAHDTQNERYYATRKPIDISFTEERIKNSVTDTGIQKIMLRHLAEKGGKPEIAFSPDGIDEMNENIIRLNNGTPHKPIFKVRVYEKANKFAVGQKGNKPKKFVEAAKGTVLFYAIYESEVLDKESGETKIKRSYNSIPLNVAID

SEQ ID NO: 6839 - protein, 1234 aa, unidentified
  REGION 1..1234: note = Description of Unknown: Cas Enzyme sequence
MNKTLGIDLGSNSLGWAILDDTTCDVVDKGVVVFPEGVDMDAGSSLDTPAATRRAARMGRRMKFRRKMRKWHLLKLLIAARMCPLSPEELEMWQKQGKYPIGNRAFLDWLKSTDVSNPYCDRDAASRGKVGPMVLGRALYHLCQRRGFKSSRKDEAALVDEETGEQKKPDKAAGAVKGDIAALTEEIEKAGCRTLGQYFFKRLEAERGHLAKTRIRCRYTGRLEHYEVEFGVIMDAQGYDAKDALRKKLYDAIFKQRPLRSQKHLVGNCPLETRCPRAQIGHPAFEEFRMRAFVNNLTLEDEDGNWRDGDGNALYPLSQADREAICEKVSAVGKATFKTLKPLFKKDPRFAERKLRFHYYDEDDSIPSCPTRLNIAKGFGPVAYDEQTVFNALMFFDDTELLKAWFRRHYPALDEKSVGKLASIHPKEGNANYSLKAINRILPFLRRGFELSHARFCAKLPDVVPDYAAQADEVLLHLEETYRKHRQDKAERAAMPEKARKNLPDLPTLYERYAEMLLNDFGVTLEMFAKLYLRNDEAYEKETSYRCKGETVALARPRLPAVRLGMIRNPLVQRSMTTLRRLVNYLGDHGKLDTSDTIRIELARSVNDFATRKAYQEWQKARAALREKAVAEIVRYGKAPTEDAVERYVLAEEQNWTCLYTGKKIGLAELLDGNAFDVEHTLPRSLSGDDALANKTICDAAYNRQVKQGRVPRDCPNWDAPQGAFGAIDVMLRPWREKLEELEKTCGNQLRKAKNVSDPNARSGARVKALVTRMERDYWRDKLRRFDMTTDKLTAHQGEGLGFKRRQLVDTGIMCSHAVDLLKCLYPKTFAVNGAATAFARKAWGVQADETKDRSEHTHHAKDAMVIAALTPARFTAICTVLKDDGAQGAKGRECDVCPPPCEGFAEKVRTAAEEILVKHILRQTTLRQSSKRNALAHAHPQKDDPAKTVKYVLSKGDTVRGQLHKDTFYGCIMDPKTETLQKVVRKSIVGPLKDAEAILDKIVDPAIREIVSAAVARLKDDGVKFIEAGAVKMASGVPVNKVRIFMPTATNAWTLRDHSMVSDKEYKRPYYVTSAEGSNFRLAVFRADGKFVVKPDNSLDWARNHKRPDYKPYDQQPDFVGYIMPGAMALAHAEGHPEELKGLSQRELVKRLYKVVKFRGDGLVTFRRHIEARASVVLSKDLKTAGKHAAGESKIDLAEPHELLLVSPGVYGGQMLFEGIHFRMMLDGTIRFL

SEQ ID NO: 6840 - protein, 1186 aa, unidentified
  REGION 1..1186: note = Description of Unknown: Cas Enzyme sequence
MKKTLGIDLGSNSLGWAILDDISLDVVDKGVVVFPEGVDLDAGSSLETRAAVRRAARMGRRMKFRRKMRKWHLLDLLIDAKMCPLSKQELGTWQRQGVYPVSNREFLEWLKATDVSNPYCDRDAAARGKVAPLVLGRALYHLCQRRGFKSSRKDEAALVDEETGELKREDKLTGAVKSDIVALSKEIRDAGCRTLGQYFFMCLQREKDRKAKSRIRCRYTGRTEHYESEFGVIMDAQGFAKDDDLRKKLHNAIFMQRPLRSQKHLVGNCPLEPRNARAQIGHPAVEEFTMWAFVNNLTLEDEDGNCRDDDGNLLYPLTPADCAMIVSAVASVKKPTFKTIYKAFRKDSRFAKKKLRFHYYEEDDAVPSCPTRSRIAEAFGDVAYDEQKVFDALTFYNDTELLKSWFRKHYPSLDERSIAKLVAIHPKEGNARYSLKAINRILPFLRRGFELSHARFCAKLQDVVPEYKSREDEVLLRMEETYRLHRREKRERAETVSQIRKNLPDLPTLHERYAQILRDEFGVADDRFERLYLRNDDTYAPETSYRNRGETVTLERPRLPPVRLGMIRNPLVQRAMTTLRRLVNYLAEHGKLDTSDTIRIELARSVNDFATRKAYQEWQKGRAAVREKAAAEIAKYGKAVTEDALERYVLADEQGWTCLYTGRKIGIADLLDGNSFDIEHTLPRSLSGDDALANKTICDAAYNRRVKRGRVPKECPNWEESAEGYGAIEVRLRPWRERLDELEKTCRNQLKKAKVVGDPAAKCAARVKALVTKMERDYWRDKLRRFDMAMDRLTVHDGEGLGFKRRQLVDTGIMCTHAVDLLKCLYPKTFAVNGAATAFARKAWGVQSDAAKDRSEHTHHAKDAMVIAALTPARFTAICTALKDDGAQAAKGRECDVCPPPCEGFADKVRLASEEILVKHVLRQTTLRQSMKRTALAHAHPQKGDPEKTVKHVLSKGDTVRGQLHKDTSYGCIKNPITGNREFVVRKSLIGPITGISGCEKWIDKIIDPVIRKIVMSTVADLKQKGVKNLVSGMICMPSGVPVNKVRIRSRISSPYLLRQHAFLSGHQYKRSVYVSSSPNFRLAIYEKKGRYSYETESALTWSQEHKKSTYVPLNMKEGFVGYVLPGAMLLAHGGLKIEKLRDFSISQLRKRLYYVRVLPSESDNHAEIQHHLEAIRRRLPTSLRL

SEQ ID NO: 6841 - protein, 1496 aa, unidentified
  REGION 1..1496: note = Description of Unknown: Cas Enzyme sequence
MKKILGLDLGTNSIGWAVVNANVNENGDEKLIGIDAAGSRIIPMDAAVLGDFDKGNTKSQTADRTSFRGARRIRERHLLRRERLFRALDKMGFLPEHFSECLDRYGKFVDDNEPKIAWKRDESGKMEFLFKDSFNEMLNDFMAKWPNLISEGKKIPYDWTIYYLRKKALEKPITKEELAWILLNFNQKRGYYQLREEDNTETDFQIITAKIADVKKCEKDKKYEKYWYEVILDNGLVYRAAFYNDIAFWIGTERDFTLKTTKLKDGSIKSELSFLPTFDEIDSMEKKQKDKMYAKIKLKTEKSIDSTGKTVGCYIYDALLSNPTQKIRGKLVRTIERKYYKEELRQILNKQKELNSISELNDSDLYRECIEELYPNNDAHRNDIANRDFTHLFVDDIIFYQRPLKSKKSLIDNCPYEETTWIDKETGEISHFPIKCIAKSNPLFQEFRLWQFLSNIRIYQKEKVVDGKLCTDVDVTSDFIKNSEDIVSLFDYLNVKKEIDQKSFLKYSGFGLKKDIDKYRWNYVEDKKYPCNETHAQILNYLDKCGVAHEFLTVENEMSLWHILYSVEDKTELSSALKRFAEMHGLTDEFAKAFEKFPPFPKDYGSYSAKAIKKLLPLMRVGKYWNADSIDEKTKERINKLIDGEYDENIRNRVRDKSINLTEINHFQGLPLWLACYVVYDRHSEAKDVEKWEKSEDIDKYLRGFKQHSLRNPIVEQVILETLRVVRDIWKKQGLIDEIHVELGREMKNPADKRKKMTEQIQENENTNLRIKAMLAEFVNPEYHIENVRPYSPMQQDILKIYEEYAVSNLSASDPDFDFVSKISRTPQPSKSDIIRYKLWLEQKYRSPYTGRPIPLGKLFTTAYEIEHVIPKARYFDDSLSNKVICEFEVNQLKDKLLGYEFIKSHHGEKVQLNQGGTVEIFSEEAYEKFVKEHYSNNRGKMKKLLMDDIPDEFINRQLNDSRYISKVVKGLLSNIVREEGEEDAMSKNVVVCSGGITDRLKNDWGINDVWNSIILPRFQRLNKLTNTSNFTTYNSSGNEIPCMPLELQKGFNRKRIDHRHHAMDAIMIACANRNIVNYLNNESATKGAKISRYDLQRILCDKKTTDSNGNYKWILKKPWETITQDTRNILERIIVSFKHNLRVINKTVNHYQHFENGKKAFVKQEKGDSWAVRKPMHKDTVFGEVNLQLTKQVALTAAIKDPKSVKNKDLKKRLIELIANGYDAKKIREYFEDNREVWADVDLSKIDVLYYSKDTKDRYFATRSSLDESFDAKKIDSVTDSGIREILRRHLEKNGNDPKIAFSPDGIEKMNENIMDLNLGRPHKPINKVRTYEKADKFAVGQTGNKSKKFVEAAKGTNLFFAVYENEIVDKNTGETKKVRSYATIPLNVVIDRQKKGLPSVPDDENGTQPIFVLSPNDLVYVRNIYDNGEINNNNILKIVSFTGGRLYAVPYSLASVIVDKVEFTQLNKFEFTDDKRSVREFCIPLNINRLGEII

SEQ ID NO: 6842 - protein, 1373 aa, unidentified
  REGION 1..1373: note = Description of Unknown: Cas Enzyme sequence
MKRVLGLDLGTTSIGWALVNEADNKEEQSSIVKMGVRVVPLTVDEQQNYGKGKDIQTNAARTMKRSMRRNLQRYKLRRQQLIDCLKEYHVITDETVLCEDGPRTTFQTLRLRAKAVNEPISLEEFARVLLMINKKRGYKSSRKAASGDEGSLIDGMAIARKLYNENITPGQYVLQLLDEGKKYVPDFYRSDLREELDRIWAAQQTRFPAILTDEFKQQVIGRGKNDASKLFYARYQISTAQNKGKDKRLQAYRWRVAALTDPLTIDEVAYVICEICGQMSGSSSYLGSISDRSKELYFGHITVGQYLMQQLEANPNISLKNQVFYRQDYLDEFEALWSEQNQHHKELTPELKKELRDIIIFYQRTLRSQSHLIGLCEFESRKQTVTVDGKSKEKLIGLKVCPKSSPIFQEFKVWQVLNNVMVTIPDSDEPIFLSIEQKQLLAEHLEESPRLTKTEALRMLYKKPKGYDLNYKELLGNETMTALLNACRTIVEMSGHDDAGKMTKQDIVEVFAALGFKTDFLYPDNSIEGKAIGLQPHYRLWHLLYSYEGDNSKTGNEQLIKHVMELTSLPREYAQVLASVTFKEDYGNLSAKALRKILPYMKEGTEYSVACQYAGYRHSAHSLTREEIDNRELKDTLDVLPRNSLRNPVVEKILNQMIHVVNGITEQYGKPDEIRVEMARELKKSKKEREEATNSINATTRDNEAYTKILQEEFGIQHVSRNDLIRYRLYLELKDNGFKTLYTNTYIPREKLFSRDFDIEHIIPQARLFDDSFSNKTLEARQANIEKGKLTALDYVATQSDSEGLQQYRNRVEALFAAKAISKTKRNKLLMKDADIPEDFLNRDLTNTQYIARQAIGLLEQLVRTVVPTTGSITDRLRDDWQLMDLMQELNWEKYDRQGMTYFYQDHDGRTIGKIKDWTKRNDHRHHAMDALTIAFTRPAFIQYLNNLSARSVKAGSIYGIEQKWLYRSDKGKLRFVPPMPLDVFRAAARVQLEAIFVSHKAKNKVMTENVNHYRVGSETRTKAQLTPRGQLHNETVYGQIQQYVTSEVAVGAKLTTEVAAQIADQRIREAVLTRLEAYGGDAKKAFTGKNSLDKNPIWLDDIHSANVPAKVKLVELQKMLTIRKPIDANLKVEKVVDPQIRKLLEARLAEYGGKADKAFANLTENPIWLNEEKGIQVKRVSIFAGYSVAEPLHQRHDHHGNALLDAEGKAVATDFVVPGSNHHIAFYRDAEGNVQDVAVSFLEAVARREQNLPVIDRQYRADEGWTFLFSMKQNEYFVFPNEEKGFYPKEVDLMDPANAKEVSENLFRVQKFSKTDSGRDYFFRHHLETLLIDTKEMAGYTFKRCRNLNFIDGIVKVRVNHLGVIVSIGEEK

SEQ ID NO: 6843 - protein, 1118 aa, unidentified
  REGION 1..1118: note = Description of Unknown: Cas Enzyme sequence
LEAIIKLLAGGTCKVKELFDNADYEECGSISLGMDEDKFGLLMGQIGEDYELVEKMRAIYDWSVLIDALGDETTISDSKVKVYEQHKEDLAFLKYIIKKYKKGSYATVFRIIDKNQKNYVSYSYHIDGKDTSALHNSKANREDFCKFILGVVKDIVPDTTDKDAFDVMIQRLELRTFMPKQKSTDNRVIPYQLYQYELHRILETAEKYLVFLKDTDEDGISVSDKIKSIFKFRIPYYVGPLSNHSEYAWVVRKAGKILPWNFEIMVDLDASEEAFIKKLTNKCSYLPGEDVLPKDSLCYHKFMVLNEINNLRINNIRISVELKQVIYNELFLRVKKVTRKKLVEFLICKGCLEKDNVSALTGIDEDPKSNLTPQIAFRSLLSNGILSEEDVERIIERSSYAEDKSRLTKWIRNNYPKLEETDVKYITGLKFHDFGRLSRRFLTGFEGTNKETGEVTTVLAEMWNSQNNLMELLSDRYTFAEELAGYTKTYYTDHKVTLEDRLDAMYLSNSVKRSVYRTLDIVKDIRKAFGEPSKIFVEMARGASEDQKGKRTKSRKQQILEFYEKCKDEDVKELKSQLEAMGTLADQKLQGDKLFLYYMQLGKSMYSGKPIVLENLGEKFYDIDHIYPQAYVKDDSIINNKVLVLSSENGDKSDEYPIKSEIRHNMRPSWEYLRAVGLISEEKFKRLTRATPFSDEERLGFINRQLIETSQSTKAVAMLLKERFPGAEIIYCKARITSDFRHEFEIWKSRIYNDLHHAVDAYLNIVTGNVYDMMFSKNWFKPTDNYSIKTKTIFTRPLVRAGRTVWDGQNMLAKVKRTAEKNTAHFTKYAYFKHGGLFDQNIMPASEGLIPVKKGRDTTKYGGYNKAGTMFFVPVKYSIGQKMDVIIMSVEAMFGKRFLTDESFAKEYTFIHLKKILGKEVRAIEFPMGMTPWKVNTMLSFNGLNFILTGSSSGGSVLLLNLTTQFSAAPFWKYYVKKLEMAAEKLSKNPNYVIDPVFDKITSENNNKIYDLYIDKLSNSIYAKRMASPLEILITSKEKFLSLSLSEQTKALLNIHQVFCRLSGGTDLTLIGGSKNSAITKLSSSISNWKKSYSEVKILNLSASGLWKTESGNLLDLL

SEQ ID NO: 6844 - protein, 925 aa, unidentified
  REGION 1..925: note = Description of Unknown: Cas Enzyme sequence
MENIKKSDYFLGIDIGTNSVGYAATDDHYNLIKYRQHPVWGTHLFDSAKTAADRRTFRAARRRLDRRQQRIQLLRSLFAKEISRIDPEFFRRIDESALIKPIGTSPYCIFNDKEYSDRTFHHDYPTIHHLINDLIKEDKQHDIRLIYIACAWLLAHRGHFFSDVDRYHVSELFDFKSVYGELEYYLEGRDQFFPWKDKVEPSQIGEILKKVISPTEKKNQLVNYLQISRNEITENFPYNQEEFLRLLSGNEVKINKLFAQDEYADVKLSLDADDDKIAQVLGTLNEDDAATILAMKKIFDWSVLSDIMQGKQYLSEAKVCIYKKHEADLQILKALVKKYLKAEYKEIFRDNLDKLNNYTAYSGNARNCSNRHRLNGGINKELFYKYIKTKLDKIKNADEEDQKLLATINNDIQLNNYMPKQVDTDNRTIPYQLYWSELNDLLVKVSSYLPFLNEKDEDGLTVIDKILSIMEFRVPYFVGPLNSSSKFAWFKRKAEGKITPWNFDKMVDLNASEESFISRMINYCTYLPGEPVLPKQSLLYEKFEVLALINNLQIDGRPISIQAKQKVYEGLFIRKKKVSKKMIADFLKLNNLYQSITTESISGIDETISVSLDSWIFFKPFFDCHKLSFDEAEDIITRGAFTEESNRLALYIKQHYPQLNDGDVQKLAKHGYKGFGRLSKKFLTDIIDNQCLDGEPANIITFMWERNVNLQQVLSGNHSFGDRVKEAKREYYSTHTSTLTERLDNMYVSNSVKRPIIRTMAVIKSVVDSLGRVPAKIFIEMSRDVTDGTKGQVTQSRYSQLKKLYNAVKNDGEYRQMLDELNKFENDESKLQSDVLFMYFMQLGKDMYTGDTITDLSAFNKEHIYPQSKVKDDSILNNLVLVRSSVNGEKSDDYPLAPAIQQKMKPFWKYLLDKGMMTKEKFLRL

SEQ ID NO: 6845 - protein, 1230 aa, unidentified
  REGION 1..1230: note = Description of Unknown: Cas Enzyme sequence
ADEDYNDVQYHNDFPTIYHLRSELIHSNKEYDIRLVYLAIAHIIKKRGHFLFEGQEIGNTTSFEVVYSELLQTLSDYGIDFSLENASLLENVLKDKSISVNDKKKQIKSLFSTSFDEDSTIDQTYAVCELMAGGTVELAKLFDDETLKDAEVSKISFKSGYDDKLPQLESVLGEDLYLLEKIKAVYDWATLTEILNGAEYLSDAKITSYEKHKKDLALLKKLVRDYAPNSYKKIFSENKNANCLNYIAYTGHVSGKGKYAEKYSCSQEDFCKFVLKELPKDLQLEDEDEKYIFAELQNFTALPKQVTKDNSVIPYQLNKVELEKILENASNYLDFLNEESDGKTIKEKIVMLLTFRIPYYVGPLNENSEKAWIVRKEGKIYPWNFEEKVDTIASATKFIEKMTNQCTYLVGESVLPKESILYSKFNILNQLNNIKVDGQKLSVSVKNTMFDDCFINVEKQKKMTIKAIKTYLSIKGVCDKDSEITGIDAAIEGTMKSYIDFKRILGESFDEQVAEEIIYKTTVLGKSKKLIDWYLRNDVDFSFSEEQINEIEKLNYSGWGRLSKKFLKEIYHTDVATGECISVISALKNTDDNLMQLLSNNYSFVDAIDEFNKEKNDIEGSIKYSNIEKLYVSPAVKRSIWRTSLIVKEIVNIAGHNPKKIFIEMARDSSDANKGKRTKSRRDQLLDCYKESKKDCDELAKELSNYDDNQLRSDKLFLYYAQLGRCLYSGDPIDLDNLLSNNSNYDIEHIYPQSKTKDDSLDNRILVRKKLNEDKGDAYPVPTSYRNERTVTLWKKLLSLGLISKEKYNRLMRTEGFSDNELAGFISRQIVETRQSTKAVADLLNKAYDDTKIVYVKAGNVSDFRHHFDIVKCRAVNDHHHAKDAYLNIVVGNVYDTKFGLNVVRFISDGNIYSLNRMYDYDVKRGNNVAWSKDSSIATVKKNVFKNNVLFTRYSSEQKGGFFDQQIVAHGNGQMPIKTSDERLASIDKYGGYNKVAGAYFVLVRHVKKDEIVKTIESIPIYVASKIRNNPLELEYYLGTYLDEPEVLIRKINYNTLFEIDGFRMHLSSKANGGKILQFKCGEQLIVSSETYAYLKQIEKFVERKRQNKNLTVSQLSGINENMNLEIFETYLKKLENTKYNKRYASQARSFADGKEKFVKLPIEDQCEFLMKAIMLFRCLPGGADLSLIGGKEKAGVLTTNSNVSSTKNLYIVNQSITGIFENKIDVSLL

SEQ ID NO: 6846 - protein, 1490 aa, unidentified
  REGION 1..1490: note = Description of Unknown: Cas Enzyme sequence
MKNIIGLDLGTNSIGWAKVSVDDEGKASPKIELGSRIIPMSQDVLGKFDSGVTESQTAVRTAYRGTRRLRERVLLRRERLLRVLHTLNFLPEHYDNAIGWNKNNNKTYGKFIDDSEPKVAWRRRNDNTMEFIFMDSFNEMLADFAKHQPALVADGKKIPLDWTLFYLRDKALKKEISTQELAWILLNFNQKRGYYQLRGEDEEEDNSKLEEYYVLKVVKVEDSGEKKGSDVWYNIHLDNGWIYRRSSKTPLFDWEGKEKEFIVTTQLEADGSVKLDKEGNPRRSFRAPSEGDWKLQKKRAEASIYDSGMTVGSYIYKHLLSDPNDKVRGKLVRTIERIFYKQELNAILEKQAEFHKEFRDADLLFDCIRELYARNIPHQESLRKKNLIFLLVDDILFYQRPLKSKKSLISNCPMESYSFVDKSTGEIKTQHIKCVAKSNPFFQEMRVWQFIQNLRLYDTTGIKEEDVTAQYLKDEESIVKVFEYLNDKDKIKQDTLLSFLGIKKLGRGRDAIYTIRWNYVQDKEYPCNETRHTILNALKKADVSIESLYGNGKKSKDEGELIYSLWHLLYSVEDRNELINALTSYAKANDLSESFVDTFKKVASFKKEYGAFSEKATKKLLTLMRTGSKWSERAIDEKTMSRIHQIIDGTMDADLMGKIKRGFSSVEEFRFLPLWMASYIVYGKHSEGSDITRMEKPEDLMAFIHGFKQYSMRNPIVEQCVLETLRTVHDLWAKYGHIDEIHIELGRSMKSTSEQRARMTSQNIENENTNLRIKQLLLELKNDSKIEDVRPYSPMQQDILRIYEEGALLELKKDDADYDDIYRISHLAQPTQSELIRYKLWLEQKYRSPYTGKTISLSKLFTPAYQIEHVIPQARFFDDSLSNKVICEAEVNQRKTNMLGYEFIKKCGGEIIHCPALGDVKVFDKTEYEKFVAEHYTSNKSKARKLMMEDIPEEFIQRQMNDSRYISKVIKGLLSNVVREEGETEAISKNVIPCTGGITDRLKKDWGLTDIWNKIVSPRFERMNSLTNSDAFGHWENKEGKQVFQTTMPLELQKGFSKKRIDHRHHAMDALVIALASRNIISYLNNESACDTQRREDLRQKLCAKGRVIDKPWDSFTQDAYNALENIVVSFKHYVRVINKASNYYEHYDENGKKQIIPQQSEEQWAVRKPLHKETVFGKVNLQRKKSVAFAKAIELVNNIVDKELKSAIKKMFAEGLDKKKINAHFKSQEYKFEGKDISKVEVFYFTEDESPMVATRKALDDSFDEKKILTISDTGIQKILLNYLASKGNDPKIAFSPEGIVDMNQHIAEYNDGKKHLPILKVRVCEVKGEKFSIGCNGINRKKFVEAQSGTNLYFAIYESADGKRSYETIPLNIVVERLKMKLSPVPEHNSLDVPLKFHISPNDSVYIPTEEERNSANVNIDKSKIYKFVSASGSQAFFVPSNNASVIVNKVELLSLNKMEKTTDGIMIKTVCWKLEVDRLGNITKIIR

SEQ ID NO: 6847 - protein, 1392 aa, unidentified
  REGION 1..1392: note = Description of Unknown: Cas Enzyme sequence
MCLYYHNEGGLSIVSREEIFLGLDIGTESVGWAVCSDDYKLKKFKNNLMWGVNLFDEASQATDRRTFRTSRRRLDRKKRRISLLQELFAPEILKTDAKFFMRLKESALFPEDSTSRRSNIYFDDDDYDDEQYNKDFPTIHHLIVELMNNTEPHDIRLVYLACSYILSHRGHFLSEVDKNKVSEILDFSEIYNHFIILLNDICEHVPFDAKSDEVGDILKSGLSITKKEKLMIDLLFGGKKPKDEFRIKMALVIKLICGGKVKLSELFKKDYYTELDKDSITVSSADFPDTLEELRTKLDDGDADFIESIKNMYDWSVLINTLNGSDYISEAKIKVYDKHRDDLKKLKNICRKYLEIKKCNEIFKTASDKANYVSYSYNVSSIKKHELSDKFKKTNNQEDFCKFILGYLKDLCVDPEDKEEYDYLVYECKNGSLCPKQVTSDNRVIPYQLYYVELKKILKNASAYLPFLNETDQYNKVSDKILQLMEFRIPYYVGPLVSSEKSKNAWLVRNPGKEKEKIYPWNFDEIVDHDETEKQFIRRMTCKCTYLAGEDVLPKNSLLYCKFNVLNEINKIAVDGQAISPELKQDLYNELFVEKKCIVTKKRILNYFKSRGLAGPESEISGIDDTVKSSLKSYHDFKKMIESGKLSETDVEAIIERITVTTDKKRLKNWISEKYKFLSSDDIKSITRLNYKDYGRLSRALLEDITEVDSETGEIVSDENIITRLWTTNDNIMQILGSKYKYSDVIRKRNDLFYTDNELTVEKQLEEMYISPAVKRSVMRTLDIVKELKKILGRSPDKIFIEMSRGELDNSKKGKRTQKRREFIEEKYKVAREFVDEKEIKSLESKLSSLSDSDLRSEKLFLYFTQLGRCMYSGKSIDFDKIGNDTIYNIDHIYPQAKVKDDSLENKVLVLSKLNGEKSDSYPIADPIRKNMHSFWSSLFKIGLISEKKYSRLTRSTGFTDDELTGFISRQLVETRQSTKAVSQILNNIYPESEIIYVKAGIVSDFRHEMDMLKCREVNDLHHAKDAYLNIVLGNVYNTKFTQNPANFIKTEKNYSLKLFKKDSNGKESGLLTHKVERYGKCAWDPTVSFDVVRNTMSKNSIRYVKYSYRRKGGFFNQNPERAKDGLIEMKSGLDTAKYGGYNNSAASHFSIVKYNNSITIIPVEVMFESKYNSDELFAKEYAVKQIKEITGEEVNIDSVIFPYGKRIVKINTLLEIDGFKANIVQKSNKGKTLVVSSALSLILDKESYDYAKRMTSFIEKSENMKKYKVSDNDKITSDKNCNLFNSLCEKLTSYPFNIMLGKIGNKVLKGRDKFVELDINEQLSVLSSIIFLLKTGRSVGCNLKSIGESGQAGIISINSTLTKIKDFKSIRIIDQSPTGLFEKKSDNLMDL

SEQ ID NO: 6848 - protein, 1354 aa, unidentified
  REGION 1..1354: note = Description of Unknown: Cas Enzyme sequence
MNNYYLGLDIGTDSVGYAVTDEYYMPVKKRGEPVMGVTTFEAANQSQERRAFRTARRRIDRRQQRVALLNEIFTPEISKLDPRFFIRRRESFLYRDETGDEFTLFCDKDFTDKDYYKLYPTIHHLINELMTSSDKHDIRLVYLACAWLVAHRGHFLFDVAAENVGELLDFNVVYANFREYLSGLGYVMPWPAVTTADDILSIMRMNTGVSRKQDAFKEKIYGGKKPAKKAEPESDFPYGREAIVKLLCGAKVKPEDVFQNGEYTELESVSLGMGDEDFARIIAEMGDEGELLIRLRALRDCVMLISTTNGAAAISAAKVGVYEQHKKDLAGLKKFVKKYAPGKYNAIFRDAGTENYTAYSYNVKSCREPAAVKQRAKAEVFSDYLKKQLKDIKPAKADEAFYNDMLTRLETNSFLPKQKNTDNRVIPQQLYRYELARILDNAEKYLPMLSRRDECGLTAKEKILSIFDFRIPYFVGPLNAASQHAWIVRKGEGRIYPWNFNALVDLDASENMFIKRMQNSCTYYPGAEVLPVKSLLYCRFTVLNEINNIKVNGVSIPVEVKQGIYTDLFCTHQRVTVKQIKEYLKGCGIYTEGDELTGIDNKINSSLPTHFQFRRLLESGTLTEPEVESIIRRAAYSEDKPRFIRWLAAEYPQISDADRKYIARLNLKEFGRLSAEFLTGIYSADEQTGEAFTIIDGLWNTNNNLMQLLSDRYGFSRALADLSREYYAEHPLTLSGRLDEMYVSNAVKRPIFRTLDICADIEKAMGGAPKKIFVEMARGAAEDQKNKRTRTRREQLTDLYKAVKTADARELEKQLADMGAMADNRLQSDKLFLYYLQMGKCAYTGQAIDLARLQDSTYNIDHIYPQSFVKDDSVLNNKVLVLSTVNGAKTNVYPVDAEIRSRMRPLWEAWKNSGLMTDEKFHRLTRSTGFTEEEMLGFINRQLVETRQSTKAVAAILKDKYPDAEIVYVKAGLVSEFRQEFDMIKCRSVNNLHHARDAYLNIVVGNVYSSKFTKNFNVHQDYNIQAKKLFTKPVKCGKTDVWQGETDIAKVRAVMNKNAIHVTRYSFCTKGGLFDQTRKKKGPGYVPLKAGMDPEKYGGYTKSSASFYVLVKYDNGKKKDVMFMPVELLAAERFANDKAFAEEYIRSTVASITGVPVKEAELLLNGRRIKTQTVISVDGLRLLIRGKGNGGKIVLLSLHTPLILGYKFDKYVKALESFKEKRKTNPSIVPDEVHDHISAAQNVELYDMLCKKLGCSILKYVPSSQYSLLESGKCKFIEAGMIEQIDCLLNIVAMLSTAPGSFDLTLVGGSKNAGAKTMSSQLSNWKKYYKDVRIVDMSVSGIYESASCNLLELL

SEQ ID NO: 6849 - protein, 1198 aa, unidentified
  REGION 1..1198: note = Description of Unknown: Cas Enzyme sequence
MKVNGNSNLMSDYYLGLDVGTNSVGWAVTDMQYRIPRFKGNSMWGVRIFDDAQTSAERRQNRTSRRLHQRKCQRLQLLEFLFDEEISKIDSSFFVRLKESSLLTEDKSAGTVYPLFNDAGYTDKDYFRTYPTSYHLRKELINSKEPHDIRLIYLAIHHILKSRGHFLFDISTNDNYKTLDILFDEFVIWITEEYDVEFEILNKKNILSALSDSSISITNRKKILRENIKITKECEEIDLMFVFDMLSGATVKFSDLFNDETLKKAEKKSLTLNSDIESEFDSIVETVGEERFEIIGKLKEIFDSAKLTQMLGNNRYICEAKVEQFETNKRDLRKLKKFVKENEPKKYKEIFSCKKDKLNNFSAYSKRMLESGEYSCKQEDFCKYLIKELPSLALKQDYEDIYTKIKNNIFLPKLKGSENSVIPNQLHRKELEKILENACFYLDFLNKKDENGVCTRDKILSIFDFRIPYYVGPLNNKSPNAWVVRTKEKIYPWNFEKVVDTEKSSQEFIVKLISKCTYTGDDVLPKESLLFSEYCVLNEINPLCINGEKISIKLKKEIFNELFVKSNKSVTKKSLKAFLLKQGYITSQDEISGIDDKIKSKLKSFNDFSKIIDVNQNRNMVEDIIRNLTIFGDDKKLFKNWLKSAYPELKKEQFDYICRLKYKDWGSLSETLLNKIYSPDENGEAHSVIEMLHLTNNNLMQLLSSNYQFKTNAENYRLDKYGEKDSVSEMIKDMYISPAVKRSLLQTVKIVDEIVDAKKSAPKKIFIEVAREKVDDDKKQRTISRKQKLLDLYKYCKKEYPELYEALNLADESSLRKDALYLYYTQFGKCMYSGQPIELENLESKYDIDHIFPQSKIKDDSIDNRVLVLKTYNEEKTNIYPIKAEWREKMQPVWNMLKDKGLISTKKYERLIRHSPLTDEELSSFVERQLVETRQSTKALAEILTALYKEANTKIVYSKAGNVSSFRQDFGIIKCREINDLHHAKDAYLNIVVGNVYDTKFTANFFKNIRNEKYSLNKVFEYDVKGAWEKEKTIVTVKNVLSKNNILVTRRPYEVKGKLFDLQPVSKSEAKIPLKETTYISDVSKYGGYTGRCAAFFIVVEHSKGKKKIRTIEPVYIYKKQLFINDPVGYCKKVLSLNEPKIIYNKIAISSMIEMNGQRLILAGGSDSQGDGRDIYNHTYQLKLDGSIEKLIKNIIKF

SEQ ID NO: 6850 - protein, 926 aa, unidentified
  REGION 1..926: note = Description of Unknown: Cas Enzyme sequence
LGTNSIGWAVVNASIDENGRQHLVGISSAGSRIIPMDATQLGDFAKGNTVSATKDRTGFRGTRRLRERHLLRRERLHRVLDILGFLPTHYSNCLTRYGKFTNDTEAKLAWEKGQDGRYGFVFMDSYDEMLKDFQKTQPDMLADGKRIPYDWTVYYLRKKGLSQLLTNHELAWLLLIFNQKRGYYQMRGEEEEKQNEKVEYLSQKVIRVEATDDKKGEDTWYNVYLENGMVYRRSSKMFLDWEGKTKEFIVTTTLNPDGSPKVDKDGAIRRSFRSPKPDDWALQKKKAEIDIDKSGKTVGAFIYDTLLIKPDMKIKGKLVRVVERKYYKDELRLILEKQIELNPVLRDNGLYMKCINELYPSNDSYRKSIENKGFSYLFVDDIIFYQRPLKSKKSLIDTCPYEGHVGIDPATGTPKEYGVKCIAKSHPLFQEFRLWQFVQNLRFYEKESDKEVTGTFIKGENGLVDLFDWLNDKSSISQKTILTYPGFNIRRNDQSSYRWNYVEDKEYPCNETRSTMLSLLKKTTIDTKFLSKEAEEKLWHILYSVEDKGELERALYSFAAKNNLNDSFVEIFRKAKPYDKDYGSYSAKAIKKLLSLMRMGKYWSEEAIDSDTITRINHLIAGEMDDTIRERVRQKAISLTTVDAFKGLPLWLACYVVYDRHSEAKDITKWKQPADIDLYLKNFKQYSLRNPIVEQVITETLRVVRDIWVQEGRIDEIHVELGREMKNPADKRKKMTELITQNEDTNMRIRTLLTEFMNPNMHVDNVRPYSASQQELLKIYEDCVMSQYSKLPDDILKIQQKFKERESGKRPNASDITRYKVWLEQGYRSPYTNQAIPLSKLFTPEYEIEHVIPQSRYFDDSLSNKVICEAAVNKLKDNMLGMEFIKHHHGEKVQIGTRTVTVLSVSEYEQFVNDNFSKNPTKRRKL

SEQ ID NO: 6851 - protein, 1027 aa, unidentified
  REGION 1..1027: note = Description of Unknown: Cas Enzyme sequence
MATKKILGLDLGVGSIGWALIEANEDIPSKILGMGSRIVPISSDESDQFQRGQTITKNADRTQKRTARKGYDRYQLRRSLLTQVLKDNKMLPERMDEFVIDLWRLRANAATEDIQLTLQEIGRVLYHLNQKRGYKHSKADVSADSKQTKYVQDVNQRYADIQQLGLTIGQYCYQELMNSVVTSPSGVYYTFRIKDKVFPRQAYLAEFDQIMSVQKKYHPTVLTDELIDTLRNRIIFYQRPLKSCKHLVGLCEFEMQPFRKKDGSIVYSGPKCAPRTSPLAQLCAVWEAVNNIHLTNRNNETYLISQDQRKSMVEFLQTHKEMKVTDMQKILGISKKDGWWGGKAIGKGIKGNQTLVQLREALGDQYDQWLRMDIHTQSTELVDTETGEIIEMVSPSVEQEPLFRLWHIVYSVQDKEELRKALLKQCQIDNEDVLEKLYKIDFVKPGYANKSHKFIRKLLPYLMQGEMYSNACAHIGINHSNSRTKEELASRPLEDRIQLLQKNALRQPVIEKILNQMINVFNALKTEYGEIDEVRVELARELKQNKEERESTFKNNSKQERENRTIEERIREMGIRPSRSRIQKYRLWEESQHICFYCGAVVNVKEFLSGDDVEKEHIIPKSVLFDDSFSNKVCACRACNHAKNNRTAYDFMSSRPETEFEAYKSRVDDAFQEHRISKTKRDHLLWRVQDIPQDFIERQLRQSQYIATKAVEILQTAVRNVYSTSGSVTEFLRHQWGYDEILQTLNLPRYQQVDGLTEWVTYVHSGQKHTEERIKGWTKRMDHRHHAVDALTIALTRQIYIQRLNTLNASREIMYSEVEGVTVSQRDKEKRTLLENWVSIQPHFSVQEVQDKVAGILVSFRAGHRSVTLGKRAIYQKGKKKVVQEGIIIPRGALTDEKVYGKLGNCFVKKYMLTEQAMHVDNIVDPTIRELVRSRLLAFDNNPQKAFATPLYSDKAQTMEIKSVRCFTQYKDKALAPIKFDNNGNAIGFSPTNNNHHMAVYIDSFGQYHENIVSLWHAVERKKYGIP

SEQ ID NO: 6852 - protein, 1380 aa, unidentified
  REGION 1..1380: note = Description of Unknown: Cas Enzyme sequence
MKKILGLDLGTTSIGWALVNEAENDNEKSSIIKLGVRVNPLTSDELSNFEQGKSVTTTADRTAKRSSRRNLQRYKLRREDLLNLLINNNIISTKTILSEQSNKEIFYTYKQRALAATDKIELEEFAKVLLMINSKRGYKSSRKAKSTDEGELIDGMSVAIKLHEYHQTPGQLSLELLKQNKTKLPEFYTSDLSAEFDLIWQEQTKYYPEILSNTLKDSLKLKNKNQTWAICKTPFNLVGIKRETKGLALKIENYKWRADGLNSKLGLEELAIVLSEINGQIANSSGYLGAISDRSKDLYFTHRTVGQYLMDELSQNPNTSLKNKVFYRQDYIDEFETIWNCQSKHHQELTDKLKKEIQQAIFYQRPLKSQKGLISICEFENKQVTILKDGKQKTITIGQKVCPKSSPIFQEFKIWQILNNIVVTDLSTKQKFTLEKEEKEALFLELNIKANIKKSEALNILFGNKAKQFDINYKELDGNRTLSALYSAYQSIIEMSGHGEYNFSAMQATQVTEMVLNIFSTLGINTKILKFDATADDFETQPLYELWHLLYSYEGDNSATGNKSLINLLCQRYGFEEEYASILAKVIFQPDYCSLSTKALRKILPYLKDGNEYSVACEYAGYRHSKNSLTQEEIQNKTLLDKLDAIPYNSLRNPVVEKILNQMVNVVNQVIETFGKPDEIRIELARELKKSAKERDEMSKNIIASSKLHEQYKHILEDEFGIKNVSRKDIIRYKLYLELEGNGFHTLYSNTYIPREKIFSKEFDIEHIIPQAKLFDDSFSNKTLEARNVNIAKSNSTAYDYVTTLGEDALSQYIARVEKLYKDQKLSKTKYKNLLMKESEIPSDFLNRELRDSQYIAKKAREILENLVKFVVPTIGSITERLRNDWQLVDIMKELNWSKYEKLGLGIVGWTKRNDHRHHAMDALTIAFTKRSYIQYLNNLNARINKSQDEYKNLNDIDLSSLPKEQRSSIIYAIEQSQLYRDSNNKLRFRPPMPLDEFRRVAKKELSSILVSIKAKNKVVTRNINKTKSKNGGHQVIQLTPRGQLHKETVYGRILQYVTKEEKIGSSFTFEKIQTVASKKYREALLARLNEFNGDSKKAFTGANSLAKSPLFLNDDHTLQVPETVKLVTMEPAYTIRKAIDATLSVDKVVDAKIKRILLARLEEYNGDAKKAFSNLDENPIYINAEKGIKIKRVKIYGISNAIALHNKHDQNGKVIVDENGNKIPSDFVSTGNNHHVAVYIDNEGIIHDEVVSFYEAVERINQGLPVINKSLNSDLGWRFLYTMKQNEYFVFPNDETGFDPKEIDLLDPNNYSLISPNLFRVQKFTKSNYCFRHHLETNVEMNYKMKGVTWTDFRSTKGMERIVKVRINHLGFIINTGEY

SEQ ID NO: 6853 - protein, 1487 aa, unidentified
  REGION 1..1487: note = Description of Unknown: Cas Enzyme sequence
EKQIEALGCRIIPMEASVIGDFEKGNSISQTKDRTRMRGDRRLLERQLLRRERLHRVLQTIGFLPQHYASQIDKYGKFVKNTEPKIAWFCNKSGKYEFYFKEAFNEMLEEFQKQQPHMLENGKKIPYDWTIYYLRKKALTSAITKEELSWLLLNFNQKRGYFQLRGDEDNTEDTKQQIEYYALKVVNVIETNEKKGNAKWYNVVLENGWVYKRASEHPLDWIGKTKEFIVTTDLNEDGTIKLNKEGEEQRSLRAPKEDDWALVKKKTESFIYDSGKTVGTFIYDHLIQNPNQKINGKLVRVIERKFYKSELLQILDKQQEFIPELRDNSLYNKCIDELYSSNDAYRKSIQNRHFIYLFIDDIIFYQRPLKSKKSTISDCPLETRYNKIGKESSIKCVAKSNPFYQEFRLWQFISNLKIYKRQMIVDGKLLTDVDVTREFLRTEDDYEALFEWLNDKKSIGQETLLAYYKITKEKKTDNQLPYRWNYVEDKEYPCNKTRFAILAKLTKTEKRGLTATLEYDLWHLLYSVTTQAEINAVFNESKKGNKKGLYKRLREVFSDTSIEKLKSVKFDEQDYGAYSEKAIKRLLPLMRRGKYWNVNNIDSKTLERIDKIISGEYDEKIKNRVREKSIGLSSMNDFHGLPVWLACYIVYNRHSESSDIQKWTHPEDIDAWLKAFRQHSLRNPIVEQVVTETMRVVRDIWRQVGQIDEIHIELGRDIKNPADRRAAISKSIQKNEETNLRIKTMLQELMNPECGIENVRPNSPSQLEIFKIYEENVLENNNPTDDIKEIIKNLSHIDSKSRPSSKDILRYKCWLEQKYRSPYTGEIISLSRLFTEDYEIEHIIPQSKYFDDSISNKVICESEVNKLKTNLLGLEFIKKHHGEIVTLSNKKTVTIFNEEEYQKFVSENYSKNRAKLQKLLMEDIPDGFIERQLNDSRYISSYIKGLLSNIVRAQDKNGNLEEEETSKNLIFCNGNITNRLKSDWGMNDVWNKIILHRFQRLNEITGTTHFTSITNGHEVPSMPLELSKGFSKKRIDHRHHAMDALVIACTTRDHVSLLNNESAKSENKQNKYALSYKLRNVEKTMVNGKEQNVFKEFIKPWDSFCQDTENALNLIIVSFKQNLRIINKTINKYEIINDGKKIKKAQTSGQNWSIRKSMHKDTVFGEVNLRFTKAISMKEAIKAPDRIVNKEIKVKIKELINSGKDLKSIEEYFKKNLDIWTELSTGKVDSYYYSKETKDRYFATRFLSDLVGYFSNVKNREDAIKKIGAITDSGIRKILTKHLEVNNGNPTIAFSADGIDKMNLNIQSLNEGKPHKPIYKIRRYEKAEKFAVGETGNKCKKFVEADKGTNLFFAIFESTLEEGVRSFMTLPLNLVIECQKKYTTHWKENMCKVLSDVGQINENNKLLFLLSPGDIVSIEGTSLPLLKVVSFTNKRLYAIPANVAKSIVDKVEFGQLNKLEFVNVNGQNISIKDKCVPVFVNRLGRQM

SEQ ID NO: 6854 - protein, 1171 aa, unidentified
  REGION 1..1171: note = Description of Unknown: Cas Enzyme sequence
NSIGWALVNEAESDQEQSSIIKLGSRIIHFDNFVKTDTGASPYDAVKDFSAGKGLSPNAGRTKSHGMRIRLQRYKLRRKHLIKILKDSNIITDSTLLCEDGKGTTLQTYSIRAKAASEEISLEEFARVLLMINKKRGYKSSRKEIVEDDSAEEGGYLGAISARSKQLTEQNLTVGQWKYRQLMENPHNSLRDIIFYRQDYLDEFEKVWAVQSQYHKELTNELKETIRDIIIFYQRKLKSQKAALSFCPFESEQKEIEVDGKKKVRTFGCRVIPKSSPLFQEFRILQNLNNIKVTDFVRHEERVLTAQEISTLAAELAYSDKMSKAGAMKLLKLKKTEYDLNFDELQGNRTMSRLLNAFYKIKVKASGEIDKFSKMTVAGKLEVLEPALDKLGINTAVLHFDSSLEGKELEKQPAYRLWHLLYSYVSDDSRSGNEKLLENLENQFGISKEYGNTIANIVFESDYGGLSSKAIKKILPFMKDCYRYDEACAMAGYNHSDSLTKEENENRELEDFLSLIPRTSLRNPVVEKILNQMVNVVNQIILEYGKPDEVRIELARELKKTAKQRQQMTDAIGKTTKDHEKIAKLLQEEFHIARPTRNDIIRYKLYRELEKNGYKTLYSNTYIPQEELFTKNFDIEHIIPKARLFNDSFANKTLEARSVNKDKSDMTAYDFVEQAYGEDGVQQYKARVEELFKSKQISKSKRDFLLMKESEIPADFLNRDLAESQYIARQAREMLLTIVRTVTSTTGSITDRLRDDWELVDIMKELSWDKYDRLGLTETYTDSEGRKIGKIKDWTKRNDHRHHAMDALTIAFTKPSFIQYLNNLNARSDKGGSIYGIQQKELENRKGKLRFKAPMEIKLFRQEAKKHLSAVFVSLKPKGKVATNSVNPSGKQKTITPRGQLHNETVYGRILQPVVKRGKVEFEEMFTIRKAVGPDLKVDKVVDKKVREILLQRLAEYGGNAKEAFSNLEENPIWLNREKGIAIKKVKVKGVNVAVPLHDKRNNQGNLLKGNNGEKIPTDFVSTSNNHHIAIFRDSKGNLQEHVVSLFEAVARKNLGLDVIDKNYNYDKGWRFLFTMKINEYFVFPNPQAGFYPEDVNLKDEKYNAAISQNLYRVQKLSTKYYTFRHHLETNVQEEKVLRDTTWKRLQNTNALEGAVKVRINHIGKIVQIGE

SEQ ID NO: 6855 - protein, 1068 aa, unidentified
  REGION 1..1068: note = Description of Unknown: Cas Enzyme sequence
MARGGKSQLGIHLDVGHDSIGWCVTRTMPGDEKFLIIPGSGVVLFPADDCLANKRRDFRRQRRHIRATRQRIERMKSVLLDMGVMTEGELKRNLTAAPWKLAAEVLTTGKMLSWPELWAVLRWYAHNRGYDGNALATLRSGRVGDAEDIKKNEEARGLMVKYGTASMAETMCHYMKIEPSGKISASRERFKGLGVSFDRSCVENEVRQILLSHKGVLKGVDDTFIHLLMASPVTEPHYLRTIEKLPFHVPNRYWGGVLFGQLAPRFDNRIIGSCPITGEKLPSKGTSEFLRFRFAMMLSHVRVGSDSRPLSADERGSILKAATTCGGFQKGSFKKIVDEVTGENVTNIDALLTAPEADKSLVLLPGLFALTKALSKKGLDAFLEPQVLRRMANRLFRGSKRMTMGDVIAQISADKQEEAKAVLAKAMRKGKKKAADLMREMISAELPSGRAPYARSVLVKVAEAVLRGEDPSGKGGILYRDATKEDVLKEEDIDRETNNHLIRHRVKILLRLLRDIVYDYAENNPAQVSQVTIEMARDLKDLSGMTNKEIVSEMLLKTAHHRNAAKKLAELLHCDVAAVSAGLIRKMRIAQDLDFTCPYTGWKFDPMDVVHKNVDLDHILPRSQRATDSLDSMVLTFTEVNRMKGARTGLEFVREFGGQRVNGRDNLVVLDEKRYRDFVDKLRIDRYSDDKKRQKRRQEKLLKLHSEDAGMTEGMLTRTSYITTLATKAIRGFFANCGRMPRVVSVPGRVTAELRKQWRILDLLAESDPRVLDENGDMRLKQEIRGITHMHHAVDAITLGLAATLLPVDGTFWAMMCKRRVKDEEKRLLASTGVFRFTAQNEPRLVDLPPFLRREISTALAEQRVVVHQPQGRTGLKVQQNTWGVEKIEDGMVYIRQRSRDEKSGKIAVKRDSVTIDKAFGANPISGKGKLKDIKGVLLPDVNFGVALLKKPMFIRHQRVWNELALAKECAGKMPLVVRRGGLIRIASGNFAGVWRVASVKDNTSGIALDIIRPNAVKVQNGVDYAKINVRLAPLVGAGLEVVCQTYTGVASCPTTSLTSRQTGSRSR

SEQ ID NO: 6856 - protein, 1394 aa, unidentified
  REGION 1..1394: note = Description of Unknown: Cas Enzyme sequence
MKKVLGLDLGTTSIGWALVNEKETAQEESSIIKLGVRVVPLSSDEQQNFEKGKSITTNADRTLKRHMRRNLQRYKLRREHLIATLKEQEWITDQTILAENGNRTTFETYRLRAKAATEQISLEELARVLLMINKKRGYKSSRKTNNQEEGQLIDGMEVARQLYDNKLTPGQYMLSLLQQGKRRMPDFYRSDLQQEFDRIWDKQKAFYPNLFTDNLKESLQGKNSKDTWSILRDSWSLVGIARTTKKGIEQNTENCQWRSDALSTQIELEQLAVVLQEINKQISQSSGYLGAISDRSKELYFNRQTVGQYQMAQLAQNPHYSLRNQVFYRQDYMDEFDTIWQTQSQFYPELTPELKHDLRDIIIFYQRPLRSQKGLIDFCEFESQQKEVIIDGKKKIKTSGLRVCPKASPLFQEARIWQVINNIQVTTPDGEVCVLPHESKELLAQFLMVKKELKNNNALSILFHKPKGYSINFEKLEGHRTNAALFAAYGKILEATGHDDIDLDKLDADKAYNTLESIFRGLGINTGILYFDSTLEGEALYQQPAYQLWHLLYSYGGDKSPSGNESLINKLQERYGFDRECASILANVTFEDDYGNLSAKALRNILPYLKEGYRYDEACAQAGYDHSHSITKEENENRTLQDHLQILAKGSLRNPVVEKILNQTINVVNQIIDTYGRPDEIRLEMARELKKTAKQREDMTKAISQGTRTQETIRKRLQEEFGIKNPSRNDIIRLRLYEELAPFGYKAPYSGRHISRTILFSKEIDIEHIVPQAMVFDDSFANKTLEFREVNIEKGNLTALDFVEHKWGKDKVEEYKIRVGQMKCSPVKKKHLLWRESDIPEGFLNRDLTNSQYIARKATELLHQVVRHVYPTIGSITDRLRDDWQLTDVMRELNWDKYDRQGLTEMQDRGDHTVPVIKDWSKRNDHRHHAMDALTIAFTKRSIVQYLNNLNARRPDLKSAEDFANIDLHDLDSIPFDQRSAIVYAIQRKEMEKDQHGKLRFRPPFGTTDQFRAEAKSQLEAIIVSQKAKNKVGTLNGNTTRTKHGKRRRIQVTPRGQLHNETLYGSIQRYATKEEKVGSSFNEAKIQTVANATYRKALLERLKAFGGDPKKAFTGANSLDKKPIFLNAEKSRCVPTKVKIVTLETIYTIRKEISPDLNIEKVVDTQVRRLLEARLKEYGGDSKKAFSNLEENPIWLNKEQGIAIKSATITGVSNAVALHERRDHKGNIILDNEGNQLPKDFVSTSNNHHVAIFRDAKGDLQEHIVSFYEAVERKAEGLPIIDKEYNKAEGWQFLFTMKQNEYFVFPNPETGFLPSEVNLLDPKNAELISPNLYRVQKFSTKDYFFRHHLETTLIDTKPLIDISWRRITNLKKLIGVVKVRVDHLGRIVQVGEYD

SEQ ID NO: 6857 - protein, 1540 aa, unidentified
  REGION 1..1540: note = Description of Unknown: Cas Enzyme sequence
MKKILGLDLGTNSIGWAVVNANVKTRENETTYLKPESISSAGSRIIPMSADILGDFDKGNSVSQTATRTSLRGVRRLHERNLLRRERLLRVLNSMNFLPEHFASQLTRYGKFAKDTEPKLAWCKGYNGKMEFIFKESFNEMLADFEKNQPQLVADGKKVPYDWTIYYLRKKALTQQLSKEELSWILLQFNQKRGYYQLRGEDEEESQDKIVEFLAQKVVRVEATDDKKGNEVWYNIHLENGMIYRRTSRVPLDWEGKIKEFIVTTDLEKDGTPKKDKEGNIKRSFRAPKDDDWTLLKKKTEFDIDNSHKTIGCYIYDSLLQNPNQKIIGKLVRTVERKYYKDELIKILEVQKTLMPELQDEQLYRACIEELYPNNETHRNAIAKPDFTYLFVDDIIFYQRPLKSKKSLISNCPYESRFDNNKKEYPVKCIAKSNPTFQEFRLWQFVQNIKIYERERIISDGQLNLFGEATSGRLQTDVDVTNELLKTEDDYVKLFNWLNNRASIKQDTLLNSYFKFKKEKGKDQFPYRWNYVEDKEYPCNETRAEIIKGLEKCGISLDVLTSEFEMSLWHILYSIEDKFEIVKALTRFAKKNNLPNSFAEVFAKVKPFKKDYGSYSEKAIKRLLPLMRMGSYWNAAAIDKKTLDRINKIITGEYDEKIKDRVREKAINLTEINHFRALPLWLACYVVYNRHSETKDIAKWETPEDIDTYLKDFKQHSLRNPIVEQVVTETLRTVRDIWKQEGQIDEIHIELGREMKNPADKRKRMTENILQNENTNLRIKAMLMEFMNPELQIENVRPYSPSQQDILRIYEENALDNLSKDDKDFDFVSKISKMAQPSKSDIIRYKCWLEQKYQSPYTGEMIPLGKLFTPAYEIEHVIPQSRYFDDSFTNKVICEAEVNKLKDRQLGFEFIKEHKGEIVQLSQGKKVQILSVEAYEDFVKKHYANNRTKMKKLLMDDIPDGFIERQLNDSRYISKYVKGLLSNIVREKLPNGEYEQEAVSKNLISCNGSVTDMLKKDWGMNDMWNSIILPRFRRLNSITGKNVFTATSAEGHEIPQVPLELQKGFNKKRIDHRHHAMDAIVIACATRDHVNLLNNEASHSKFEKQGNANRHQLQRKLRRFEKIEIDGKEREVAKEFLKPWESFTTDARTAIDNIIVSFKQNLRIINKTKNSYQHYDENGQKVVDKQEKGDSWAIRKSMHKDTVFGEVNLRFKKAVSLAEALKKPQTIVNKEFRTKIDEMLQEGRDAKYIKKYLEDNKDVWSDIDPKKIEVYYFTKETTERYFATRKTLDVSFNDKKIKESVTDTGIQKILLAHLAAKGEDSELAFSPDGIDELNRNIVALNQGKQHQPIYKVRVYEKAEKFAVGQSGNKVAKFVEAAKGTNLFFAVFVSDKQNKDTGEIEQVRSFLTIPLNVMIDCQKQFGKDWKNNIESYLKQNELITNDVHLLFIISPNDLVYLPTQEQLKEGIKTIDKTRIYKMVSSSGVQCFFINCRVAKSIVDKVEFSSLNKTERATSNEMIKETCLPIKVDRLGNIIELNGQKL

SEQ ID NO: 6858 - protein, 1225 aa, unidentified
  REGION 1..1225: note = Description of Unknown: Cas Enzyme sequence
MKRIVGLDLGTTSIGWAVVEEDGTMVTLVQHGSRIVPLSPDDTTQFTQGNAISKNQDRTKKRTSRKSFDRYQLRRGKLSFWLKKLSMFPNDDLFKLPLIELWKLRADAASADKKLSLQEIGRVLYHMVQKRGYKHAKSDETNDDKKQKDYVSSINERFNKIVQLNNTIGQFFYNELIKNELVDENGKCFYTYRIKDQVFPRQAYEAEFIQIINCQKKYYPDVFTDDVVDELKDCIFYQRPLKSCKYLISLCDFEKKEFLNSKGNVVSDGPKVAPRTSPLFQICKIWESVNNISLRNRKGEELFISIEQKKAMFDFLNTHDKLTTKDLFSILDIDKKEGWFAGKAVGKGIQGNVTLLELRKALACLDNVDDLLRFDLEIVESGVVDAETGEILSVVSKNYQKQPLYKLWNLIYSIQDKETLKKALKKLFGIDDEAVLSNLYRLDFVKPGYGNKSSKFIRKILPYLQEGMMYSEACEYVGINHSNSLTKAENMARELLDKLPMIQKNELRQPIVEKILNQMINVVNEIIKKFGKIDEIRVELARELRQSKDERNETFKRNSQQDKENKAISERISKEYGLTPTLTRIRKYRMYEEANGICFYCGKPIELSNFLNGIDSEREHIIPKALLFDDSFSNQVCSCRSCNSAKSNTTAFDFMRHKSKAEFENYLERVKEAYEKGDNNKSKISKTKYEKLLTSYEDYLMRKEQGKETENDKRVWENFIDRQLRQSQYIAKKSVELLKQICYNVWTTSGSVTDFLRHIWGYDEILHEINLPRYRRADLTEMVTIDENGQKKEKEKIKGWSKRLDHRHHAIDAVTIAQTKQSVIQRLNTLNAERDAMFQDLEAQNDKIKDKHHLLEKWSMSLPHISVEDLKEKTKGVLVSFKSGKKVAVVGKRYVYYKGKKKVVQSGIIIPRGALHEEGVYGKITIKYKGGVESSEIVKKYVLGIGAQSCVFTGKETYEEKTKKGVTVIEDKIKKVLDSIVDAGIRKIILERLNRGFASGKSYKDDVKKALDNFRNLDTDPVYYNKEKGIVIKNVRMRTGLTAVVPSKYNDENEPISWVKPGNNHHIAIYEDKDGVLHEHIVTFWHAVERKKYHLPVIINDSDKLWEDLDVTKFPQSFIDNLPENGWKLKMSFQQNEMFVLGMSQEDFEYACDANDYNLINQYLYKVQNISASTYRFCLATDTHYDLKQANKPDKRYLNIVSFAALFNLSPRKVKVNILGEVIVN

SEQ ID NO: 6859 - protein, 1503 aa, unidentified
  REGION 1..1503: note = Description of Unknown: Cas Enzyme sequence
MKNILGLDLGTNSIGWALVQTDDEGKGKSILKLGSRIIPMSQDVLGKFDSGVTESQTAVRTSYRGMRRIRERYLLRRERLHRVLHVLGFLPVHFDEALGWDRSTGKTYGKFLDDTEPKLVWTKDLQGKSRFIFMDSFSEMVRDFQKSHPELMANGKSIPMDWTLYYLRDKALKRPISRQELAWILLNFNQKRGYYQLRGEEEETEDNSKLVEYYVLKVVDVEETDEKRGKDTWYNVKLENGWVYRRSSKTPLSDWVGKEREFIVTTELDADGKVKLDKEGKERRSFRAPQPNDWNLQKKRTESNIETSGMTVGSYIYQHMLSHPEEKVQGKLVRTIERKYYKEELVAILQKQAEFIPELKDAAMFEACIKELYAKNEAHQESLRRKDMVNLLVEDLIFYQRPLKSKKSLISNCPYEQYEYVDKQSGEIKIQHIKCVAKSNPFYQEFRLWQFVQNLRIFTNTGIDEQDVTTDYLKCEEDYVRLYDYLNDRKLISQDTLLKDFFGLKKPRGKEAKYPCRWNYVEDKEYPCNETRHTLLNALKHADIDTAWLTPDREYRLWHLLYSVEDKNEIIKALTKWSEKYRLPESFVESFKKIPSFKKEYGAYSEKAVKKLLAVMRMGSRWNEEALPSDLLARFEAFSSEGADINIAERISRQGKTFNSLADFRALPIWMACYVVYGRHSESKDITRWEKPEDIKTFLLDFKQGSLRNPIVEQCVLETLRTVHDIWQQYGHIDEVHVELGRSMKSTADQRKRMTNTIQANENTNMRIKQLLMELKNDSTIADVRPHSPMQQDILRIYEEGALQELKSDDPDFAEISRISGLAMPTQAELIRYKLWLEQKYRSPYTGKAISLSKLFTPAYQIEHVIPKARFFDDSFSNKVICEAEVNQLKSSQLGYEFIMAHGGEIVTCPTLGDVKVLTKDEYKAFVSDHYAHNKPKARKLMMDDIPEEFIQRQMNDSRYISKLVKGLLSNLVREEGEVDAISKNVIPCTGGITDKLKKDWGLNDVWNNIVGPRFQRMNELTGSDQFGHWEDKDGKRVFQTTMPLELQKGFSKKRIDHRHHAMDALVIALASRNIVSYLNNESARDTERRRDLKFLLCGKGQTLFKPWDTFTQDAQQALMDIVVSFKHYVRVINKASNYYEHYDENGKKVLMAQQSEGQWAVRKPLHKETVFGRVNLRRTKEVSLNVALDQVQNIVNKDLRKKILLLQAEGKDKKKIKAWFAEHDDMFNGLSVKKVAVHYFTDDDTPMVATRKPLDDTFDAKRIASITDTGIQKILLAYLEAKGGDPKLAFSPEGITQMNQDIAQYNGGKAHKPILCVRIYEPKGEKYNVGTKGNKDKKFVEAQSGTNLYFAIYEDAEGKRTYQTIPMNYAAERLKQGWSPVPETNEAGVPLKFWLSPNDLVYVPNEEEFQTLSSNIGKARCYRFVDSSGTTANFVPAYSASVLYHMKKEDAKNICMNEIIQDEYGVGSPQSKNQKALSGEMIKAICWKLEVDRLGNITKIIK

SEQ ID NO: 6860 - protein, 1434 aa, unidentified
  REGION 1..1434: note = Description of Unknown: Cas Enzyme sequence
MSGKVLGIDLGTSSIGLSVRDTDVEGKVSDQLDFFTSVIFEAGVGVDKTGEFSRAAERRSHRSSRRLNQARRYRIWRTLEVLIEHGYCPLKKEDLERWKTYDKTRDLRREYPIWADHFEKWVRLDFNCDGKPDYTSPYQLREELATHKLDLTDQTERYKLGRALYHIAQRRGFKSSKGETLNEIENENEAEDLDESMKKSELKKCGKLQEYMNQNDCKTAGCAFAKMERDGIRVRANTDFQAVRDLYEKEVRVIFEMQGIDASGEFGRSILSKKKDEGSIFFKRPLRSQKGTVGKCTLERDKSRCPLSRPEFEIFRAWSLINNIRYRTSENGEEKELTLDEKNRLFNAVFTRAKKTFKFEDITKFLKKEKGELYKLNYKDKTVVSGCPVVCKMKALLGEEWETATVKGSSIRQVEKLYNYEELWHKCFEAEDAEEVLEFVNSHLEVADKDDFGKKMVRLWGSMGEGYSNLSLKAINNINRVLREGMIYTDAVLWAKVADIVGESVWESERVVMLDSYEGIKFETEKHRRCAKLANEMIARYKVLSDEERDIYREGDYTLDDNDRKSIREAASEMLTKEGWKRLDDNERNEMLEGAAEQYQQFLRSREKEYVKVPKLTDGIASFLEEQYGKCIKPNYKGKIADALYHPSAIAIYAPQKERNIKYNGVLLSKKLLGSPATDVFKNPMVMRVLHTLRRNINKLILDNKIDEDTRVVVEMARELNDANARWAIETYQREREAENIALRKRMEELFPNRVINEVDIQQCRLLLEQAMLDRDCENLKALQKQVKELKSKDAQYGKDITKYSLWLEQNCISIYTGKPIRLSELFDSNKYDIEHTVPRSLCFDDSLANKTICEADYNRNKKKNRVPSELSDFEAIKMRIQPWIDRRNAMKELIDFWRGESKKAVAGSDRKNQCIRQQHLWKMEFEYWNNKVERFLIERDRVGEGFRNSQLVDTRIISKYAFHFLKTVFSKVEVQRGDMTADFRKAFGIQSVEEKKSRDKHSHHAIDATMLTLIPTNKKRDRMLELFYEIEDKKRINEDTSKQEKEFAVLRKQCNIHGVDEVAEFIENNILIRHDSKDQTLAETRKKIRVRGKIKKDANGKAMYMTGDAIRGRLHKETYFGAIKYPLTDENGEIQLRDGQYVYEKDKEGNEVITMVVRVPLNSLSKYEEIDIIVDPNVRRSVRMTIDKRLVEGMKFADAINGEIYMLDQTGNEVKEDKNGRILRPIRHVRCKVKSGMGFFTMQKALSIRRQTYKSAIPYKNNVYAQNDGNYLCLLYEGEKKGKIKRRMVFVNYFEIAQMGIRSIAELRNKVNYATMVYNGVDYKLKSILKTGTNVLMLDGSVDDIRELNPDQLNKRLFVVFKFNNSGSDYLYLQNAIEARSNDKMTKDGLKGDGETVYDPSRYQHRLKLNADNCNFLIEGVDFEITTKGIEFK

SEQ ID NO: 6861 - protein, 1223 aa, unidentified
  REGION 1..1223: note = Description of Unknown: Cas Enzyme sequence
MKKVLGLDLGVSSIGWSVISVDDNDNPSQILGMGSRIIPLSPDDANEFSSGNAISKNQKRTLKRTIRKGYDRYQLRRENLTAELRKLNMLPDEHLIKLPLLDLWKLRSRAAQSGRKLELTEIGRVLYHINQKRGYKHAKADEAGDKKQTEYVAAVNERYRMICSNNQTVGQYLASMIEQSAVTNDKGVFYTYRTKDQVFPRKAYEQEFDQIISVQREFYPDVLTDKEINRLRNEIIFYQRNLKSCKHLVSLCEFEKKAYTNKEGKEVFDGPKVAPRTSPLAQLCRIWEFANNLQLENEYGEKTPLDLEQKRLVVEYLDSHEKMTATDFQKLFGFKRGQYNLESYFGKNGVKGNETRIALAKALADVPNASELLKFDLEEENSNYVNESTGEVLKCISASFEKQPLYVLWHTIYSISDRDELVKALNKKFGFDKEIAFALFKIDFVKPGFGNKSSKAMRRILPFLRQGLMYSEACADAGYNHSNSLTKTENEARELLDRLPQIKKNELRQPIVEKILNQMVNVVNAIYDEYGSVDEIRVELARELKQSKDERKETYSNIGKRERENKDIAGKIQEFGITPSKNKIQKYRLWEESGHTCFYCGQPVGATEFLSGFDVEVEHIIPKSLLFDDSQSNKVCACRKCNKEKNNRTGFDFAKSKGEVFFEAYCKRVDEAFRGHVISKTKRDRLMTPQNEIPNDFIERQLRQTQYISKKSIEMLKQVCHNVYATSGSVTDFIRHTWGYDEILHNLNFERYQQGGLTEIKEYEHKGQKHTEERIKGWSKRLDHRHHAIDALVIAMTKQSIIQRLNHLNTERDAMFQEVGAQSDDWKKEFSLLQQWVKTRTHFDVDEVSKKVSEILVSFKAGKRVATMGKRIKYENGKKKVLQTGIVIPRGPLSEESVYGKIKVLDPQKPLKDLFAKPESIAKPEIKAMVKDRLALFDGDVKKALASVKKTPIKLADESVVKMADCYREECVIKYSLEGFKAKDIQYVVDEHVKQVLYNRLAEYDNNEKEAFKDLENNPIYADAAKKIPIKKVRCFTGLSAVAPVKRNENGEAIGFVLPKNNHHIALYLDAAGNLQEHVVTFWHAVERKSKGLPVVITDPKSAMQIADINGVTEEFKANLPNLEWTFVDSLQLNEMFILGLKNEAYETAVAERDYSLLNLHMYRVQKITKSDYYFRRHVETVLDDSPEARLSEKFYRVKSIGAFNKLNPHKVSVSLLGKLIVK

SEQ ID NO: 6862 - protein, 1332 aa, unidentified
  REGION 1..1332: note = Description of Unknown: Cas Enzyme sequence
MKKNQNDRNPGYYYLGLDVGTSSVGWAVTDPEYNLLKYRGNAMWGVRLFDEANSAAERRSSRTARRRLARSKQRLLLLEALFAPVLVSVDPHFLSRMHESDLWIDEKKYGYFSLFNDPDYTDREYHKAFPTVYHLRSELCRSSEPHDIRLVYLAIHHIMKSRGHFLYETSDMGDSIPTVQDTLNQFSMFIKENYGQIWEPQKKDTYISVLQKSTLGVSEKKKILKEALGVQEEGEWNPVAISDLLSGASVTLDKLLTNEESHSASNVCEIKSICLKNDLEEQYDVLSSCLGDHIELLLQAKTVYDVARLTQILDGCNSISDAKIAQYQKNHRDLHLLKKYIRAVAPDMYKTVFSGKKDKLNNYPAYSQYPSESGEYTCKQEDFCKYLKSILPKQAPTQEEFLPIHAMITDGTLLPRLRSSDNGVIPYQLHRAELKKILVNASGYLPFLSEKDSDGLTVADKILKTFEFRLPYYVGPISTVPGCTNHWAVRFSGHENDRVFPWNFDQIIDLEKSADTFMSNLIERCTYTGEPVLPKDSLLYSEYALLNEINPLKINGHPLPAKVKSQLINDLFRNSAKKVTKRRLADYLLQNDYMSPGDELTGIDDSIKTVLKSYHDFALILAKTGDTGVVEDIIRSILVFGDDKTMLRRWLKKNVQGLNENDIKYVCRLKYAGWGRFSRVFLEDIYHEEDTGEVKSIMDYMRNTDKNLMQLMSGEYQFSAKAEAYRSELFGINRSLTDRLNDLYIAPAVRRSLRQTLRIVDEIVDIRKSVPQKIFIEMARDSKEEMKGKRTESRKDKLIALYQSCNQDQNALLEQLNAEDENKLRSDALYLYYTQFGRCMYSGEIIDLDRLSSDYDIDHIFPRSRIKDDSLDNRVLVKKTLNHDKSNIYPIESEIRNCMRAFWSVLKDKGLISSKKYERLTRSTPLSDDELSSFVARQLTETQQSTKALAALLKERYGDNTIIIYSKAGNVSGFRHQFDLIKYRDVNDLHHAKDAYLNIVVGNVYATRFTDRFFLNIRNENYSLNNVFDSDTAGAWKKDETIHTVKRIMAKGNVIVTRMPYMAKGALFDLQLMPAGKGQLEAKQGRDIARYGGYNKITGSYFCVAEYTEKKKRIRAILPVFLYCRSIYENNPVQYCKEILHLQDPIIIAPEIRVGSLLELNQQRLLIASRTGDAIRFKHTYQLVIDYESEKYIKDLTKYMERCAARKQVLPISEKDGLSVDKNLSVYDLLVDKCKKSVYIEFTKNMVTELENKRDAFRVLSILDQAKQIHEILKFFHTDAQIASLELIGGVKSAAIISKNKVISSLDSACLINQSITGLYETRVDLLGEENK

SEQ ID NO: 6863 - protein, 1498 aa, unidentified
  REGION 1..1498: note = Description of Unknown: Cas Enzyme sequence
MSKVLGLDLGTNSIGWAVVNKEQTDNGAILTGIDAAGSRIIPMSEDILGSFDKGESISQTAERTQFRGIRRIRERTLLRRERLHRVLSHMKFLPTHYDQELNRYGKFLNDSEPKLGWYMNEGESYKFLFMDSFYEMLREFQEVHPEFTLNGKKIPIDWTIYYLRKKALSEKISKEELSWILLNFNQKRGYYQLRGEDDDTPENKRIEFYALKVVSVEATNEKKGNDVWYNIHLENGWIYRRTSKYPLDWEGKVKEFIVTTDIDEDGQPKIDKEGNVKRSFRAPKEDDWTLKKTKTEYDLKQSGLTVGAFIYNSLLHDPNKKIIGNLIRTIERKFYKEELTLILEKQKTFHTELQDQNLYTECLELLYEHNDAHRNNNANRDFTYLFVNDIIFYQRPLKSKKSLISNCPYEENIDKVSKEHHPIKCIAKSHPLFQEFRLLQFLQNIRIYLKEGINDKGKFATDIDVTRQFLRTIEDYQNLFEWLNDRKEIDQKEFLKYPGFGLKKEADKYRWNYVEDKKYPCNETRALITSRLNKAQVSLDFLSKENEEALWHILYSVEDKIEIEKALTTFANKHSLPTSFVEQFIKFPPFKKDYGSYSAKAIKKLLSIMRFGKWWSMDAIDDKTKTRIDKIITGEYDEKIANRVREHAIALEKINDFQFLPLWLACYIIYNRHSEAKDFTKWKKPEDINTYLASFKQHSLRNPIVEQVITETLRTVRDIWSQCGTIDEIHLELGREMKNPADKRKRITERNIENENTNLRIKSMLLEFKNPEYDIEGVRPYSPMQQDILKIYEEYALNNLEKDDQNYDFISKIAKLAQPTSSDIKKYKLWLEQKYRSPYTGEIIPLGKLFTEAYQIEHVIPQSRYFDDSFSNKVICESAVNQLKSSMLGHEFISKHAEEIITIGVKQVKIFSVQAYEDFIKEHYSGNKMKKLLMDEIPDQFIERQMNDSRYISREIQRLLSNIVREDDEKEATSKNLIPCTGGITDRLKKEWGVNDVWNRIILPRFQRLNEITGNPVFTTTNTSGEEIPSMPLELQKGFNKKRIDHRHHAMDAIVIACATRDHVNLLNNEAALSKNNSNRHALSRKLRRYETITITRNGQLKEIEVAKEFFKPWDSFTQDVHTTLDNIIVSFKQNLRVINKTVNHYQHYNDEGKKVTFKQEKGDSWAIRKSMHKDTVFAEVNLRKIKEVSLKTALENPSRIVKQDLKKQVKILLAQGYDAKKITKYIEDNKDIWNDINPKKIQVYYFTKETNDRYFATRKAIDTSFDRKKIEESITDTGIQKIMLKHLEQNDNNPEKAFSLDGIDEMNANIQMLNNGKKHQSISKVRVYEKADKFAIGQTGNKCKKFVEAAKGTNLFFAVYASTEGKRSFATIPLNVVIDRQKQGLSSVPNTNENGDALLFVLSPNDLVYVPTKEEINSRVINKLEKERIYKTVSCTGTECHYIPFSSAKPIVNKVEFSPMNKIGRSLSGEMIKDICIPIRTNRLGNIISIFDIDKSK

SEQ ID NO: 6864 - protein, 1213 aa, unidentified
  REGION 1..1213: note = Description of Unknown: Cas Enzyme sequence
LLKIISDMEKILGIDLGTNSIGWAIVERDGMSTKLLDNGVHIFQEGVNRVKGNEEPAVKTRTEARASRRHYFRRRLRKIELLNILVENAWCPYLSSDELKEWRVSKKFPLNADFINWLHTDDNKDCNPYHDRHRCLNETLNLSIREDRYSLGRAFYHLNQRRGFLSNRKDQGSDEENGKVKTAIGELDAAMASVGYEYLGDYFYHLYQEGGKIRKHYTSRNEHYLKEFRAICKKQKLDESVAQRLFDAIFFQRPLKSQKGLVGKCPFESGKARCAISHPAFEEFRMLSFINNIRLALPGEKDMRALTQDEKDSILPLFYRKSKSNFDFSDISKKLAGKNVLAVFSNYGADADINTFRINYRDSANVSGCPMSAQLVSIFGEEWQNGICEQYTLSKGKSQQQIIDDVWHVLLSFDNDDKLTDWAKNRLQLSDDEVKSFVEIKVPQGYASLSLCAIRKMIPWLREGYRYDEAAMLANIGKVVPIKVWTEESSRSDVLSAITGVVTHYTPNPDIKNDSKQRKIEEELCNLGIFDIDMSKLYHPSKIEVYPKSMPNQKGFVLLQSPRTDSVRNPMAMRALFRLRALVNELIKEGKIDCATKINIELARNLNDFNSRRAIELFQRENEKRRESYRKSIEEYYHDNGINGIPSEDDILKYELWEEQNHMCLYTGKQISISGFLGENPLFDIEHTVPRSRGGDNSKANKTLCECKFNRDVKKGHLPSELANAAEILSRIESLGWDEMMENLHKDINKSTRSAKAASDKATKDKAIQRRHYAKMQLDYLKDKSRRFKMTDVPDGFSNRQGVDIGIIGRYARMYMQTVFPKVYTVKGETTAEFRKMWGLQDNYSKKERINHCHHCIDAITIACIGRNEYDLWAQYKGDVESHFLYGTPRPTFKKPWDTFTEDVKGITDNLLVSHYTPDKMGKQSKKVLRKRGVIQRDAGGNLKYVQGDTARGSLHLQTNYGAIKSDDDIRYVVRKELASLSEKDIKNIVDDVVRAKIENIVKSEGISALQGNVWMNEEKGVPIKKVRLYVPSVTNPIALKRQRFESDKEYKRQVYVANESNYGIAIYEGKKEKGKTKRSFILRSNIEAARILSIPNNQLFPDVDTSGNKLQCVLKNGTMVLFYENDRQELLCASNEELSKRLYKVSGFSTMRIQQYEYGMMTFVHHQEARSSGEISSNSGVWRSSDSYRAKIALNHNQIKAMVEGYDLPNLI

SEQ ID NO: 6865 - protein, 1068 aa, unidentified
  REGION 1..1068: note = Description of Unknown: Cas Enzyme sequence
MKFRRKMRKWHLLKLLIRAKMCPLTAEELEAWQKRGKYPLGNRTFVDWLKATDASNPYCDRDAASRGKVGPFLLGRALYHLCQRRGFKSSRKDEAVLVDEETGELKKPDKETGKVKGGIAALTDEIRAAGCRTLGQYFYKCLESEKGKLAKTRIRCRYTGRIEHYENEFAVIMDVQGYAERDKLREQLHDAIFRQRPLRSQKHLVGNCPLEPRNPRAQIGHPAFEEFRMLAFVNNLTLEDEDGNWRDDEGKFLYPLTQVDREAICAKVSAVGKATFKTVKPLFKNDPRFVEKHLRFHYYDEGDAIPSCPTRLNIAKNFGDVAYDEQQVFDALTFYDDPDKLMGWFRKHYPALDEKSVAKLAHIYPKEGNANYSLKAINKMLPFLRCGFELSHARFCAKLPDVVPDYASHAGEVLLHVEETYRQYRHEKAERAAMPKQIREKLPKLPTLHERYAEMLDRDFGVTPEKFTKLYLRNDETYEKETCYYPHGKKGECVKLAHPRLPPVHLGMIRNPLVQRSMTTLRRLVNYLAEHGKLDDGDTIRIELARSVNDFATRKAYQEWQKGRAALRDKAVSEIAKYGKAATEDAIERFVLADEQGCTCLYTGKKIGIAELLDGNAFDIEHTLPRSLSGDDALANKTICDATYNRQIKQGRVPRDCPNWDEIDVRLALWREKLEEIEKNCRNQLKKAKNASDPAAKSGARVKALVTKMERDYWRDKLRRFDMTMDKLAAHAGEGLGFKRRQLVDTGIMCSHAVDLLKCVYPQTYAVNGAATAFARKAWGIQGDEAKDRSEHTHHAKDAMVIAALTPMRFNAICTALKDDGMERKRECDVCPPPCAGFADKVRKAADEILVKHILRQTTLRQSSKRNALAHAHPQKDNPTKTVKYVLSKGDTVRGQLHKDTFYGCIMDPKSATLQKVVRKSLVGPVKDAEAILDKIVDPAIHDIVSDAVAALKENGTKFIENGMIRMPSGVPINKVRIFMPTATNAWELRDHAMVSKKDYKRPYYVTSAEGSNFRLAVFNTDGTFSVKPDNSLVWAQNHKKSDYVPYDKQAGFVGYVMPGAMALAHAE

SEQ ID NO: 6866 - protein, 1029 aa, unidentified
  REGION 1..1029: note = Description of Unknown: Cas Enzyme sequence
MKNILGLDLGTNSIGWAMVQTDEEGHYQSKIKLGSRIIPMTQDVMSSFEGGAPIQTATASRTQKRGVRRLNERRVLRRERLLRVLHLLGFLPSHYDVAFGWDRRNTKTFGKPKQLGAEPKIAWDRDSQGKPQFMFMQSFSEMLTEFAAQHPTLVAAGKKIPYDWTLYYLRQKALVAPVTKEELSWILLNFNQKRGYYQLRGKDDISDLEEDNSKRIEYIEQTVSYIDFDPQERVSDKGRWYNVHLDNGMIYRRQSKTSLDEWIGKKREFIVTTSLNEDGTEKLDKDGKVCRSFRSPSPDDWTLRKVRSENSLTNSGLTLGSYIYQHLLNDPSGKIIGKFVQTVDRHFYKEELYAILRQQANYHSELNSSEMLAVASHELYAKNEARRYSLQQKDMAYLLVEDILFYQRPLKSKKSLISNCPYETRQYVNRQTGEIVHSPVKCIAKSNPLFQEFRLRQFIQNLKIYDTTGAKEENVTERYLSDMVSYDRLYRWLSDRAEVSEESFIKEFLGFKKPKGKEAVYPVRWNYVSDKKYPAGETRALLLKGLEKACVDKTLIDDPQAFYRLWHLLYSIDDPQELAGALIKFAEVYHFSDATVFADVFTKLKPFDKEYGSYSEKAIKKLLPLLRDGKSLHEACYEIYGRYSEGLSTSKWHTPSDLKQYLMQFQQHSLRNPIVEQCVLETLRTVADIWQQYGHIDEIHLELGRELKNPADKRQRISEQNRQNENTNLRIKALLQELMNDPAIADVRPNSPMQQDILRIYEEGALQELKSSDPDYKEILTISQMAQPSAAQITRYKLWLEQRYRSPYTGRIIPLSRLFTTAYQIEHVIPRARYYDDSLNNKVICESEVNKAKSNLLAHEFIALKGDSVIETISGPVRVFNILEYETFVQEHYGRQKAKLSRLMMDDIPEEFIQRQMNDSRYISKLVKSLLSNIVREEGEDQDISKNVIVCTGSVTDRLKKDWGMNDVWNQLVYPRYERLNQLTGTTLFGHWEEKDGKHQVFQTSLPLSLQKGYSKKRIDHRHHAMDAL

SEQ ID NO: 6867 - protein, 1213 aa, unidentified
  REGION 1..1213: note = Description of Unknown: Cas Enzyme sequence
MRKVLGLDLGTTSIGWAIINQAESTEEKSSIINAGVRVNPLSTDEIGSFEKGKAITTNADRTLKRIARRNLQRYKLRRDNLILIMKREGWITDDDPLSETGYYSTHQTYKLRAEAASREISLKEFARVLLMINKKRGYKSSRKAITQDDGHLIDGISIAKQLYEQEITPGQFCLSMLEDGKKRLPDFYRSDLKSELEKIWMVQREFHPNLLTDNFKEEISNRSRTVVSKIFYAKYGIASADNKGKDRKIQSYRWRVEGLTKQLSEEVLAYVISDICGEIENSSGYLGAISDRSKELIFSNRTVGEYLYDNLLSNKIFTTKNQVFYRQDYLDEFDRIWDVQAKYHPELDSALKSEIRDIVIFYQRRLKSQKGLISFCEFENRCRVTPRSSITFQEFKVWQVLNNLEISGPEIEGSRHLSLEEMGQLADELSIKSKMPVNDAFICLFGTKKNYSANYKTLEGNNTINAFYKKYLEIIDASGHGEYDLDKLTHNQAHTIIYDVFSALGFNTSILENGPEMFRLWHLLYSYEGDKSNSGDRSLIEKIGQICNMPEEYSKILAGIVFQSDYASLSNKAICKILPYLKEGNTYDMACLYAGYRHSKASLTKEEIENKTLVDRLEVLPKNSLRNPVVEKIINQMINVVNSLSETYGKPDEIHIEMARSLKQTAKQRETASRTIAENTRDNDRITAILQNEFGLKYVRNTDIVRYRLYEELKENGYKTLYSNKYVSREILFSDQIDIEHIIPQALLFNDSFGNKTIEFKDINREKGRDTARDYVEKKYGSEGYKNYVLRVEDLFKRGEISKTKRANLLMSKSEIPEDFVNRDLTCSQYIAKFSKELLESYVKVVVPTNGSITKRLRQEWQLVDVMKEINLPKYRAAGKTTKDEIVNGKETEHISDWTKRNDHRHHAMDALTIAFTTPAHIKQLNTLAARDEYDNSVILVAPMPLKELRAQFKQHIESILVSIKAKNKVTTRNINRTKCHSGYNETVTLTPRGELHKEQIYGQRRQYETYFVKIGAKLTYEEAQNIASKKEREIILDRLAEFNNNPKTAFAPKSLPEGFPEKVKCVRFKTLYSIRKNIDASLSVDKVIDTRIRKILSDRIAEFGGDQSKAFSNLDDNPIYLNREKGIKLKKVTIAETFDLCALHDKKDMDGKTVLDENGNTIPVDYVNLRNNHHIAIYEDSDGNLQELVVSFFEALNRQSDGREIVDREYRR

SEQ ID NO: 6868 - protein, 1363 aa, unidentified
  REGION 1..1363: note = Description of Unknown: Cas Enzyme sequence
MKKANYYLGLDIGTDSVGYAVTDEKYNLLKFHGEPAWGTTVFDRAALSEERRAFRTSRRRLDRRQQRVALVRELMAKEIEKVDSKFYVRLQASALFREDVGEPYTLFNDANFTDNEYYEKYPTIHHLIFDLMHSEEAHDVRLVYLACAWLVAHRGHFLSNIDIENLEQIKDFRTVYSSFMNYFIDNGMEKPWKCDDIDEIGSLLKKKQSISAKTKDLGRLLFNGEKVPKEPTEEFPFNRDSMVRLLSGGTCKLKDLYCNEEYAEFGSVSLGMDDDKLGEIMSNIGDDYDLIAALRTLMDWAVLVDVLGEYECVSESKVKVYEQHKEDLKLLKKMVRKYVPDKYNDIFRVIGKDNYVAYAYHTDESNSESLKKKNQEDFSKYVLSIISGITASDEDQEIISQMISRLELRTFMPKQKNTNNRVIPYQVYGYELKKILEKAGKYLPFLNEKDEDGLTVGEKIYSVFTFKIPYFVGPLNSHSQYAWLKREQGKIYPWNFEKMVDLDASEQNFIQRMTNTCTYLPGETVLPKDSLLYHQYMVLNEINNIRINQEKISVELKQNIYKELFMNVKKVTKKRLLDYLISRGEISKGDEELVSGIDIMINSNLSSQIAFKRLMESNILSQEDVEKIIERASYAEDKSRLAKWLEKHYSNLSEDDKKYICRIKLSDFGRLSRKFLSELEGVNKSTGEVVSIIGELWNSQNNLMELLSEKYTFMDVIREYQKEYYSEHKMSLSDRMDELYLSNSVKRSVYRTLAIVKDVEKAFGKPKKIFVEMARGGSEAQKGKRTLSRKQQILELYAQCKDEDVKILTQQLEAMGEYAENKLQGDKLFLYYMQLGKCMYTGQTIELEKLGTKLYDIDHIYPQAYVKDDSIINNKVLVLSEANGKKSDKYPIDAEIRHKMIGFWKFLRDAGRVSGKSEGLISEEKYKRLIRTTGFTEEEKMGFIQRQLTETAQSTKAVATILGERFPEAEIVYCKARLTSEFRQEFELYKSRLFNDLHHAVDAYLNIVTGNVYNMKFSKRWFDVKNNYSIKTRTLFTHPLICNGITVWDGEEMLSRVKKIASKNNAHFTKYSFYKHGGYFDQMPVSASSGLVPLKKGMDTEKYGGYNKAGIMFFIPVKYTAGKKKEVIILSVEMLYGHKFLKDSDFAHEYAMNRLKNILGKSVDSIEFPMGMRPWKVNTMLSLNGFRICIAGTGSGGKCLVAQSVMQFSENSFWTYYLKKLEMYVEKISLNAAYIYSEEYDHISKEKNMELYDIYVNKYQNTVFKYRVNAPLSILVKGRDVFEKLSVTEQAKVLLNIHQTFGRTSSGGCDLQLIKGAGKAAATVNFSSSISNWKKNYTDVRLVDSSVSGLWQKESEINLLELV

SEQ ID NO: 6869 - protein, 1370 aa, unidentified
  REGION 1..1370: note = Description of Unknown: Cas Enzyme sequence
MKTILGLDLGTTSIGWALVKEGDNADIIKIGSRVIPLTTDEITNFNKEKSITINAFRTKKRSMRRNLERYKLRRENLIQLLIEEKVINEATLLNEHTNDSTFQTYKLRANAAKVKIELDEFARVLLMINKKRGYKSSRKAQGEDEGQAIDGMSVAKILYEQNLTPGQFAFDILKKDKKAIPDFYRSDLNDEFDKIWIFQSNFYPEVLNNTNKELFEGKAKNQTSAIFNKELKIESVDLVGKMNEKKFQRYELRSKAINKQLTLGELVEVFSDIKGNINNSSGYLGAISDRSKELFFNNVTVGEYLYNQVIENPHTRLKGQVFYRQDYLDEFETIWEQQAKFHTVLTPDLKKEIRDIVIFYQRRLKSQKGLLSTCEFESFTRNTIVDEKPKAQKFGPKVIPKSSPLFQDFKIWAQLNNVEILDVFGKSKVRNHLELEEMNLLYDELKYTDKLSTTEINRILGFQVKYKYNFENLEGNRTMAAFIDSFQKIIELSGHDDIDFKKMSGGEKIKTITDIFSMLDFETSILSYSSDIEGKDHMNQPIYQLWHLLYSYEGDNSKSGIESLLTILKTKFGFDKEYASILSNTKLQDNYSSLSSKAIQKILPHLKEGHKYDEACALAGYKHSNSQTTAQLDAKVLKDKLSILSKNSLRNPVVEKILNQMINVVNSVIETYGKPDEIRVEMARELKKGAKERENMTKSMNEANRNHDAIRITLQTEFGIKNVSRNDVIRYKLYLELKDNGYHTLYSNKYISKEMLFNGEVDIEHIIPQAKLFDDSFSNKTLELREVNIKKGNLTAIDFVTEEYGEEGLKQYEERVNTLFNKAEKRTKFKKLMWKEEDIPDNFINRDLNDTQYIAKKAKEILEEIVRTVGTTTGSITNRLREDWQLVDVMKELNKPKYQALGLVEEIENRHGHKISKIKDWTKRNDHRHHAMDAITIAFTKPSYIQYLNNLNAKNDKTGVIYAIQNKETYFDKDNKRRFKPPMPLDVFRAKAKEHLENTLISFKAKNKVTTKNKNTTSKAGGQSTVISETPRGQLHLETIYGSSYKYETKIEKVNASFDALKIEKVAKKKYREALLQRLNENDGDSKKAFTGKNSLDNNPIFLDTLHTDFVPDSVKLVWKEQQFTIRKGISPELKIDKVIDKKTREILQKRLDEFNGDPKKGFINLEENPIYLNKEKGIVLKSVTITGVSNAIALHNKKDHFGKDILDADGNTIPVDFVNTGNNHHVAIYRDEKGNLQEEVVSFMEAVTRKNMGLPIIKNKHENGWEFLFTMKQNEYFIFPNEKTGFNPNEIDLMDEKNYLLISPNLFRVQKFGSLLSGFWFRHHLETTIETSKELKSITYKVIQTTKNLENIVKVRLNNIGHIVQVVDY

SEQ ID NO: 6870 - protein, 1122 aa, unidentified
  REGION 1..1122: note = Description of Unknown: Cas Enzyme sequence
MSIVFGFDLGTGSLAAAIRKDDKIVWKRSFLFPEGYASTQQGREKRRMSRTRNAHRAREYAWNVHCKALGIPVLKEFELKKNGDYRVIHGSIQPELLREFPAKGDSTVYNSALLRIMILEGKIKELQPWQIYKAIHSAIQKRGYDPQVPWMRKAPAVVKDLDDDAEGNLTEGELLTDVTPKTKGAKNAKAPAKKTNAKKIEDEDALETKLEKKAKESKDDEETQVNLDKFNTHLAELGLPQKYQLCCYFDAHKMGLWSPDKGVLSVRIDHHAKQAAVDDFKGYTPPRKMVEEELKRLLTEIKKVYQDLDPDYILHGSSREAYGSHNVKIAKELRLKAGGVGDWEGVLGQKIPRFDNRIIDKCLLIPRLNVAKKAAKASGADQNLFYEFDVAMGLHQMRVQGNDLEPRNLSLTEYRPLFEHFRDPKNRWTKRRMQTELKTRNLKFISGREEVKAVSQETTGRSGFSRVSVRQIIEMLWEGYSPSEYKEVLLKRPVSQKSTVTIHDNKEPSKGLIASDLKWLDEIIDCTWDNFYLPQVKYKNPYEKNDSRQAITELFSNVNDPVIRHRLSMLGRTIDEMASFTSKQFQQRSPDNVCLELVRDDFLSEKKKKEIQASQLKNQKDNERLRKLAAKYQLDGKDMILRLKLWENQDGRCPYTNASLSQTKLADYEIDHIFPASRGGPDNQWNYVLTTREVNKDQKMEQTPYEWLSKNPVTWKAFCDNVNQMEKLSHTTRRLLMEKNPEGIIEKKTHIAETAHMAKLAVGLINLKFGWLPHTFGHERRVITVSGGVTAMVRRRYKLDGILAPEEEIKNRDDDRHHMLDAMVLCYLPHWLNNKEKREKFKLPTGIDKNYFSSLIENHLPLNIPESPKLEENFYGKHGSSHVTRRDQVVDVAIKKVNFKDVFAPKSFEAWSQKLKNSGTLDKSMSAYLEKLSLFIQEIPPQEIENGAGLEKWLRKIQKTTLKNGTVPKKIKTFDSLHSEHRKRQDSPHAPEGYIKPKGSHKGFFICSKIENSKKVQKSSEPSWEAVALYAWESFSQKKAQLDGQKRRIYCFVRSGDYIEVKRKIGDQIKLGVYKLNSIMGGSQLEITDIQDPALRLPKLVINRFVNEGQFIPLEAGAEIHL

SEQ ID NO: 6871 - protein, 988 aa, unidentified
  REGION 1..988: note = Description of Unknown: Cas Enzyme sequence
GVVSYLVAVGAEPDGLPAYDKKLKKMIEPAGWDGVRLNTLLCRLVDGTMKASALEKKTLYQILYFAVRRRGYDPQSPCGEGAGDVSKSKEMQGLFDAFDRDLRAINSPTQRTIFHCYAVRDGVLNPETGAYGTKTHTADRRGPKGGGGLAVKGYTAPRAHIEQALRNLCAALAGELPALDAARFLYGPTGRPYDNTTKRSDVLAAAGRHAPRHSDIAGAVGQKAPRFDNRGPGLCRVYPRHKVPRVPDSSSFRAFKRPHLGPRPGLNVGFDFWKMIRLTNLRVRKASERSGAPLTPEERRRVFDHFHDNPSLAKKALKAFLKNEFSYVLISDGGDDDDGAMRMKSAGRSRFSRPAQQDIFRMLYQGLSPQETKRQIAADIAAGERVDITVEDLAWLDSYPQPHAPLAAFYIPNFDRAESVDELLASITDPRVRHRLQYLVLPGLLGLRELFAQNGISHKDVVFGLETIRDETDHSFLGQEAKKKIHQDNKKRERENQAMRAAASELGLSEGDFKKYRLAARQGFMDPYDGGAIEPSQIASGRYEVDHIIPRSLGGSDEQINLVLTSRDNNGKKNNRTPVEWAQDEGRLEAYDKILNLKAFKDLPHKTKALLAAESLEKGLEIINSRSDLNATGHIEKLAADLVRLVFGLDDARVKGSTRQIFFLSGRRTAGIRKKNRLDKILYGDITNPHKESADQARKSIKNRENKKHHYLDALTMAFYLRNCDLKKRNADEFSPGDIALIKDALASHKVEYHAVEKAETAGTLFSKPRLIQLRDEDETTSERTMVWSKKALPTFTVAKFRKHIAKYVMYDHLKAPFEAFVEKNGLEDRDPMPDSLPLGDDGRTLRRIRDFSEHYGDIHKEISTGTIESKRHHGAIFSRGPETKEGAYETCRLPSFENPKVSFENFKQKHPNHKILCDRAFLRGDVLKLSPKPGAATSAGKDSKSMAEGEYIIKSVRGSGQIALSSLTETEFETIISVTVLVKNYEF

SEQ ID NO: 6872 - protein, 1077 aa, unidentified
  REGION 1..1077: note = Description of Unknown: Cas Enzyme sequence
VEIYKLEGELFMKKILGLDIGISSVGWGVFDQDSGEIIDAGVRLFEEAGRNANEDRRSYRGSRRLKRRRTHRLERAKELFSKYNLPLSGVGKADPYQARYDAIYHTVSKEELAAALYHLVKMRGTILDSPEDEKDGNDNELSTKQQIAKNKKLLANQFVCEIQLERQKNGERIRNHKNRFRTKDYLDEAKAIINRQREIHKEIDHEEFITDYFSLIEQRREYYEGPGSRKSPTPYGPFFVNEKGEIEEVSMIDKMRGKCTYFPDELRIAKKSVTADLFNLLSGDLNKLQIEGEYLTYEDKRYLVENFIKKGKNITLKQILKYKGYPNDTDVSGYRVDLKNDKPLFTEFQGYKEIKKIVEGNNLPLEILENIDLMDNIAEILTAEKAYHRREERLSKLLSAFDEGTTRRIIDAFKESTCFTGYHALSKKAMNLVMNDLWHTNKNQMELFSALGLEEKRLAGNKNKKKITFDDTAILSTVAKRAHREAIKIVNAVREKYGELHSIVVETAREKNSEEKRKNYSDFQRQAGKFEKEMAKLLGVKSLAELRLTSKQHLVLKLLKQQNWQCIYSGNSKQIGPWDVVNNPTLIEIDHIIPVSISFDDSQANKVVCLRSENQKKGQRTPYEYFKSGEGPRTFEEFKVDVLNLFKSKGINNKKKDYLLEMRDVKYNEELQKEFINRNLVDTRYAVRSFSINLRSFFKSNDIDTTVLSIRGSFTSALRRRARLNKDRDESYAHHAIDALIVAAIGKMPLFKFFHKFDMDDTGAVVDRETGEILEDEKLFDERFITFLSKLRNYESEVKYSHKVDRKANRSLSNQTIYGTRQKNGEKYTIGKFKDIYSLNKNQVKPLLKRLEKKPDDFFIAKYNPEVMEIVQKIMKEYKTADNPFKAYYEEHGYIMKDCKVPVKTLKYYDKKLGVHMNITRNYSGARNDVVLKSIKGARVDIYQNAEGKYKYLGVPYHWFKQQGDRFMLDMDKYESEKQEKYKQIDDSYEFQFSLYKNDLFSFEKNGEQFFRVFRGDNNPRQNKIEVNYVDKPKKKEERKYCFLAPSTFSHVNKYNVDVLGNTYKIEKESFKDYLQL

SEQ ID NO: 6873 - protein, 1081 aa, unidentified
  REGION 1..1081: note = Description of Unknown: Cas Enzyme sequence
MSNLVLGLDIGISSVGWGVINENSGEIVDAGVRLFEEATRNANEDRRNFRGARRLKRRKKHRLERTKEFLNSYGVSCENVHSIDPYKARFKGLSAPITENELAAALYHLSKRRGTTIDTPEEESTSGNELSTKEQLKRNAKKLEDKHVVEIQYEKLRNNEPVRTHKNRFRTNDYVNEAKELLRTQQETHSFIDDEFINNYIDLLTSRREYYEGPGSKKSPTPYGEWFFDEDGKLQHETMINKMRGRGTYFKEELRLPKKAYTAELFNILNDLNNLRYPSKETDEIEGLTEKEKEELIDTYLKKGKKITLKNIAKLLGINNELEIKGARINLKNNKPEFTEFLGLKQLRKLLKDVSLPDNFFENRDCLDEIAEILTAEKSLTRREEQLTDLFEEYYNDPLVEPVENLKQDTSFKEYHALSKKAMELILPELWETSKNQMELFTEHGLGENRIEQLQSGSKIQFDDEAILSTVARRAHREAIKITNAVRKQYGEMDYVVVEMAREKNSDDEKKNYKNFQKKQGQFEKRMAEQLNVDELKDLYLNGKQNLALKLMEKQDYKCIYTGKQILPMDIVNDPTLFEIDHIIPLSYSFDDSQQNKVLCYQSENQDKGQLTPFQYFQSGKAKRSFREFEAECTNLFKSKKISKKKLNYLLEIRDVQNDEEVQTNFINRNLVDTRYAMRSFSMNLRTFYQKNELPTKVLSIRGSFTSALRRRAKLRKDRDESHAHHGIDALIVAAIGRMPLINQFKTINMTNEGVAADKDTGEVIDEDRIFSTPTLNFLRGLRNYESKLKYSHKVDRKPNRTMTNQTLYSTREKDNEKYTVGKVKNIYELDKKGFNSLKKKIDKNPENFLMAQHDPKTWELVVKVIEEHSHAENPFQDFYNQHGYIMKDGKVPVKGLKYLDNKLGVHVDITDKYPKSRREVVLLSRKSIRIDVYQNDEGKYKYLGVPYNWFKKDGKEYVLDMEKYNGPEGLQAPYKQIDDSYTFQYSFYKNDRISYDKEEKVTNPKTAEKEKQLVHYDKLFRGDNNPRRNVIEVEDISFKTNNQQMQSVGQFKNIKKFNTDILGNEYFIEKEDFKDQIPTI

SEQ ID NO: 6874 - protein, 1036 aa, unidentified
  REGION 1..1036: note = Description of Unknown: Cas Enzyme sequence
VERIFGFDIGTTSVGFAVIDHDPKKSIGTILRLGVRIFPEARDPDGTPLNQQRRQKRMVRRQLRRRRVRRRLLNETLNDAGLLPTFNSPQWPAVMASDPYDLRRRGLSEALSKHEVGRALYHLAQRRHFKGRALEETDGAVDETAEEKVATTGREATLQALRAEGVTLGAWLAKRGPHERKRGVHANRSAVQDEFETLWRAQAKYHAALRDDSFKAKVSDVIFAQRPVFWRTNTLGECRFMPGEALCPKGAWLSQQRRMLEKLNNLALAGGNARPLDAEERAAILERLQTQASMSWPGVRKALRPIFKARGEIGLEKSLKFNLELGGEKKLLGNAVEAKLSGVFGDGWAPHPHKQAIRDAIHHRIWSADYGVIGEQRIVILPAEERKARRVKAAQSFIDDFGVTPEQAAEIQALSFPPGWEPYSVTALQAIVPKLEEGIRFGALVNGPEWEDWRNATFPDRHAPTGELLDRLPSPKIQEERERLAKIRNPTVVRTQNELRKVVNNLIGMFGKPDLIRVELARDVGKSKREREEIQSGIRRNEKRRKDAKKDLVDKGIAEPSRADIEKWLLWKESHERCPYTGDQIGFDALFREGRYEVEHIWPRWRSFDDGFRNKTLCRKDANLAKSNKTPFEYIGHDEDQWAAIQNRLQGMVRSKGGVGMPPGKVKRFLAVTMPEDFASRQLNDTGYAARQILAQLKRLWPDVGSEAPVNVQAVTGRATAQLRKLWTLNNILADNGEKTRADHRHHAIDALTVACAHPGMTQRLSRYWQAKDDPGALKPDLPPPWPTIRADADRAVAGIVISHRVRKKVSGPLHKETVYGDTKQDIATKTGTFRRFVTRKKVESLTKRELAEIRDARVRAIVTDWVSAHGGDPKKAFSSYPRLGESGPEIRKVRLTVKQQLSLMAPVSTGYADLGGNHHIAIYRRPDGKPAFEVVSLFEAARRLARREPVVRRRRDDGATFVMSLSPGDAVQFPGGDKKGIWIVTGAWASGQIVLEKATDANHATTTRPMGGSMLLSGATKISIDPIGRVRNAND

SEQ ID NO: 6875 - protein, 1042 aa, unidentified
  REGION 1..1042: note = Description of Unknown: Cas Enzyme sequence
MGKPKAKESNLQTVLGLAIGSNFVGWGLLEFDRKGPTRIIDGGVRAFDAGVVGSLEQGREKSRHTQRREARHRRRRAGRQVTRMTNVARTLQGAGMLPQGDLSHGSARNDYFATLDRAIHDAHDTGDQADELLNHLPYFLRARALDLPLTLHELGRAYYHLAQRRGFLSNRKRGDDEEETGTVKPAIKELIGEMEKIGARTLGEYLAKSDPVNERRIRDRWTGRKMYEHEFERIWAAQQTHHPGILMDELRGKLHFAIFFQRPLKSQKGLVGKCDLEPQHRRMALALLPAQRFRLLQRVNDLKICFEDGSEPGCLTSEQRSALLDALDTEGELTFGKARTAIGLKRTGTKFNLEEGGEKSLIGNRTGAKLRGVFGERWDRFTDQHRSQILSEVLGVHKEETMARRGREVWELDAEDAEELASVRLEEGYCAHSKEALKKILPLMEQGLQYATAKKEAYGDDEESRTKIACDLLPPVNESGIELGNPALQRALTELRKVVNHIIKLHGKPDRIRVELARDLKRAKKKRENIWKRSRSREKERDAARKFLEECGDPQPSRADVDKYLLWVECNKECPYTGESITQAALFGMESEFDIEHIWPFSRTLEDGFHNMTLCYHEESRAKKGNKTPFEAYGERDEWDAIVQRIEKFRGDAAAEKLRRFKAETLPDLGHFLNRQLNDTHYASKLAARYLGLLYGDKALRKIEVSTGQITVHLCNAWNLKGILSDGPRKSRDDHRHRIVEAIVIALVDCGMVKKLSKAAQQQFKEKGRERGWWKRLEEPWDGFLSDVEEAIAGVITSHRVNRRVRGQLHEDTNYTAPRVDEDGSEYVAVRKPLGPGFSQKDVSNILDPTLRAVVQKHLDELGGDPKKAFSDTANHPRLTNGLPVHRARIKKREPVFSVGEGAATRFVTTDTNHHMAIFFTTDSRSNDRWTYVVVNRFEANQRAKRGVPVIDREPHDDWHFVFSLTSGEMIEFKLEEGNLEIFVVRTISQGNVEMCRVNDARDKKTIRKTGDWIKKSVNVLCQMNARKVIISPLGEVLPAND

SEQ ID NO: 6876 - protein, 941 aa, unidentified
  REGION 1..941: note = Description of Unknown: Cas Enzyme sequence
KRREARLTRRVIQRRARRKKRMLHYLVKLDLLPTELLGHSQPEIILNTLGDPYQLRNKALDHRLDNHELGRVLLHLVQRRGFLSNRKTLLDREMLDDPDVQAILAELEEGEDNSSERAKEERAFTKDISALRETIKQADCRTLGEYLSTRGNHECQRNRSHEGGYLRTDRQMYREELDLIWQEQTKHHEQLQDNVKEQIQEIIFYQRPLKLRADRIGKCSLEPTRKRANMARLEAQRFRYLQDINSMYYSNPDHGQKRPFNPDQRKELIDLFEHDPAPSFAQIKKKLNLHKKTEFNLDNDTKKLKGNITVCKIREVLPNWDTITLEQQYALVEDLLTIKKKSVLKTRLITHWSFDIETAVRLCLLEFEPGHANLSVKAINHLLPFLKEGEIYSTARVSAGYGYEVQADDIKDRLGPSPDLPNPIVKKALSELRRLINALIAEYGKPDAIRIEMARDLEMNTKRHKAYVKQQNANTKANDEAVNAYQLMVEKSPYLNLSKYPDRTDKIRYRLWKDQDERCAYSGRTINLSTLFSAEIDVDHILPYSQSLDDSYMNKVVCYAEENRNKGQRTPIDAFSGNTEKWEQITQAIRRWDKKLTSKKNRFFTTGEELKTRDFINSQLNDTRYISREAKDYVKQLGVDVSVSKGRITAWLRHQWGLNNLIGTSTDKDRSDHRHHAIDAVVIACVDRSFYQKLVRQAKALEASQIGIKLKDLEINPPWPDLRNELQEKLKGVIVAHTPQRKLYDELHEKTGSGFIEGQGTVYRKRLSDYFDKCKTEKEADKKLKAIVDQTVSDAIKEHLAKHGFNAKAAFAEKVKVFHKHGKTQIKRIRVYQSQVIKKKEQLQKEKFPIRDNQGKNFKWFSYGNVHHIEVIKNRENSKYHGVFVTMIEAAQRARGIKIPKQPMNEEPRSKLTGYRRVRRVSVVGHLLWDTLVVGHNVPPS

SEQ ID NO: 6877 - protein, 1008 aa, unidentified
  REGION 1..1008: note = Description of Unknown: Cas Enzyme sequence
MKRLAGAGLMPRDPTEAKKLAEIDPYALRAEGLDAALPLAHFGRALFHLNQRRGFKSNRKTDGGDNEAGKIALGTARLDQEMMATGARTYGEFLHKRRLAAPTPRETPPVRTRLTLLHDANTDADSEKPVEGYDFYPSRAHLEEEFHKLWTVQAPYHPQLLTDNLRDTLFETIFYQRPLKAPAVGRCLFVDEPRLPKAHPLTQQRVLYETVNGLRVTALGQAKRRLTPEERDTVTLALNTKKPTKSLSSAKLTLKALAKALNLAREESFTLETQTRDAIACDPVRASLSHPDRFGPGWGALDTDTQWTLVQKLRDELDRDALIAWLMKVHRLDQNRAAATADAPLPEGYARLGKTATRRILEALKSGVLTYDEAVAACGWHHSDHRTGEVLDALPYYGEILDRHVIPGSQEPDDDDITRYGRITNPTVHIGLNQLRRLVNRIIEVHGKPDQIVVELARELKQSEDQKREINKVIKRNTEAAIQRGQKLEELGQPNTGANRIVLRLWEELSEDPLKRFCPYTGKRISAGMLFTGECDIDHILPYSRTLDDGISNRTLCLREANREKRNRTPWEIWGETPRWDDIAANLNYLPENKRWRFAPDAMERFEGERDFVDRALVDTQYLSRIARQYLDELYTEGGHVWVVPGRLTEMLRRHWGLNSLLPDHNRGAVKKKNRLDHRHHAIDAAVIGATDRALVKKIADSAKENREDGLEALAASIPPPWEHFRADIETQLNRVVVSHRADHGRIDLAARKTGQDTTAGRLHNDTAYGLTGETHKGVPLAVTRKPIDSLTPAMIGKIRDPQLQMALTVATTGKEGKHFDAAVKAFAARLGPYRGIRRVRIIEPVSVIEIRDESGLPYKGYKGDSNHCYEVWQMPDGDWTHHVVSTFDAHQGAATRPHPAAKRIMRLHKNDALKLDDSKFGPVIATVEKFDANGGISLVPHTESNADQRYRISLAERKKSDADQRYRKEIDDVYIRLTAESLKKNGARRIYIDEIGRIRDAGPHDRR

SEQ ID NO: 6878 - protein, 1365 aa, unidentified
  REGION 1..1365: note = Description of Unknown: Cas Enzyme sequence
MTKILGLDLGTNSIGWAVVETENNTFFELKVKGVRIFQEGVKIEKGIEGSKAAERTGYRSARRIKFRRKLRKFQTLKVLVKHDMCPLSMEELLKWRNFKDPESGKNKTFKFYPTNGDFLAWQQTRDEKDGTKIRNPYYYRSLAANQKLDWDNQEERYKIGRAFYHITQRRGFLSNRLETTKESDGKVQKAIAVISEAKGEKTLGQYFYLKYVKGEKIRDQYTHREEHYLQEFEVICNKQQFSSTLVSSLKKAIFYQRPLKSQKGMVGKCPFETNKPRCAVSHPAFEEYRMLCFVNNMKIQTPEDEKLRQLTNEEREKVIQRFYLKRDHFDFDDLAKQLAPKKRYKYFRTGDKNADDFLFNYSMKTTVSGCPVSARFLSLFGENWKNLHIEYAKEKDNKTSFIDINDVWHVLYSFDSDEKLTEFAQKRLQLNDEQIKEFLSVRLKQDYASLSLKAINKILPFLREGLIYSHAVFLAKMEDIIPKEIWSDDANKKIIRDEIFHIIKSQNEEKQILEIVNGMIKICRENNWTWSEEAELGFREDLNRKLRSYYGKNKWEDFTDEKQKRVVESAYDLFKTHIIKNMGKGEFAKTQRIDDRVKTFIVDNFDVEVETLKKLYHPSALDVYKPPVKGKDGKEYLGSPMVSSVRNPMAMRALHQLRKLINELIKQGVIDATTKVNIEMARDLKNANERKSLQNWQRERENKRKQYAERIKEYFAKEGKNMEPSEAEILKYQLWEEQKHICLYTGESIAVTDFLGAGPKYDIEHTIPRSQSLDNSQENKTLCDNHFNRAIKRNKIPYELKNHSDVLERIKHWKEDSEKLEKQIEIQVRISKGASTKEAKDNAIQRRHKLTFERRYWKNKYDRFTMKDVPEGFKNSQLVDTGIITKYSRLYLNTLFNKVYTVKGNTVADFRRIWGLQDEYEKKARVNHIHHCIDAITIACITKQNYEALAQYYHESEDNMVKGIGNKPKVDKPWDTFSQDLKEIDKEVFISHYTPDVLPKQSKKKLRKRGRVQYNAQGEPIYLSGDTVRGSLHKETFYGAIAQDIKGEVSRDKEGEIMAKYVVRKPLDSLGNADIEKIVDEKVREIIRRDREKEIALKKEIDVMKKQLTNAEENEEATIRDEIEELNFEINILYALPNKNGFPVPIKKVRIYQPTITNPIHLKPHRDKSGKKPKVYNEHLHVANDGNYMMAIYEGKDGKGKIVRDFEIKSNIEGGEYFKLSVQNDLKPQGFRFYDGLISKTKEKGQLQLLLKGILKVGTMVILWENSPEEVWEEQDKEIKNRLYKIIGLSNQRINRPSGKIDEYATIVIRYHQEAKPSSELKVLDGAFKINEEYKAQRKMNHNQFNALIEGIDFKLNILGQIEKL

SEQ ID NO: 6879 - protein, 1036 aa, unidentified
  REGION 1..1036: note = Description of Unknown: Cas Enzyme sequence
MSKHILGLDLGTNSIGWALLEEDKGQPTKIIDLGSRIFIRAVEEKTPTPKNVKRREARLTRRVIQRRARRKKRMLHYLVKLGLLPSELVGHSQPEIILNTLGDPYQLRKKASDHRLDNHELGRVLLHLVQRRGFLSNRKTLLSDMLDDPDVQAVFAEHDDEDEDNASKRMKEEKQFNGEIKKLRETIKQTDCRTLGEYLASLEKHECKRNRGHDEAYLRTDRQMYRDELDLIWREQTKHHAQLQGNVKEQIQEIIFYQRPLKLRPDRIGKCSLEPTRKRANMARLEAQQFRFLQDINSMYYSDPDHGQKQPFTPDQRKELIDLFEHDPAPSFAKIKKKLNLHRKTEFNLANDTKKLKGNTTACKIRKVLDDWDAFDANKQMALVEDLLTIKKKPDLKNRLMLHWSFDGKTAVRLCELEFEGGYSRHSVKVINRLLPFLEHGQIYSEARQNAGYGYENKKIKPVDRLGPSPDLPNPIVKKALAELRRLINALIAEYGKPDAIRIEMARDLKMSKKALDIYEKQQIANKKTNDAAIELYQQVREKNPHLNLPEAPSLTDKIKFRLWKEQKQCCAYSGKIISCSTLFSEQLEIDHILPQSQSLDNAYMNKVICYAEENRHKGQRTPIDAFGGNTQKWEQITQAINNWDSKLMSKKNRFFTTAEELQGHDFINSQLNDTRYICTEAKDYVLQLGVDVNVSKGGITAIVRRLWGIKKDRSDHRHHAIDAVVTAYLDRRFYRELVRYAKAYEQSHSEFNITQSPDKEPWPNFRNELQNKLDEMIVAHTPQRKLYDELHEKTGYGFIEGQGTVYRKRLREYFNKCTTEKDADKKLKGIYEKPVRNAVKVHLAKHGFNAKTAFAEGVTVFHENGKTPIKRVRILKSKTANTKKELENSKFGIKDKQGEVFKWMQYGNLHHVEICRHKETGEYTGFFVTMMEASHRVRGINRKKQSIIKTDHGENHEFIMALHINDLVTVKKNHICDFYRVQKLESGGNRIILRLHTAAKIDNKDEEIFFSINKTSFKKWQLSKVRVNAIGKQVE

SEQ ID NO: 6880 - protein, 908 aa, unidentified
  REGION 1..908: note = Description of Unknown: Cas Enzyme sequence
MSASSTVWAFDLGKDSLGEAVRDINTHQFHHAASLLLPEDLARRGPANQSGTPANRFRMWKLRLAHRERERWLDTVWQAAGLTPLQKRVVGRDPRTGRWYLVQKADYRLEREFAPRPGERTRDGAPSDPAGTNICYTSCLLRIRLLRWKPGDPPLEEWQVYKALRSALQRRGYGRVPWAAREALARGKTPEELESEEQQESAQKDANYREAIEKWSDFKHKVPPRFHFPCYFDAFQMGLWDPGRPDQLLSRPTHQAASTRNVRFDRADVRRELTLLGDQAAAMLPQLQQAFERWQRDGWRFNHPVTGKPLTFPVRARTFGEFLCDGPAGRPDETSFEAFLNQRRSAGIRIGTFEEWMAALGQKTPRFDNRNLAPCVLIPRFHACKVEVRLEKDATGRLTGRPMADSLLASEVTFLLKLKNLLVADPLKGSRKLTVEEIREIFAHAQSRLRSLTLLEPDGRPVKQWPEKVAACFALTESDWPGIPRRTGCLKRLAELTVSVDGTSRPITPDEAEQLLWTVAEPRNFPETALPAHLQPLLGFAKKAWKQAREYEAAALRPMPGHEEVKPPRTSGRCAYSRVALRILKELILSGEAPSAFYQRLVRREPDLLRRLGPSPDKPLVISDDSTAADAAERHRQDEQNRRRGLLVSELNFLLQMRGEGAVGDSWENIYIPNQLLESLQQCPAQGPGDPAIDAAVNRLLGTVKDPVVRHRLSLFNERLKKLQFGDAAEDLPAFGEPDTVVLEFVREDFMGEEAKRRLLQFQKNRERARKEAAEQAAQLGLQTGSAALRYELYEAQGGICLYTGDPLALTRLDEYEIDHIVPQSLGGPDAMVNYVLTTREVNQAKEKGKLIPYDYVRLRGTNDWDDYLKRVKARAARLGRKKVQLLTRPDAPELVQRYTALAETAWI

SEQ ID NO: 6881 - protein, 1178 aa, unidentified
  REGION 1..1178: note = Description of Unknown: Cas Enzyme sequence
MERSLGLDIGTNSIGWAVVELNENAGRIVGAGVYIFPEGVENLGKGEREISRNAQRRGARQRRRQLFRKKLRKRALLKLLGEHGLCPILSDEELRQWQKTGAFPDREDIRAWLLLNPYILRDRAVRQQLTLYEIGRIFYHLAQRRGFPSKSRSAASSEQNKIERGDPKLNKPGIEQTRQLLENDTHAPTLGAALAKLYPPDNQPYRSIPGRIRNRYTDRQWYIDEFEKIWEFQEQFYPDVLTAELKAQIGGRRKDGYPCDGVLFFQRPLRSQKHLVGRCTFEPSKPRCLKSHPLYERFTIAQFVANLRCNDEPLTREERDAIIKLMLSSERVTISKIREKLGKTASDYVFNFDDNDSNIPRAPLNAKLSSKKIFGPAWLSKSPEEQHRIWHALQSFDNIDMLAKHAQQHFGLSAQAAAEFARIKLKQEYGPLSLKAIRLILPFLEQGYTYPVATALAGVRRAMGARWEALSDSERTELCDKVEGLVTRHLLGGYTAKLAELLSEYGLTERDLRKLYHHSQPGGSKTILQRIPTDAEFTARIMSIRNPVVISMLFALRRIVNELLERYGSFDCAVVELARELKLSKTKRAELQKQQAYNQQIREAIKKKLEEQGIKPTDENILKYRLWLECGMTCPYSGRPISFEQLFNGQVQIEHIVPYSRSLDNSFRNLTLCFADINRDKGDRTPYEYFISKYGNEQWEKVKQRLRTVFINARKWDKDDPLSYFPDRKAKYERFIAENLPVDDFVNRQLNDTRIASVYTRDMLQHICSNVITSQGQATALLRDVWIPRSPLDNDKRSVENLSKTRDDHRHHALDAIVLACIRRRHIQQLSTLSAKQNSFITTRTLRHLNQAQRIINPPWPSFQHDVDEALQSTVVVYHRFNRVLTRRTLTIERNGCTRSYRTTAARKQLHNETFYGKHIDPSTGQVYFHVRKPLSEIKDKHDVNCIVDPVIRQLVEQRIEECGGYKNDGTVPDNAFFTTTPLGTPQPHIFLRNRRGEPVPVLKVRLRYSMANARQHRDGCNRYVDPSNNHHAIIYRLPNGNLDLSVVQFWDAVLRKLRGEPLYQAPPGCEVIMTLHINDMVLLGCPPDLLEHIFRTYPPDQRGKYLAPYIHKVQKLSMSERSGFELCFRHHTDARPSEEAKKSYILIRNWGTGKQGWFAYNPVKLRISPSGCIERWS

SEQ ID NO: 6882 - protein, 1035 aa, unidentified
  REGION 1..1035: note = Description of Unknown: Cas Enzyme sequence
AGYEGDDLINDSDFLLKLWHVDYSITSSDEEKSKKGITTALNKLLPDRSNKEKVIEQFLKLPEFSKEYGAYSAKAIKKLLPLMRVGRFWNLEDINPITKNRIEKICNGEFDESIPSDVRKKIAQWERDNRTLDTIHDFYGLPTWLACYVVYGTHSENEIEECKSADEFNNKVIAKLKNNSLRNPVVEQVIRETLLVVRDLWKQLEAKNEKIDEIHIELARELKHNSEEKQRIAEAQKKNFEEKQRIKKLLTELLNSDFKQYNSDEELEVARFTVKPNPENPNDIQKFKLWRDLNPHTEEDWRKKVKEEKIPTEQETKRYVLWLSQNCRSPYTGKIIPLSKLYDTNEYEIEHIIPRAKLKNDSLNNLVIAEWGVNKAKGNELAANFILKSNGKCRYGDKEYQLFTYEEYVQHIKDVFKLNKTKRRNLLATEVPADFVERQLNDTRYITRVAASLLKPVVGAETKIIFTGGAVTGELKNNWGLTNEWKKLLLSRFKRLEKITGMPYVHIDERDRNIINFIVPENEKLDIKRIDHRHHALDALIVAATTREHIRYLNSLNAVDDNEELKKVKFCLVKGKIRDFKLPWEMFTKEAREKLEETIVTFKTNNKIISKPFNKYYTWKIENGKPKKTQIEQLPNKNWLAVRKSLFKEPLGPVRIKEVKEEKVLEAFKIEINRKIKQKNGEKINTEPYIYDKVARQIINEILGKCQNSIENSDALLKEIQAYLKKNTSGKAVILNGTPFEKIAIAKFTLFKSKRMPLTNAAYVEGLTIEKMVQDLPYFKYLSQEQFAKFNEQQQSYIIKAGLQVSDTKKMSPLNYLLLTHILEYNNKPKEAFSEEGRENLNKKSIRQLGKEIKSITRLDGEIAEDDMFNGAFYETDKGANVYFVMYENELTKERTDFVSISAHKAVERIIKGQPIAEDREGYKKIILSPGDLVYVPTQNEIEEIKKNNLSISELLSSKTLKEINSRIYQVKKFSGNRCYYLNSCISSLILPYNPAIKSGEFGSQNYQEFTDDGIKIAEICIKIKVDRLGNINLT

SEQ ID NO: 6883 - protein, 1617 aa, unidentified
  REGION 1..1617: note = Description of Unknown: Cas Enzyme sequence
MKIISPIAIDMGAKNTGVYYAKYAQGSSLEEIDKHGDVLVYDKYTPLLKNRTANRHARRGYQRRKLAKRLLVLVLEKYFNFPAKKHAQAIGFLLNRRGFTLQEGYYKEHLKIFPADAWEKLPSSARNVFECKENVAANLQKFSETEPGKIRQVFQDVESENKKVRTDLFYFSCIRRIGRACEHRGNGNSLGEEKEHKKLSRTSAWVVKRLNKGKVLFAVGNGHNVDLCKQINDLSSAEAKSLCERLPDIQSDENRAKKSGWNFNIGKFLPNEKNEQALLSANAGVHLHHLSYALYQLNSGARPRSQYFDEIKDDLNAFSRERYLNNERNPAYIRQFALAVNAGGNLDMGKLHRVVCHISNLELKPLRAYFNDETPIMRNTDYQKGDKSQSNFISHAAKNGGDVFSNEKLSRIASTWFLRKWVVSAKKDGKDKFANYRELKSLWQTHEKKGDIVKFWVNTDPELTIPPYQSMTNRRPPTCQSLVLNPEYLKNHYPRWGEWLEQLRPDEAYRDKLRSLTGGKGPRKEFDGRLISDDAIKVRQLQFVLDASKKTDSYNLNEIWSIRHKLNSLQGGDAQKSKWEGKLRDACGKSTLPVALLKGFENEAPGSFGHFVNKYYQTRKRAKSGRYFLHQKRKNHWMTDGKLFAICPHRPRQKEHQWELDVAAITGVDHDHLKDIIGGQTPEDWLRKIKRFKGACSDAADMQKKHRGSLKIKIALAERARRVNGKNLKKEDKELVGLVDECKRLALKLAEVLHPDLNSESDKGKGELTANAERFESLFSFAQINNIVFKDRKGFSNTCPVCSADNAFRMREIKKSGQNFARASRLPAMSIRLIDGAVMRICDVVSKHIAGACWKRIAADLRAGSSVVIPLVFEQNRFEFEPSLKVLKGRAKQGEKDKHVLGGDAAREGEYREKKERIRKAAKGVCAYTGNALGTSGEYDHIIPQSSQYGTLNDEANLIFVSAPGNQGKSNQTKFLGNLSQDYKNKIFAGKNDAAIALFIYRQLEGDEAQIGQADVDAHFAFGQYSSFNALGDKQRGDEQQRAFRHALFLQDGDPLKQKVINALKNRNRTIVNGTQRYMAQCIADKIYKSAQKAGKEKQVEFDYFEYTARANEENSTYDLRRFYGEHDDRAVKPKTQPLHSHLIDAQMAFLLAAENHKADGCMGLSFNEAETIRQGIDMQTGEVLPVKFFASSYIGESDERFSVVRLDRKKSKSGVRLHRSFHRPNFYAEHYVPLFLGKKDGRIEVKAGFCWEESVPVPKKDFKNPECIMAAMKFAKSERISAWDCAGKTLEDLHGYAGEKTDCNGCEVVCIAWDKTKIQKYLVDEFSTEIVACGKVWSAEVGFIRKLAYRTQKKEIKTYADVIATLEQEKKAVIFGRRISIPAMAEWQRLKDAWKNDDDDFLENHFLGRACAEQDRDKKRKNRHQKKRRVFSLPVVSTVGHFLQKRNAWNNQAVHQILADSDSREDGNKFSRLVLSPDGARSEAMNRPFISKNTFKLAEWKGESGSSAGYTNLDPNKWIAVERDKHFPPHVEKIEYCFDNTTRPKVKIHLSDVAGGLSQDSIKKILQENSLTKAKTEDVAKVKEKLQSGRAPRVVQYTALGFNADIDERLLRVVKK

SEQ ID NO: 6884 - protein, 969 aa, unidentified
  REGION 1..969: note = Description of Unknown: Cas Enzyme sequence
ALYEAYFKILEIEGYDVKELLKVKSNKDEVELDDLKVPAAEIKEMVKSIFKTLGISTEILDFNAELDGKEFEKQPAYQLWHLLYSIEDDSKKYGEDDILTYGNDNIGLKKQLCSKFGFQPDHAKVLVNVSLSDDYGSLSTKAIRKIYPYIKEHKYSDACEQAGYRHSKHSLSKEELEKRELKPRLELLKKNSLRNPVVEKILNQMVNVVNTLIDTERVKDPNFQFDEIRIELARELKKNVKERAEMTSNINKAKSRHEKIIKKLQNEFGIKNPTRNDIIRYKLYAELKNNGYKDLYTNTYIPREKLFTKEIDIEHIIPQSKAFDDSFSNKTLSFRQDNLEKGNQTAIDYIESKFGKEKLDKYLERINSLYQTGQKSKDKSGEGISKAKFQKLQKREAEIGEGFAERDLRDSQYIAKKAKEMLFEISRSVISTSGTITDRLRDDWDLINVMKELNLPKYKALGLTEMQERKFGKKVEVIKDWTKRNDHRHHAMDALTVAFTRHNHIQYLNYLNARKNESHKLHGNILAIEAKETELVVDENDNKKRKFKPPISNFRQVAKKHLENILVSHKAKNKVVTKNKNKIKSKTGEKVKVELTPRGQLHKETVYGKYHYYESKEEKVGTKFNKETIQKVANPLFRKLLLQRLEENNNDPKKAFGGKNALSKTPIHLDESKTEILPEKVKLVWLEEDYSIRKDVTPENFKDLKTIDKILDKGIKRILEQRFKDCGNDPKKAFSDLDKNPIWLNEEKGISIKRVTISGVKNAEPLHYKKDHLGNFILDKNGLQIPVDYVSTGNNHHVAIYRDEKGELIDYAVSFSDAVKRNNYGLPIVPKDTNALWDKVLELGIDNQSFLETLPKQGLQLEFSMKQNEYFVFPNEERDFNPSDVDLLDTKNKNKISPNLFRVQKLSKVVYGNSAVRGYVFRHHLETMINDKKELKDTSFKSIKSLSYLDSVVKVRINHLGDIVIVGEY

SEQ ID NO: 6885 - protein, 1173 aa, unidentified
  REGION 1..1173: note = Description of Unknown: Cas Enzyme sequence
IVLGLDIGSNSIGFSLMKIDEFGEKIIFDELASNSIVFSEPSTAEERRKGRGGRRRNERKSARNKFVRRVFEKYNLISSEFILNPTNYLNTQLNEEGIKDRDVYRLREKAIQGKMLTKAEFVFAIYSILTDRGYNNMFATVDEEKDDEGDISESISHNKKLYRVNGYAIPSMVLSEKRKSLDESHQNIAIRNKGKNYSNSLDREMHKEEFQKVVESQSGNRTLFESENKCSAFIDELLDEERVNSPFYQRNLKSFEDMVAYCSFYDKFNPKGSYKRVPLVNIVNIELTLRQSIDNYGAVYSKSGEVKVFTDQEKDQIVDFWINRPNADKITNKNIYKNAGFKDIFIPIIEGKDLIVLNIQAHRGLLSLLHEYKIDFSDRDNRFYNTLLEILYYYKNTGSRQEKIKEATEKYALDIDSSFVDKVSKLKNLDGFGAFSLKFATEVLEKMKTEHLVFDKALEALGYNDKYLNMPSYDYLPPLEPTKSDIAWLKKNISYFDPRHLYYQPMISPKVRRVIAILRKLVNELIAKYGKIYEIRIETAKELNSKKEIEKINKNQSKNSAKNKEAENLLKNKKLAITKRNIERVKLLKEQNGRCLYSGELITEDEALDGEITEREHFIPRSVIWIDSFKNKILVKKKYNQDKGSQNPIIYLKSIGEWENFKGRIKLSEEDAKYKWLTDEELIKKMMNQEYWRESFLNDTRAATKTIQKYLTHYLYPKEIRYGKGEDRHITSVSGKAINELKYLWGIHSIMPKSEEGKKDRNTNYHHTLDAFAIALCSSSAIQTLHNHFKQNENRFKTKVLREKLISKQPTSVSGVNIVEYLKEVVEKYENNQRYVCTYNKRKTNMKGFKDGNLKLYVTIDPKDERKEILAEMEKVDIGATSLLYKKEGLTEKPRSDNEVKKEVLAIQARLNPKKQQKIIEALQPYSERLLELRTEIGVLSKEIKKVAEKKKTNKRQKEHNEKLQEEIDKLKERSKKLSNELQTTYCSYNVKGGKKQVVRSLKLPKTKLSKSSADSILYPKRVERSIERLNLSNFNEAVRNKEPFVIKENQSTLCVELYAHPKQNQVVGLKYFSSLANSHIKTKVNEKYGVMFENREPMMTLYKNDLIKVTNAKEGIEEYFIFNGGGNISGGNNKLELKTINKTVGDRRFITLNTTNIISQIKIDFFGNVDEV

SEQ ID NO: 6886 - protein, 1026 aa, unidentified
  REGION 1..1026: note = Description of Unknown: Cas Enzyme sequence
MNGLVFGIDQGIASCGWAVLRHPTPEQPTGEIVAMGSWIFDVPETDKERTPTNQIRRGNRLLRRVIRRRAQRMAEIRRLFHSNGLLAGQEPDALKRAGLDPWELRARSLDKLLSPAEFVVALGHIAKRRGFKSAKKGKEANTAGDDQKMLKALEATRERLGRYRTVGEMFGRDVDFATRKRNRDGLFDRTQSRDDLIHEVGEMFKAQRRLGNDAATPQLEDAFGAIAFRQKEMQDSEKLVGMCPFEPQEKRSARFAPSFEKFRLLGKLVNLRITTPFGDRPLTPQEIMLASADLGGTAKLTIKAVRKRIGLPDDQRFAAIKPEDESQDIAARTGEAMHGTKKLRDALGEALWVEMQDRPEQLDRIAHIISFHETADTIGTELRKLGLTAGAVNALLVDLRSFSRFKGAGHISAKAARSLIPHLEAGLRYDQACEAVGWNHADSKWSRHQQVIDKASFNELIKLMGDEIANPVARKSLTEGLKQLWAMRNRWGLPDAVHIEMARDVGNSLEKRNEIKRGIDKNTAERERQREEVRELLKIEDVNGDTLLRYRLWKEQAGRCPYTDKAIPPPAIIATDNSYQVDHILPWSRFGDDSFSNKVLCTAEANQRKKGQTPFEWIMAAQGEAGWNTFVARIEGNSAFRGAKKRNYVLKNAKEAEERFRTRNLNDTRYACRLLAEAVKLFYPEGERQDKDGVRRVFTRPGGLTAALRQAWGVESLKKVDGKRVNDARHHALDALVVAAIGEWEVQRLTRSFQQWEQKGLARPLRQVDPPWGELASFRREVQTAYDAIFVARPERRRARGEGHAASIRQVKERDGVQVVFERKSIADLTEKRLADIKDPERNQDVIEAIRKWMVAGRPADQLPRSPAGDEIRKVRLRTTGKPAVQVRGGTADRGEMVRVDVFVKPNRRGKEEFYLVPIYPHHVMNKRDWPTPPMRSVVAFKDEPEWTLIDDSFGFRFSLYPRNYVEAVKSNGEVFEGYFGGMDRSTGGISLVSNRNPKYSFRGIGAKTLLTMKNTMLIALAFDPR

SEQ ID NO: 6887 - protein, 1049 aa, unidentified
  REGION 1..1049: note = Description of Unknown: Cas Enzyme sequence
MNDYVLKNKPEPGSNDKFLTGLVFGFDVGTGSIGYAVRKGSDFKDVGVLICDSEGSDLSKRRDLRRQRRTLRSKKFRRQWFAKELAKLGLPKSETALDDPISLRLRALNGEMLKPEELHAALTHLFKRRGYSKVPWANAEKAAKETAKPKKDDKEGIIKEAVKEMKAKLGDKHPCQFLAEEKARVGNSPTTNWARKLYWPREVLRDEFLAIVKAQQKNFPQLAEKADWLLYGESQAKEKNGETFHVFFKSTEARNPGVVGLRWPRFDNRGPALDSLQPVDEEGRPLHVVRKNKEAFGNTQWELALMNFRVLDFETRQKRDPRTDFPIFIENVRNEWNKKGKVTEARLKKLAEPFKEKFLLIKDQKPLTPDNGAGRARYSSPTLNLIHKEISEGRRVDPPQPILRRKGENAEQALNRYLADVKHPVVQHRLVLFRRLLMQLVSRYGQPDMIVLEAVRSLALGQKAKNELNQRNEKFRKERENAREQLSSNNESFSRKAIQRYRLWQEAKGRCPFCLQTIERTDLGQGADIEHLVPRAIVDCNEFYNLTIAHIKCNRELKGDRTPLTAFGGTPQWEGIKANAENCFTGRKLEIFLSPDAEQLIEQKSDLQHTAYIARVIRHISLIQLGWLNDDGRDPTPEKQNPALSFQVTNGQLTSRLRKAWGLNQILHPLPPGKRWDELTDEEQTQFTEKNRGDLRHHSLDAMVIACTLPWLAHRTHGAKDEFGRHGWWTQDEKQRSKAANPLFPNEGQMYEVVKKEIEKVVVRHHVSRSNHQRAYDTTIYGRPKQNGVPIPDCYVSREPITALKPSDLKSSKTGKSKVFPPLLGDYLALAWEKFCEVEPNWEKLLKANKDSLPEAFQKRLCFSDFQRWRQDDVPAFHWPDKVVIPIKRVGYIGVENDNAVAPASPGTHGFVARGGRKPLLEVRLHPSADGKSLVPVFVPSWRMDKPIPKAPIKPDSESVATIRRGQIVEIKNSPSRNTPVGKYRIASTMQKNIQLLPVHLADNKEALKASGFLENGVNISWDTFIKSVGYELPHPPPVKPQSESPHQA

SEQ ID NO: 6888 - protein, 1521 aa, unidentified
  REGION 1..1521: note = Description of Unknown: Cas Enzyme sequence
MSRILGLDLGTNSIGWAIVQKDDEGSYNNIINAGSRIIPMDAETMKNFNNGITQTQTSERTRLRGVRRLLERSLLRRERIHRLLNTMNFLPVHYAEKIDFVNRLGKFIGEEEPKYAYKKDELGKAQFIFMNSFTEMLKDFQMHQPELVQNNKKVPYDWTIYYLRKKALDKAITKEELGWIILQFNNKRGYYQLRGEEDETIKEGKKEEYFALKVIRVEADNSSSGKNGEIWYNVFLENGWIYRRTSKIPLDWVGKIKEFIVTTDIDENGNALKDKEGKEKRKFRAPAENDWTLLKKKTESDLGKSGKTVGSYIYDTLLSNPDQKIKGGLIRTIERKFYKCELIAILNKQKEFHPELNDKMLYSKCVEELYRSNESRRLSVANYDFTRFITEDVIFYQRPLKSKKSLIENCSFERRCFVDPETKELAYSPIKCIAKSHPLFQEFRLWQFIKNLRIIEREKMVGDTMKFDQDVTPEFFPTQEEYVLLFDWLNEHKEIDQKGFLKYPVLGLKKNIDKYRWNYVEDKAYPCNETRSVLKTRLNKAGNIPAEFFDKETEESLWHILYSVEDKYDIEKALTSFAIKKELNEEQKVAFVEQFRSFPPFKKEYGSYSAKAIKKLLQLMRMGSRWSENEIADLTKERIQKMIDGECDETIKIRTREKALKLNEIKDFQGLPLWLASYIVYDRHSESGDVLKWETPEDIDYYLKHVFKQHGLRNPIVEVVVVETLKVVKDLWKTYGYFNEIHIELGREMKNPADKRLKMTIQNVENENTNLRIKALLTELANQKDIEGVRPYSPSQQEILRIYEEGVLNMLTKEDPDYDAISKISKMAQPSASDLIKYKCWLEQKYRSPYTGQMIPLARLFTSDYEIEHVIPQSRYFDDSFSNKVICESAVNKDKDNLLAYEYIKQNEGKIIEIGLGKKVKLFTADSYTEFIQSHYAGSVAKKKKLLMDTIPDSFIERQLNDSRYISREIKKLLSSVVREKDEEEAISKNVIVCTGSITDKLKRDWGLNDIWNTIIYPRFERLNRLTNSDKFGQWENKQGKRVFQIEMPLELQKGFNKKRIDHRHHAMDAIVIACATRSHVNYLNNESAHSKSKDKRYDLRRKLRRIEILEKQELKDGVTVTKKIEVAKEFYKPWPTFTQDAHEVLQSIIVSFKQNLRVVNKATNRYECFVNGKKEIVKQSKGENWAIRKPMHKDTVSAAVSLRKTKTVRLSQAIEDWRNIVDKSLRKEIGFLYSKYGEKGSKYIVKFFKDRENKHNGVDVSKVDIYYFDNDCAASRVTLDDSFTSSKIESITDTGIQKILLKHLASYNEIKGDKIIEHPELAFSTDGLDTLNVNMTTLNDGKFHKPIKKVRTYETIGNKFTVGQTGNKKTKYVEAAKGTNLFFAIYVSEEGSRSFLTVPLNEVAERQKQGLIPVPEKNPKDDKLLFWLSPGDLVYVPSLDEEGRVIEINNNSKCIGNIYKIVSFTGNRLYAIPSYVSSSIIDKMEYSQLNKVEFSIDENRSIKQNCIKIKLDRLGNILMI

SEQ ID NO: 6889 - protein, 1111 aa, unidentified
  REGION 1..1111: note = Description of Unknown: Cas Enzyme sequence
LISNCPYEARTFVDRETGEVKKESIKCIAKSHPLFQEFRLWQFMQNLKVYARERVVNGKTESDVNITQELLKTEEDWIALFRWLNDRKDVDQKAFLKYPAFGFKKDSDKYRWNYVEDKDKLYPCNETRTLIETRLAKVPNVPADFLSREVEEALWHILYSVEDKHDIKKALATFAEKSGLDSHFVEVFEKFPPFKKEYGAYSAKAIKKLLPLMRRGQYWSKEAIASDTLLRIDTLLKEEPDESIRNRVREKAINLTCIEDFQNLPLWLACYVVYDRHSESGDIKQWKTPADVENYLHYEFKQHSLRNPIVEQVITETLRVVKDIWAYYGKGVENYFSEIHIELGREMKNPADKRRDMTSKVTENENTNLRIKALLMEMLNDGSVADVRPYSPSQQEILKIYEEGVLYAESDIPDDILKISKQAMPSAAELARYKLWLDQKYRSPYTGEMIPLSRLFSPDYEIEHVIPQSRYFDDSFSNKVICEAEVNKDKDRALAYEYIKNNEGKKVELSYGKAVTLFTLSQYEENVKRCFAKNNAKKKKLLMEDIPEEFIARQMNDSRYISKVVKTLLSNMVRVDDEQEATSKNVISSNGSITNTLKQDWGLNDIWNDIIAPRFERMNQLTNSSNFGTMRNNNFLPQVPLELQKGFNKKRIDHRHHAMDALVIACATRNHINYLNNSNAAKGKEEVRHELRSALCFKKSNGDGGTGYRWTFKKPWDAFTQDTRDALLSTVVSFKQNLRVINKTVNRYQKWEVDGQGHKHKVVMKQDKGDSWAIRKPMHKDTVSGLVALRFIKEVSLSAALDAPDMIVDKSLKAKVKELLTIPYDKARIAKYFKDNDNQWNGRTISKVGVYYFDTQNAASRVVVDDSFNSVRIKTITDTGIQRIMLNHLQQYRQEINGKTVEQPELAFSADGIEAMNRNVQSLNNGANHQPIYKVRTYEPLGNKFAVGHTGNKGAKFVEAAKGTNLFFAIYANSEGKRSYESIPLNLVVERQKQGLSSVPEVNASGSMLLFYLSPNDLVYLPTTEEQEIATAVNFNSLTKEQVLRVYKVVSFTGSRLYAVPSNMAQSIVDKVEYTQLNKVESDLINKKSIKESCWKLKVDRLGRIVDAIKY

SEQ ID NO: 6890 - protein, 1282 aa, unidentified
  REGION 1..1282: note = Description of Unknown: Cas Enzyme sequence
NFNQKRGYYQLRGEEEEENLNKLVEFHSLKIVEVVADEKPNNKGEIWYSLQLENGWVYRRSSKTPLFDWKDKVRDFIVSTDINDDGSIKTDKEGNERRSFRAPSEDDWTLLKKKTEQEINNSNKTVGTYIYENLLQNPSQKIRGKLVRTIERKFYKEELVAILKKQIELQPELFSDDLYNDCICELYRNNEAQQLSLSKRDFVHLFVEDIIFYQRPLRSQKSSIGNCTLEYRIYKNKDGSQVKEYLKVIPKSHPLYQEFRVWQWLSNLKIYRKEDDSDITSEFLKNADVIVNLFEFLMSQKEIGHKEILKQLLTPILIEKYPNAKAAAFNKEVDKEIAKYRWNYVFDDSKEKEEDKSKKYPCNSTGYEIRRRLEKVENIPADFLTHEVEQHLWHIIYSVTDKNEYKSALGKFAQKYSLDRDSFVANFEKFPPFPSEYGAYSEKAIKKFLPLLRMGKYWHWDAIDCKTQNRIEKIISGEYDENIKTRVREKAINLTENNHFQGLPIWLASYIIYDRHSEADIAGKWNSIAELEQYLEDFKQHSLRNPIVEQVITETLRVVRDIWRHYGQGAKDFFSEIHVELGREMKNTAEDRKWLTEQVTNNEATNLRIKALLTELKENSDGKLLVENVRPYSPMQQDALRIYEDGVLNSKIDLPEDIVKISKTAQPSKAELQRYKLWLEQKYRSPYTGQMIPLGRLFTEDYQIEHVIPKSRYFDDSFNNKVICESAVNQLKDKQLGLEFVKNHHGERVECGMGKVVEIFSAEAYQTFVKEHYSKNKTKSQNLLLEDIPEKMIARQMNDTRYISKFISSLLSNIIRTDKEDDGINSKNLIPGNGKITTVLKKDWGMDAVWNDLMLPRFERMNQLTNSDAFTYWNEQYQKFLPVDYSPTDSKRIEKKRIDHRHHAMDALVIACMTRDHVNLLNNQSAKSETSRYDLQNKLRNKSKETWIDRKTNEQVERDVFKEFKKPWDNFTIDARSALETIVVSFKQNLRVINKATNNYQKWIDKNGVKVKEIVKQEGTNWAIRKPMHKETVSGKVILSRIKVPKGKILTATRKSVDTTFDLKTIDSITDTGIQKILRNYLAYKSNNPELAFSPEGLEEMNAKIKQYNDGKAHQPIRKVRIFELGSKFALGESGSKKNKYVEAAKGTNLYFAIYESKEGKRSYDSIPLNIVIERLKQGLPPVELKDENDFYLTPNDLVYVPTEEEQENIHNINPKTFDKEQKRNIYKVVSFTGNRLSCIPYSVASTIVNKLEYTQLNKIEFTKEKESLIKLNIDRLGNISF

SEQ ID NO: 6891 - protein, 1285 aa, unidentified
  REGION 1..1285: note = Description of Unknown: Cas Enzyme sequence
ITNETILSENGNKTTFETYRLRANAASEEVTLEQLARILLMINAKRGYKSSRKAKSLDEGQLIDGMGIAKKLYEEGITPSQLVYQLLKDGKKFIPDFYRSDLQAEYDKIWDFQQQFHSEILTDEFKKQIAGKGKVNTTKIFLAKYGIYTADNKSTDKRLMAYKWRVDGLSKELSKEELAFVISDLTGTISNSSGYLGAISDRSKELYFNKQTVGQYLMAQLDENPNTKLKNQVFYRQDYLDEFNTIWETQARYHKVLTAELKGEIRDVIIFFQRRLKSQKGLISFCEFESKQIEVEIEGIKKKKTVGSKVCPKSSPLFQEFKIWQVLNNVQVIDKSGAKQSLEQDEKEILFAELSIKDKLSKTDALKLLYKNYKELDLNFKDIEGNRTQATLFKAYQRIIELSGHGEYDFTKLPAAESKEIVSSVFNGLGYNTDILSFNSNLEGKEFENQPLYLFWHLLYSFEGDDSTSGNEKLLNKISELYGFEREYAKILANINFEPDYGSLSTKAIRKVLPYLNDGNEFSLACVYAGYKHSKDSLTKEELENKTLKDKLDILPKNSLRNPVVEKILNQMINVVNTTIDVYGKPDEIRIELARELKKSAKEREDRTKSINDATAEHEKHRITLRKDFGLTNVSRNDIIRYKLYLELKDNGFHTLYSDTYISPTKLFSKEFDIEHIIPQSRLFDDSFSNKTLEKRDANIEKANDTAYDYLCKKTNEVGLSDYLKRIENLYKAGNISKSKYNKLKMKGEDIPSDFINRDLRDTQYIAKKAKSILEELVKDVVSTSGSITDRLRQDWQLVDVMQELNWEKYDKLGLTEIIENREGHKIYRIKDWTKRNDHRHHAMDALTIAFTKRSHIQYLNNLNARSDKGGSIYGIETKELYRDDKGKLKFKAPIPLKEFRAEAKKHLENTLISIKAKNKVATININTTDKKNGANKKKQLTPRGQLHLETVYGSIQQYATKEEKVNATFNEEQILKVAKKAYREALLNRLTEFDNDPKKAFTGKNSLDKNPIYLDIEKTQKVPEKVKTVASETVYTIRKDISPDLKIEKVIDCRIKTILETRLKELGGDAKKAFSNLDENPIWLNEKKGISIKRVTITGISNAVSLHEKKDKEGKLMLDKNGNPQPVDFVNTGNNHHVAIYMDENGNLQENVVSFFEATTRINQGLSIIDKEYKSQDGWKFLFSMKQNEYFVFPNEETVFNPNEVDLLDSDNYSLISPNLFRVQKFGNISTSGIWFRHHLETTVETQKELKNITYKVIQSTKNLRDLVKVRLNHLGQIVSLGEY

SEQ ID NO: 6892 - protein, 1450 aa, unidentified
  REGION 1..1450: note = Description of Unknown: Cas Enzyme sequence
MKKILGLDLGTNSIGWALVEQDIENKKGCIVDAGCRIIPMSQEILGEFEKGNSISQTAERTGFRGTRRLRERQLLRRERLHRTLNILDFLPKHYANSIDFEKHLGKFKLDTEPKLAYDELGKFIFIKSFEEMLVDFAKSQPSLVNNGKKVPYDWTIYYLRKKALKEKIEKKELAWLILNFNQKRGYYQLRGEDDDETPDKLIEFHELKVVKVEDSGDKKKDDVWYNVFLENGWIYRRSSKTPLFDWINKTKEFIVTTDLNDDGTIKTDKDGKEKRSFKAVNSEEDWIAIKKSTEDKIEKSHKTVGSYIYDTLLQNPNQKINGKLVRTIERKFYKAELQAILTKQKEFHEELQSEELYKLCLEELYPNNYSHRNNIGNKDLVHLFLNDIIFYQRPLKSKKSLISNCRYESRTYKKEDGTFGVEPIKCIAKSHPLFQEFRLWQWMKNLKIFLVDTDKDVTNDFLKTEEDWVKLFDWLNCRKEIDQKAFLKYPAFELKKEVNKYRWNFVQDKSYPCNETRSQITTRLLKVENVTDDFLTKEMEESLWHILYSVEDKSEIEKALKTFADKNNLGNDFVEAFKKFPRIEKDYGSYSAKAIKKILPLMRMGKYWNAENIHKQTKERIEKIINGEVDEKIKNRVREKAIQLTDIRDFKALPIWLACYIVYNRHSEEGDIKKWHAAVDIELLEQHSLRNPIVEQVINETLQVVRDVWKTYGEGKENFFDEIHIELGRDMKNPADKRKQITTQNTENENTNLRIKAFLAELMNDKSIENVRPFSPSQQELMKIYEDGVLCSENNIPEDILKISKTSLPSSSELNRYKLWLEQKYRSPYTGAVIPLSRLFTPDYEIEHIIPQSRFFDDSFSNKVICETEVNKLKDNQLGLEFIQNHHGEKVSLNFNKTATIFGEEEYQDFVKTQYASSRGKMKKLLLVDIPDKMIERQLNDTRYISKVVKNLLSNIVREEGEEETTSKNVLSSNGTITSILKQDWGLNDIWNDIITPRFIRMNELTKSNSFGVINPNTNKFLPKVPIELQKGFNKKRIDHRHHSMDALVIACASRNHINYLNNEYAKAEKKDARYDLKNILCYKKYNDESSDNYKWIFKKPWDNFAIEAKGTLQTILVSFKQNLRVINKTVNNYQKWVPQNDGTLKKRFIKQTKGDSWAVRKPMHKDHVFGKVSISRNGKLIEGDAIRIAINDKFTRKQLESVTDTGIQKILEKHLKSYINEKGEEQFEIAFNADGIDALNQNIVTLNKGKNHKPIYKVRVYERGNKFAIGYIGNKGTKFVEAAKGTNLFFAIYADENGKRNYETIPLNIVIERLKQRISAVPEKNEMGKDLLFYLSPNDFVYIPTEDEKENPNLFDFKRLNNDQIKRIYKFVDGSGDLANFIPCNSASTLLNINNKEQEKRGINYLIQNEYGVGSPQSKNQKSLEGIMIKDSCWKLNVDRLGKIISVLK

SEQ ID NO: 6893 - protein, 1119 aa, unidentified
  REGION 1..1119: note = Description of Unknown: Cas Enzyme sequence
MTDKTHGSLTFGFDIGIASVGWCVLGENRIIDLGVRCFDKAETAKEGESLNLARRTARLMRRRLRRRAWRLTKLARRLKREGLIEGTNDLRTPKPALKSPWLLRIEGLDRRLDSDEWACVIYHLCKHRGFHWISRAEEKKAEADAKSESGRVKKGLADSRKRMTEKGYRSAAEMVLAEFPDAQRNKQGDYGKALSRLLLGDELALLFQRQRELGNPHAHRDFEAAIIGCGDHKSGLFWDQKPPLAGSDLLKMLGKCTFENDEYRAPKASFTAERHVWLTRLNNLRIVVDGITRSLNEEERRIALPLPYRQVGDLTYKQLRAALLKAGLLPESFKFAGLAYPTGAQQAGGKTKDPESDRLVKLPAWQELRKTLKDKGLETEWESMAGAANGGRPEMLDEIARVLSVFKDGDEVAAELRKLQLPGGEKMIEALGEVSFDKFHNLSLVALRKIVPHMEGGMRYDEACVAAGYHHSQLHKVGEGASEYLPPLYSHRDKDGRMVFRDDLDVPRNPVVLRALNQARKVLNALVRRYGSPAAVHVEMARDLSRPMDERNKVKKAQEEYRNRNEKDKAAFADEFKIPAKSREFEKFQLYREQQGKCAYSLTPLDLHRVLHDIGYAEVDHALPYSRSFDDSKNNKVLVLAAENRNKGNRTPYEYLDGNSDSVRWREFAAVVESNKSYRLAKRSRLLRKDFGGKAAEEFRDRNLNDTRYICRFFKNYVERFLKLAEGSEARRCVVLSGQTTAFLRARWGLIKLRSDSDRHHALDAAVVAACSHSMVQRLVKYAKNRELEKVREGFVDAETGAIINPAMFQQLHEHFPDPWPDFRNELNARLYIDDPNELRAKMESLGTYPADALAAVRPLFVSRAPQRRNGGAAHKDTIYGQPERLKQQGGVTQKVSLASITLKDIDKLIDPHRNEKLYAAIRARLEACGGKSDKAFPPDNPLRKPDREGNPTGPVVRTVTMVIDKLSGIPVRGGVAKNDSMLRVDVFRHKKDGKFHLVPVYVHHAVANELPTRAIVQSKEEDEWTIIDDNFDFRFSLYPNDFIQIRQKGKAPIVGYYASCHRGTGNLNIWAHDRNQKIGKDGQIEGIGVKTALGLDKFHVDTLGNIYPAPEETRRGLA

SEQ ID NO: 6894 - protein, 1129 aa, unidentified
  REGION 1..1129: note = Description of Unknown: Cas Enzyme sequence
MKKSRIKLTLYHTKSIGVNTVRPLVTECRKKMTPCLSGMVSFFLRRLYMYKIGLDIGTTSVGFAILETDINNEPNRIIELGCRIFDCAEVPKTGASLATPRRLARGARRRNRRHKHRLERIKSLIIRYELLTKDDLERLYSTVNLPDIYQVRYEALDKKIDNENFARLLIHLAQRRGFKSNRKVDSEDKENKEAGKILKAVNDNRNRMVEHGYRTIGEMIYLDDEFSEHKRNKSEDYSHTIDRSQMVEEIELIYKSQRNLSNVFASESFEQEYLKIYTSQRAFEEGPGEKSPYAGNQIEKMIGHCTFEKEEARSVKGAYTYEYSVLLQKINGMTINNINGQKRKLNTQERMILDALSHEIAELKYTRIRKALSLEDDEYFVGLTYGRKEKKEVEDKSKFQFLKHYHLMKKAFNKISQDKIISIPIEIRDEIAKILTLYKTDEKIIEKIKEINNPIVDEFFIEAVLTLPAFKQVGNLSLKATNHILPYLKAGELYSDACTKAGYDFRAHTGYSKRNLLPPLDNNSPEITSPVVKRSISQTIKVINAIITKYGAPMSVNIELAREMSKNHDDRKAIEKEQKENFDKNDQIKKRLKEEFRIPFPTNLDVTKLKLWEEQDGVCLYSGQSIQIQNLFDPGYAEIDHIIPYSISFDDSFKNKVLVMAKENQEKKNRLPLQYLTGPKRDAFIICVNDRIRNHRKLENLLKEDLSEEEMKEYKERSLNDTKYITKFMHNYINACLLFDDAFTGKKKVKAVNGIVTSYMRKRWQLSKVRANGDLHHALDAVVVACITDGNIQKVTRFSKNHEMRYEREHDRNQFNEKFPPPWVGFTDEVEIRLSEKPAEWLKKRQLPNYEGLDLSRIKAPFVSRYKQKKTTGKAHEDTVKSRKVIGGQQYGIKKVSLTSLKLDNNGEIKDYYQPESDRFLYELLKTKLNDANGDAKKAFTEPIFKPTPKGGKAPEVKKVKIIEKMNVGVTVHNGNGLASNDAMVRVDVYHIDNDGYYLVPIYVADLLKENLPVKAIVANKPYENWKEMSPKDFIFSLYPNDLVLIKFKKPKEFIIVNDNSTLENKKNFEQIFAYYKTTDSKNGSIEIINHDNTYKAKAVGFKTLTAIEKYGVDVLGNIQKVESERRPV

SEQ ID NO: 6895 - protein, 1019 aa, unidentified
  REGION 1..1019: note = Description of Unknown: Cas Enzyme sequence
MTEQILGIDLGANSVGWSILEERRGTGVRIVASGVRVFEAGVEGDIESGRDMPRNAERRDARQHRRQLARRAWRMRKVARVLQGSGLLPDGDGASETGRHRLLLELDKRLQPGLRGDDDSWAHVFPYRLRARALDERLESWAIGRALYHLAQRRGYKSNRKAAREDDDERGTVKPAIAELAKHMAEAGARTLGEYFSRLNPREERIRGRWTSRAMYEAEFEAIWSAQAQHHPELLTDAAKEEVRQAIFFQRPLRVQKHLIGTCPYEPERRRAPLALLAAQRFRLLQQVNHTEIITPEGEVLPLTSEQRAALVSALEREGDLTFAKVRKLLGFTKQHLFNFGSEDEEKFIGNRTSAKLAGIFGERWWNLSDEDRNRVVDDLLSMENEEALAGRGVRAWGLDEAQAAAFAAVQLEPGYCRLSRQALARLLPLMEAGMPYMTAVKQVYGVRRETRTFAALPPVDKALPELRNPVVHRCLTELRKVVNGIVREYGRPDVIRVELARDIKNTRKERKRISKQNLENKTAREKATARIHKEMGNPHPSRADIEKVLLAEECNWECPYTGKHISMQSLLGDAPQFDVEHIVPYSRCLDNSFLNKTLCYHEENRNTKRGRTPFEAYGGDAEQWEAILGRVKGFQGTGRGPKLQRFRLESLESMDDFTARQLNDTRYASREAAEYLGLLYGGAVDPEGRRRVQVSRGKVTADLRNAWKLNEILGDGPRKERDDHRHHAIDAIAIALADAGTVQRVSRAAEQAEKNRAWKWWRNLEMPWESFLEDVRSSIEGITVSHRPDRRVRGALHDETLYSAPRLGPDGSVCVHVRKRIEDLSLNEVNAIVDPVVRAAVVAALDGREPKKAFGAPGSAPCLVARDGRRIPIRRVRLRTSVATVQLAQGPRLRHVVPGANHHIEVLEVADAKGDVKWEAVMVPLYEACERLRRKQPVVQRDHGPARRFVFSLAPGDLFALEKEREGSGLFIARTISQKKSGAVSIEYVRLSDARKKVDIKAAKEWVMISPNELRKRG

SEQ ID NO: 6896 - protein, 1037 aa, unidentified
  REGION 1..1037: note = Description of Unknown: Cas Enzyme sequence
NACFLFLDCSNNLRLCKVLAFHFQNLKLTIQTIGNSNFFGPTSGELTVGVRIHQLDNFSKVDKNGKVTNSMSPEQDFAMGRGLSPNASRTAKRSMRRNLNRYQLRRKDLIELLLRENWITTKTPLTETGKNSTFETIGLRALAASQKITKEQFARVLMAINKKRGYKSSRVVKNDEDGQIVDGMAVAKKLYTENLTPGQLAYKLLQKGEKTLPDFYRSDLVAEFEKIWNFQKQFYPEIFTDTFKKLLQGKGRQATATSFWTDHQFNTAENKGSREEKKLRAYDWRARAISEQLLVEEAAYVIAEINGNLSQSSGYLGAISDRSKELYFNNQTVGQFLCQQITTNSHARLKNQVFYRQDYLDEFERLWETQAKYYPELTELLKSEIRDVVIFYQRKLKSKKALVSFCQFESKEVTNKINGKVIKRISGSKVCPKSSPLFQEFKIWQDLGHVRLKNRISGEIFKLGQDEKQFLFDELNLKGNLPASRIIKLLGHKPTEWELNYSKLEGNRTNQALCEAFFKIIELEGYDAQELLNLDKDADEISLADSKILAPQINKILEDIFVTLEIEPGILHFNAELDGKDFEEQSAYSLWHLLYAAEDEDRPSTPEERILYGNKDILLKKALARKFGFKPEHTKLLSDISLPEGYSNLSAKALRKMFPFIKELEYAAAAAEAGYNHSSYLTKEENEKRILQPKLELLKKNSLRNPVVEKILNQMVNVVNSLIIQNSEKNANGEITKYFQFDEIRIELARELRKSAKEKEEMSAQIATSQKKNEKIISILKDEFKIINPTKTDIIRYKLYEELKNNGYKDLYTDTYIPRQVLFTKEIDIEHIIPKSRQFDDSFSNKTLAYRQVNLDKSESTAIDFIENKFQVKLDEYKSRVENLYTLGKRKPDEGISKAKYKKLLMKGDEIGGGFIERDIRETQYIAKKAKQMLLCICRNVVATSGEITSRLREDWDLINVMKELNLPKYRAAGLTQIQERKYGQNVEVITDWSKRNDHRHHAMDALAVAFTRHNHIQYLNYLNARKDENNKMHKNR

SEQ ID NO: 6897 - protein, 972 aa, unidentified
  REGION 1..972: note = Description of Unknown: Cas Enzyme sequence
VSTMRYRIALDLGSTSLGWAMVRLDAQNETCAVIKAGVRIFSDGRNPKDGSSLAVSRREARAMRRRRDRLVKRKNRMVQTLLRHGFFPQDESARKALVTKDPFALRAKGLDEALLPEEFARALFHINQRRGFKSNRKTDKKENDSGALKTAINQLRQAMQATGCRTVGEWLHARHQQGLSVRARYRENRITKDDGKTKIEKSYDLYIDRAMIEAEFDALWAKQSELNPALFNDTARDELKDCLLHQRPLKPVKPGRCTLLPDEERAPLALPSQQRFRIYQEVNNLRLLREGLNEEPLTLTQRDQLVNALETNNKRSFTQIQKLIGFSGQFNLQDEKRTELKGNNTSAMLSKKEFFGSDWLRFVEARQDAIVMQLVTEENESRLIAWLQADTGVDEITAERIANVPLPEGYGSLSAKALEKILPALRSEVITYDKAVQVAGFDHHSHISHAATGEILSELPYYGQYLQRHVGFGTGKPEDPAEKRFGKIANPTVHIGLNQVRTVVNALIQRYGHPSEVVVELARDLKQSQEQRKEDQKRQGENQRRNERMRDDIARLLNTSPERVRSADLQKMVLWEELSFNVADRRCPYSGVQISAQMLFSDQVEIEHILPFSQTLDDSLNNKTVAMRQANRIKGNRTPAQAAADFEAQGWNPEDMLARASLMPKGKRYRFAQDGYEQWLREDKGFLARALNDTRHLSRVAREYLSLICPQGTRVIPGRMTAMLRAKFGLNDILGLNGEKNRNDHRHHAVDACVIAVTDQSMLQRFAQASASARDQQLNKLVATMPLPWERYRDHVQRAIDNIWVSHKPDHGHEGAMHNDTAYGLLGAGRVHVRKTVEGVRTREIAALKVIEFADSHGHPRHGFLPTGQPKPYKGYKGDSNYCMEIVRNDKGKWEGEVVSTFEAYQLVRQHGLARLRHPALSVSGRPLVMRLMIGDMLVLNVADNTKMLARIATISGNGQIFMAAHSEANVD

SEQ ID NO: 6898 - protein, 1382 aa, unidentified
  REGION 1..1382: note = Description of Unknown: Cas Enzyme sequence
MKTVLGLDLGTTSIGWAIVHEPASGDSKIIKTGVRILQYDNFVNSSSGKESKDPVKDFASGNGISSNAGRTARRGARRNLQRYKQRRKELINILKREGWINEETALTEIGKNTTHQLLSLRSRAVTERIELEELARVLLSINKKRGYKSNRKVQEDIDGQAIDGMSIAMLLHQRNIFPCQYMMEQMEQGKSKKLEFYPSDLEDEFDEIWLNQSKYYPELLSNDLKKQLEGVTDNQTWAICEKPFGLVGIKRTGTKKNQVEENLKWRVQGLTEQLDLEHLVIVFQEINKAINGTSSHLGKISDRSKQLILNNQTVGQSLFERISQDPHNSLKNMVFYRKDYLDEFNRIWEEQSKHYPKRLTNELAKEIRDVVIFYQRRLKSQKGLISFCEFEQKEVEIKGKKKTIGSKVVPKSSPIFQEFKIWQILNNLKFNHLIERTKHTIQELDSELTFRKEAYLKLALGGKVSANAFLKLMELDPAVWEVSNYDSIEGNHTVSEIFKAFKKIAEESGHIISSKNEVADLKQVFDTIGIPAELVNLETSNYDDSFEQHAFYRLWHLLYSYEGDDSKSGNEQLIGALNRNFSIPREYAHHLCRVVFKQDYGNLSAKAIKKILPHLQDGLPYSDAAALAGYNHSHAITKEENLKRQLKERLEPLKKNSLRNPVVEKILNQLVNVVNAILEEYGPLDEVRIELARELKQSIKARKDTTKRINDATKKHEEIRQKLQQLKPFNQGVRITKKDIVKYKLWEELAPLGYKTIYTSTPVNLEELFTKRFDIEHIIPKAVLFDDSFSNKTLATRDFNRYKSNKTGVDAVIEKYGEDSEGYKSYISNVESLFAKGKGVLSRGKYSKLLMTGANLPQGFIERDLRNSQYIAKKASQMLLEITRNVVPTTGKITSRLREEWELINVMQELNWDKFKQAGQVEYQTNKDGDHIGRIKDWTKRNDHRHHVMDAITVAFTRRSHIQYLNYMNARKDKGHQHHAVISAIEKNQTQLKGSRRIFIPPMPLEKLRSEVKSHLESTLVSFKAKNKVTTRTMNDAKGNHKNRLSLTPRGQLHKETVYGSSKKLVQKEMKIGGSFDQSIIEKVSDETYRNALLKRLEQFDFNPKNAFTGKNAPSKNPILTKDGVSLPEKVNIQWYENQFTIRKSISPDLKIDKVIDEGVKRALLRRLERFNGNPKEAFTNIENDPIWLNEEKGIAIKKVTITGVTTATPLHVKKDHLGQPILSKDGKEIPVDYVSLGNNHHVAIYQDDKGNFQEEVVSFYEAVERTNQKLPVIKKNHENGWHFLFTMKQNEMFVFPNENQGFDPNEKDLLNPKNYRFISPQLYRVQKIGTKDYTFRHHLETTLDGKLKDVQYKRLQSTNALKGIVKVRLDHLGNIVQIGEY

SEQ ID NO: 6899 - protein, 949 aa, unidentified
  REGION 1..949: note = Description of Unknown: Cas Enzyme sequence
VIRSDNGNGYVSRESAGVLAEHGLPHPRHGSDRPSPCSHLLARSAPPLLLHAQLWPSDSLEEATLYDTNPYDLRARALKERLEPYEIGRVLLHLNQRRGFLSNRKKDRGDKEVQGMLAEINTLADEVEADNSATIGEHFAKALAENPLQAVRGHHTHRSMFEHEFDEIWKRQAKHYPTLLTDQLKYGRLGKQSYPQKPIPRYDERRNGATQLDAFGIYGLIFFQRPMYWPKSVVGMCEFEPREKRCPRADRHAQRFRLLQEINNLRYSDPDSRGDECSLDEKQRTLVLDYLSTHEKATFEQIKKKLGFLESVKFNLERGQRSSLKGMVVDCLMAKAMGKSWHDRPEEEKDEIVRMLINNEREDDRVISNLVDDHQFAPADAEAVLNVDFPAGYVHLSLKAIDKLLPHLERGLAYQATTDPEKSALHAAGYLRRDELRRRLFEKLRDPSRVRAGDLRIGEIPNPVVKRALVELRKVVNAIIREYGKPDAVHLEMARSMQMGKEKRSDLNSEMRKQEAEREAAAQSVRGLGIKITRDSILRHLLWLQQSHECVYCGKPISQKQLFTGEADVDHILPYSRCLDDSQMNKVVCHRKCNHDKGNRTPFEWLAGSNPDAYDRVCIQAGSLLKRGLMPYRKYRRFLQKELELDKFIARQLTDTGYIAQATGEFLRCLFEKEHQVLGLKGQLTAELRWQWGLERILEEMPDSPAWRENNNDVRPGEKNRADHRHHAVDAVVIAMTNRSRLQKLSGIVHRGEARTHGEVLEDPWPTFRDDVVQAVRKINVSYRVERKVAGKLHEETLYGPTPTVGEWVLRKPVTTLSPAEIDRIRDPEIKRIVVAKLKQHGIDFGRGKKPDAKKMKEALSNLEMPSGVPINKVRIIKPELTIQSVREGRTDQAYVKPGSTHHLCIFEVQKRGKPKREAVFITMLEAINRLKRNEPIVQRTHPDKPDAR

SEQ ID NO: 6900 - protein, 1211 aa, unidentified
  REGION 1..1211: note = Description of Unknown: Cas Enzyme sequence
MITLGLDIGSNSVGSAWIDTKTKGIRLGVSVFPAGVDETEEKRGGPKNQARRQARSQRRNIHRRAERKRKLARMLADHGLLPRDHDALSKLYSLDPWVLRRKALLEPLTPHEFGRIVVHMAQRRGAVGVETDPEDSDEGKVKEGMDRLGALLHERDAETVGQLMADLIDERTGHHQGVMWKDPIRNRQYRIAEDQMLFAGRELIRQEFWLIVERQRAHAGSVLAPMLTDDVLRELDDPTQTNTWRHGGLLFRQRRTYWDTGTLGRCDLEPTERCVPHADRHAGYFRVVETVNNIRIAKRDSPKAPLTAAQRDAVIALLRGPLFKKSKGKLVPKTSASVTDIKNALSIKPRDKTVQLNIEVDKEREINTDWFHREIVHGAFTEARWDSMNEKQRESVNRAVLKFDPDRHGDAERLRNGAIQWWALDEASAAQLVEAWRGRQKLEKRLNLSRRAILNLLPYMERFDEAADRWPTQVEARMAYAQTQTDEHSRRRYETGASGLSAGDRRFMRLRKHQIAEGVPELPPAPMVSNPVVRKAIHEVRRHLIAYLRTFGRKPDRVVIEYARGVQDTAKRRNAILAANREREKERIRIEENLKGWGIAPSNWAAATRRVRLCREQAGVCPFSLSGANANRVITEKMAAEGKEVEIEHIIPEALTGKTMAFNNLVLCFREANRGKGMRTPADWLGDEGLSAMVHRLENAPIKINRAKWERLQMPTPDEEGFRNSQLTDTAYAARQVAAYIADALFDGQGLPERGGRRKIITTKGEFTARLRADWGLHETTIDRAHGLERTLTAEELANDPTLKQASRRAQKQPKDRTDHRHHAIDALVTAAIGPELLTSLGRTAREDREYRERTGYWPGRRAIDPPAPWETAESFHEAVMAAFDGLLTSHRAVKRRIFGALHEETHYGPVIGPLPRHRREDVGTLFTNRISADRLKPKHLHVPEKWDEFSAPLEDEKVPLGEKRAIRRKLAAIEDHSPGKSGIVRDRALRDRLRKCLRANGLDPDGFTPNEIKGLVRDGKLTMKSGVPVKGVVLLRINTDPVIIPRKKWDMDAGRMVEDGNPRTTRVYIGGNNHHVRIVEDRKTGKWMGSVKSTFEAARRVRIEKKDAVDRSDNDQAAFVMSLAEGEMIHARRKGRPDEPASYFVVCKLDKAGCSCRIHFAPHWDARKAREQDRWDVTPSGLKACGPEPGQTPYKVRVAPLGDIHKLERD

SEQ ID NO: 6901 - protein, 1048 aa, unidentified
  REGION 1..1048: note = Description of Unknown: Cas Enzyme sequence
MTDYRLGLDLGANSIGWCLLDLDSSGRPCGVRDLGVRIFSDGRNPKDRTSLAVARRTARAMRRRRDRYLARRDGFLRALIRHGLMPADEAARKALEGFDPYELRARGLDERLEPAELGRALFHMNQRRGFRSNRKVDGADESESGKIREAAGRLRAAMAESGARTLGEFLWLRHKDRQPVRARLSGEGAKAEYELYPQRDMLEAEFAALWGAQAPYHPRLLTQAAHDDLHRILFFQRPLKPVRAGKCTLDPTEERAPRALPTAQAFRVLQELANLKIQSPGEAARHLNRAERDALAKPLLTKEKRTFDQMRRILKLSPGVRFNLESEKRKHLDGNKTAALLARKGLFGPGWHDLPRDEQDGIVERLLAEEDEPALVGWLEERYGLDPQAAEKASRVRLPAGYANLGRTALHKLTGLLEAKGFEGYGYDDAATEAYGHHSDFRDGEIFESLPYYGRALERHVAFGSGEPGDSEEKRIGRLANPTVHIALNQVRRVVNAIARRHGPPDQIVVEVARELKQSIEKQREIQRDQAENQKRNDERREKLKQLGIADTGENRLRLRLWEELNPKDPFDRCCVYTGENISIQRLFSSEVEVEHILPFSRTLDNSFSNKTVSLRRANRLKNNLSPYEAFKDSPAGFDWAAIVSRTANLHKGKAWRFALDAMEKYESEKAFLDRHLTDSQYIARLCYAYLGRICDPNRVWVTPGRLTAMLRGKWGLNSLLSDHNRKERSDHRHHTVDAAVVAATDRGLLNVLSRTAARAEELELSRVLDDVPVPFEGFRNALREGLDRIVVSFRPDHKIPPRGRRSGAATSDRLHNDTAYGIVAGPDAGGRCEVVHRKPLIGLKSAQEIEAVRDAQLREDLREEAARAKSEGRPLKEVLQAYSERTGVRRVRVMENLSVIPIADRLGRPYKAYKGDSNHCYEIFAAADGKWRGEVVSTFDANRRDFTPGWRQEFPDAPPVMRLHKDDMVELDEGGERRIFRIVKFSPGQIVLAEHYEGGNLKARDAAPNDEDPFKYLTKSPEGLRKLAARPVRVDPAGRVFRAGATA

SEQ ID NO: 6902 - protein, 1038 aa, unidentified
  REGION 1..1038: note = Description of Unknown: Cas Enzyme sequence
VAEQEQPCYTLGLDLGTTSIGWAVVETEPEQYKPRSLVAAGVRLFDAGVEGDIAGGRDESRATKRRQARLQRRNTWRRKRRQWKVFRLLQEAQLLPPLDTTDPEKRHQYFLDLDKQVRDEFVKPKKRVDNHVFLYQLRALALDGPLPPHAVGRALYHLAQRRGFLSNRKGEDRDDEDRGNVKKGIADLEAEMAGAGSRTLGDPEEQRIRQRWTRRSMYQEEFEKIWVAQAPHHASMTEDARRALCQALFYQRPLKSQRGLIGHCDLEPDERRCRIALRTAQRFRLIQGVNHLRIRPPGNEPEEKLTQEQRVLLIETLTREGDLKFSRVRKLFGLPQTWKFNLEDGGEKRLIGNRTESKLAAIFGDRWCELDDADKDAVVEDLLSYEKQPALASRGRRRWGLDSEQATAFSLMALEQGHMRHSVRAIERLLVPMADGVPYATARQDAYPESYQAQEQVDQLPPLGLALPELRNPTVSRVLGELRKVVNGLARRYGKPARIRIELGRDLKTPRTLRERRAKENRARQAVRGAAKQRLLEEAGIRQPSRADIEKVLLADECGWTCPYTGKGFDMARLVGPTATFDVEHILPFSRSLDDSYLNKTICDVHENRHVKGNRTPFEAYSGNVERWHEIIDRVRHFNGDAARIKLHRLQMEEIPAEFASRDLNDTRFASRLAMDYLGLLYGGRVDEKHVRRLQASSGRVTAHLRRAWQMNAILGMNGHKSRGDHRHHAVDAIAVALAGPRTIELLAHAAQQAWEVGGRLYAPVTEPWRGFLNDARRVIADIAVSRRVNRRLRGPLHEETLYSKRKDGRDRDGRGVAFRHVRKPLAKMSPAEVSAIVDDQVRELVRERLDIVGDTPKKVFADEENLPHLRTKDGRVVPIRKARIRLHKSVASIGSMGSERHVAPGTNHHMAIVASLDERGNEVRWEGHVVSLLEATQRYSRGEPVVQRDWGVNRYFKFSLTAGEFLSQEHEGKEQLVRVVSVSENDIESVLHTDARPITERKKIKGARIRGGPDKLRQRQACKVSITPLGDVVPAND

SEQ ID NO: 6903 - protein, 1044 aa, unidentified
  REGION 1..1044: note = Description of Unknown: Cas Enzyme sequence
EKGFERSVNYSDKTNVSGCPVSARLKDIFGESWKVFKKETGSVRKNKKGITHAIVYSIEDIWHVLFSFSDEEIVAEFASDKLDLDETKIKKFVTAWKSIPEGYGMLSLHAIKKINEFLREGFIYTEAVLLANIPTIIGAEVWVDPENQKLIKESIAGLIDENRQTKLILGIVNSLTAKYKSLHDDEKYGYKDNSYNLTESDKKEILNSIIEAYGEKSWDQKIGNKAEVIDTVTSLYQFTFRNGFETKLFGEDRYHIVVFNNQTFYKAVGHQFYKLPRVVDTIIDFIRGHFTHVSEEQLSKLYHPSMVEFYPPAPRSEDGKFYLQSPKIGAFKNPMAMRTLHELRKLINYLIKTNQIDEETRIVVETARELNDANKRWAIEAYQRQRQAENNEYIDAIRGILENKEYSTPPNQDSTDDIDKVRLWYEQVKLNQISKGKGDYTQNKWTAQTTDLFQNLGQAKTLLEKYRLWKEQKCICLYTGRIISISDLFDTNKVDFEHTVPRSISFDNSLANLTVCFAKYNRYIKKNQIPTQLPNYEKDITIGGDTYQAIKPRLKDWEDKVAHIKSMIEFWKGKSKTASDKNYKDDAIRQRHLWQMDLDYWQNKLDRFTMTEVKSGFKNSQLVDTQLISKYAMHYLRSAFNTVDVQKGSVTAEFRKILGIQATYEKKSRAKHSHHAIDATVLTLIPHAAKREKILQLAFQAEEEKKSAEVSKQWDIYEHLKNEIAAEIKRLELPDTNRVIDEIDNQILVHNIARDQALVPGKKYVRRRGRIVYLRDKNGNIIKDVSGNPRPKIAQGDCIRGQLHLDTFYGKIKLVERDENNKPMKAEGGAWKYVEKNEGFAYVLRKPVSAITKLDQIVDPILRGIIESQLDGRSLEKAFLEGVYMLDKKRKIVGKPIRHIRCWADTSNPIPIKLQTYLSTAKDYKNSFYAANAENSLYAYYWDGKSKDRGFECLNLFQLASLRKISQTDRLEDYFSPSKELGRGKEKKNMPLYAILKPGLKVLFYKNSSEEFKDLSTAEILKRLYKINRLYSSVSGQIMFDYHT

SEQ ID NO: 6904 - protein, 1135 aa, unidentified
  REGION 1..1135: note = Description of Unknown: Cas Enzyme sequence
MGGRPTRYVIGIDVGQSGIGKVAIRVDSDGMPVEILNANVTVIDAGKDPASGKTPKSRLATAGQARRVRRRFRRRRQRLKRLARYLAQLGYLPPDKSRTYDAWLARRDLAMRYEPDEAKRAERLALAIMHIARHRGWRSPWWSYRRLETAPAPTPTFAELQQRAAAVFGRPVEDFPTIGAIGAAAASPRFALRLRSRGGSLAAQNPHLVLFHKKILQEDVLYELKRILSTQRVDPGVARTVCEMVFDVSKPYTRGESVGRDPIPKHSNLQRAPRSSLEFQELRIRQVVANVRVRGEGGKRRLTREENERLVTWLMDRIEAPSWAEVAQFLGLEPEQLTHEAVDDPVGNRAPILATKAAIERGAKDWPHVYNWWTRQATQEERSLFASFLGDTTDTGDYSAIEAYLEEFPEDELVKLMETASVPKGRAAYSRATMRELCEYMAEHRVDLHGALTGLYGLPAGWKPPAPSIFERLEYPHPTVDQITRDVARWLQAMVSKYGTPERVTVEHVREAFMGVAQRAEYQAQMRRRQRDRERIRAELVQQGYANPTEQDIRRFRLVTMQNGECLYCGEPITLATSELDHIVPRSVGGSNRSENVVAVCKRCNQAKGKNVFSQWAAATDYASVEEALARVDRWDRPRDFDAASFNRLKRDVKNRLRRKSEDDPIDERSLASTAYAAREIAQRIQAYLGSLDRPVDPHSGEVLDVKVQVLSGGVVSEARKASGIDKKVRLRGFGHKTRLDRRHHAIDAAVAATLRLTVGKVLVERRELRDMTSAVATPEERDAWKAYEGSNPMEVEQFRRWKARSGRVAELMERAIAEDRVTVRYPLRLGPNVGSVHDDTIFPLHKKPAREAFTPNEVLAIADPELYIAALPLLDKRGGLPKLAEREPTGTVLDDPDGVVELFPSWDKSDITPYLRVRGGAAKIGSTVHHARLYAVPSKRGPKLYQMRVFAGEFASIGFKKAGVDLFTAELPVWSQSYRAAPRALRDALEAGTAVCLGWLVPDDELEFPLEVLHLVPSLTPPAQSEGQAYPLRETICERRWRVSGFEDADRLNLKPVLLASEEFRHAELHALADAPGGKAYFGMQGWRLSVSKLVELRPTVIRRTASGTPRWRSEGSLPTSWRLEDVLAVVTAP

SEQ ID NO: 6905 - protein, 939 aa, unidentified
  REGION 1..939: note = Description of Unknown: Cas Enzyme sequence
GLERKLSLFELGRAIMHLAQRRGYQTNRKGGDPAEDKAVGKEAQELLVEIDQSNSGTLGRYLYRAATGQVEDVSGFVEGRIRNRRTFREMYKDEFDKLWGCQREYYPSVLTGELKEEIRHAIFYQRPPRYREPGPCDLDGQPRCLRACWTARQFVLWQKVNNFRIEIPYREPQPLRDEQRMVLHRLLSTSTRVTFVTLRKRLKPPDSSTFNFEEGGRKKSITGDPFLSDIRKALGTDVWDAMDEGGQRRLVDLLAHEDDETLITQVLTGDGYQLDAQTTKSLLKVYVPEGRSSFSEDALRKILPQVRDGKRTDEAIRLIYGATGAPQGPVSERLASVEPIENHVVMKAMCELRGVVNALLGIYGKPNRIKVEMARDLNKSRSEKDRISRQIKRNTERNDEVREGLKDLEKEYGLEIPPKRANIVRYRLWTETSQTCIYCGRRIHPTKLFGDHSDCEVEHILPRKRSLQPYDYNNKTLCHVGCNQLKDNCTPFEAYKDRPEEYRRLLKRVFASDMPKAKKLRFIKETLNLDESVERNINDTRYVTRRALAYLETLGGKVFGTRGMATDLMRKESGFETLLEATAIGKKHEDNRNHAVDAVIVALTTADLLRDIARGYGRDGGFNLARSWAGIRKQLEKRLPEVKVSYRPRYRISDYLHKETAFGLTREGKEAFSRGQMEQLSKHAWIAREELPYIIRKNLTDLIRSVADIETQLPCHATNIKEAILAEARRNGVDIDDPNATIPWGGMASGDDADTPGPPRKRAKVYLRSKNGRKVPTYKIRVREPHSNMLVVTNRMGEPYKAYPLKNNHHIELVEFTNPDGTTVRKGIIVTQLEAARRWAERKSVVRTDYTADGGRFLYSLARNEMFMVQSEDGREVLHRIEKISGSAIILRPHTYGGVCKDTDKPPCVLRKSPNTLRGYKVFVDCIGRVHPVPSRMYD

SEQ ID NO: 6906 - protein, 1112 aa, unidentified
  REGION 1..1112: note = Description of Unknown: Cas Enzyme sequence
LKTLGLDLGTNSLGWALIETPGEPGQHDQGRIVDIGVRIFSQAEMAGRDPQSKTSLAVARRAARSMRRRRDRYLKRRKRLMELLVDCGLLPEDKATRRALLDEMQDRPGDDQSASVYALRARALDEPLDPHQLGRIIFHLNQRRGFKSNRRADRNDPEEGKIATAISALEEQMDDAGARTYGEWLYMRRQKGLSVRARMTADGSAYAFYPSRDALEQEFDAITKAQKRFHPDVLTDPAIQEIRATLFFQRPLRPVRPGKCAYNPAEERLAKSHPLFQAFRLYKELNELEIVGEDKTHTKLTPDQRDALVALLRTGLNKQGTVPFSKMRTTLKLGREVRFNKESDNRKGLLGDVVHFRMSRPECFGNRWAAMTADAQATITEKLRTEPDHDELVSWLMAEHGLDHEHALAVADASLPEGFGRLGRTALATLLDELKTSVDDDGRVITEARAAISVYGRTNSEADPDRTGASFLPKYQTVLERHIPPGTGGEAAEGDPQWDEVMGRITNPTVHIALNQLRRVANAVIAKHGKPDRIAIEVGRDLKLNEAQRAEVNRVIGRNTRDAIRRSELLIETYKVADTGYNRLRLRLWEELNEKPENRVCVYCGKAIRPGAIFTAGTDIDHILPYSKTLDDSGANKLLCCTACNRIKGNRAPADVPHWQADYEDILARTTVLPKNKQWRFAADAMARFGDEEGFLARQITDMQYISRLALTYLAHLYDAEEADLDGIFRRHSRVRALPGRLTEMLRRHWGVNDLLYDHNIAGADTNKSKNRLDHRHHAIDAAVIACTSRSLIQRLATAAAKAEEDGAERVVAKVAPPWPSFRDELRLRVNATIVSHKPDHGTVSRRGNANGHNQTAGKLHNETAYGPTGETDEKGNELVVRRVPITNLKKPSDIMMIRGNAHGHSQLRERLWEATRGLEGKAFEAAVLDFVQNDEVFGARQWTDETGRKRRREGIRHVRIMEPLKTIPIRDANGRVYKGYKGDSNYRFDVWQMPDGKWKAEVVSTFDVHQPEWSSPLRAANPTARKVLSLHQGDCIAIEDDGGRRICRVVKFGLKGQITLAEHYESGSLKSRDASKDDPFKYLSPTAGGLKKLKARQVRIDELGQLFDPGA

SEQ ID NO: 6907 - protein, 978 aa, unidentified
  REGION 1..978: note = Description of Unknown: Cas Enzyme sequence
HELGRALFHLNQRRGFKSNRLADADDNEKSATRAGMRALEDALELAGAKTLGEFLAHRNGRDKFGRRLPDGAGFVTPKSVRFRPTSKGAKNLYAFYPVRLMVEQELNAIWSVQAPHHPRLTEAVLNKLKWIILEQRPLKKPAVGRCTLRPEEDKTDLDGIEIDNGERTPKAHPLFQRFRILQDVAQLRIVRPGVGERRLTLAERDALAGLLMARSGHTVKFDTLRSAAKLPDDIRFNYELAGRAGLPPDQTAAKLAAGKAFGKQWRSLPRERQIEAVERLLAVEDPSELKNWLSTHFEIDKSQIDAISDTRLPQGHGRFGRSILNDLVNVMEKQWKEDGEDPETGEVYRRPLEYSEAVEALELHHSNLKADGQSARLPYYGSVLARHVIARPDAPAGSQEAIGRVPNPTVHIGLNQIRKLINTLIDVYGKPTEISVELARELKLNKKRKDEIQRENRENEKKNLDRRQRLEALKETHNLQVADTYDSRLRLRLFDELPADERVCVFTGTPISMERLFDASIEIEHVLPHSVTLDDSFANKVLCTREVNRIKANKSPAEKWSGDELQAIVERAERLFPRKAWRFQPDAMKRFEADGGFLARQLTDTQHMARMTRTYLEHVCDQVWGPPGRLTAMLRARWGLNDLLGDHNFSDVNQPKNRKDHRHHAIDAFVVACTDRGLLNRMARASGLAEDMNLDRLFPKGEFPEPYDGYRNELYESLQQVVVSHKPDHGIPPGAQGNSHVTSGQLHDETAYGLADDIVDGKRYNLVARKKIDTLNANMIDRVRDPELRSRLKTLATAAKQTGEDLTDALKAFGDANDIRRVRVLETRQSTRLVRHGDGYQKAYVPGDNQCCDIFELSDGSWSGEGITVFDANQPGYRPKWHNRFPDARLVMRVHNGDLVRADFGDGQKIYRVVRLEPSAKRIRLVAHSDAGSYQERHTNDADPFRWNFATYNRLKAASASRVRVDPIGRVSNVSVTE

SEQ ID NO: 6908 - protein, 1460 aa, unidentified
  REGION 1..1460: note = Description of Unknown: Cas Enzyme sequence
METKKILGIDLGTNSIGWALVEQNFEEKAGKIIGAGSRIIPMSQDQIGEFDKGNSVSQTKERTGYRSARRLRERHLLRRQRLHRVLNILKFLPEHYAKEIDFEKRLGQFLPEKEPKIAYRFNETSGKYEFIFTSSFNEMVDDFKINQPALLEGGKKIPYDWTIYYLRKKALRSRITKEELAWILLNFNQKRGYYQLRGEEEEEHSNKLVEFHSLKVVDVIPDEGVDKKGGKRYSLHLENGWIYRRSSKTDLSVWKGKVRDFIVTTDLNDDGSIKKDKEGVEKRSFRAPDENDWTLIKKKTEHAIDASSSTVGEYIYNNLLKNPNQKIKGKLVRTIERKYYKDELKAILSAQKQFHPELQDDDLYCACINELYPHNHAHQSVLEKRDIIHLFVDDIIFYQRPLKSKKSLISNCPLEYRKFSVDGEERINYLKVISKSHPLFQEFRLWQWLHNLKIYSRENDSDVTGQFIADIEDWENLFDFLNGRKEIDQKSLLKYFKLSEKKYRWNYVEDKNYPSNETRFQIQTRLAKVKDIPEDFLTSEIEQALWHIIYSVTDKTAYKKALETFARKHGLDRETFVESFEKFPPFKSDYGSFSEKAIKKLLPLMRLGKYWSWEAIDEKTKMRICKIITGEYDEEIKDRVRKMARDLKRESDFQGLQLWLAQYIVYGRHSEAALAGKWNSADDLRRYIDEFKQHSLRNPIVEQVVAETLRVVEDIWVKYGKGAKGFFDEIHIELGREMKHTAEERKKISDKVNENENTNLRIKALLVELLNDGQVENVRPYSPVQMELLKIYEDGALSSAHDIPDDIAKISKTAQPTRAELQRYKLWLEQRYRSPYTGEPIPLNKLFTPAYEIEHIIPQSRYFDDSFSNKVICEAAVNKLKDRQLSMEFIKNHHGEKVDTGFGCYVEILSEEAYKEFVNDNYAKNRAKRRKLLMEEIPEEMIERQINDTRYISKFISNLLSNIVRSDCNDDGVNSKNLLQCSGKITSILKQDWGLEAVWNELILPRFQRLNELTKSDSFTVWNPRLQKYLPTVPLELSRGFQKKRIDHRHHALDAIVIACATRDHINLLNNLYAHTPKVRYDLQRKLRKFEKASIRDKITGEMVEREIPKEFLKPWNTFTQDTRDVLEKIVVSFKQNIRVINKTTNKYEKYVEKKGTMVKELTPQTKGDSWAIRKSLHKETVAGKVNLERIKIPKGKILTATRKAIDSSFNLKAIESITDTGIQKILKNYLASKGGDPELAFSPEGLEEMNQNIELYNDGKRRQPIYKARIFEVGSKFPLGQTGNKKAKYVEAAKGSNLFFAIYQDEKGKRSFETIPLNVVIERQKQGLGPAPEINEKGDRLLFYLSPNDLVYVPTEEERENIKAIDFKNLNKEQLTRVYKFTDSSDTTGNFIPATVSNLLFNLSKKDQEKRGLNYYIQNEFGVGSPQSKNQKSIEGIMIKDVCIKLIVDRLGEIKYFIL

SEQ ID NO: 6909 - protein, 1456 aa, unidentified
  REGION 1..1456: note = Description of Unknown: Cas Enzyme sequence
MRILGLDIGTNSVGWALVDYAEKKILGTGVRVIPMSQDVLGDFGKGNSVSQTAERTHYRSIRRLRERHLLRRERLHRVLNILRFLPDHYASQIDFDKRPGKFLPETEPKLAYRLCPSGTGERLTYEFLFKRSFEEMLADFRTHQPQILVDEDGKEKLVPYDWTIYYLRKKALTQKVEKEELAWILLNFNQKRGYYQLRGEEEEDRPDKREEYYSLRIVDVLEDESQKKGKGSTWYSLILENGWVYRRPSKTPLYDWKGKVRDFIVTTELNPDGTVKRDREGNEKRSFRSPGEDDWKVIKKKTEQEVLLSGKTVGAYIYDTLLQKPNQKIRGQLIRTIERRFYKEELRQILRRQQNFHPELRNAELYNRCLEDLYRNNSAHRKELSSKDFVHLFLEDILYYQRPLRSQKALVGRCKFEYRRFLDKNKMPQTEYLKSVPVSNPFYQEFRIWQWLHNLTVYRKEDDADVTAEFLMSQEDREDLFNFLNSRGSIRQHELIKYLLARTKPNGKISKAEIEKYRWNYVEEKEYPCNETRYLIATRLSKVKGISNDFLDKHTEYLLWHMLYSIRDKVEFEKALKTFAKKRHIDEESFVDAFKNSPPFVGKYGAYSEKAIKKLLPLMRLGSRWQWEQIDGRSRSRIEKIITGEYDESIGVRVRQKAMHLSQPGDFQGLPLWLAEYVVYGRHSEAEVAGKWNSVDDLNRYLSEFKQHSLRNPIVEQIVTESLRVVRQIWIEFGNGAKNFFDEIHVELGREMKNPSDRRKRITDQILDNENTNLRLRALLFELYQDGATENVRPYSPAQLELLKVYEQGVLDSETNIEDDILRISKSGNPSSSDLKRYKLWLEQRYRSPYTGKVIPLNKLFTPEYEVEHIIPQSRYFDDSLTNKVICESAINSLKDNQLAYEFIKNHQGQKVQCGSATATVFTLEEYEDFVKRHYARNRAKKEKLLMEDIPDAMINRQMNDTRYISRFVSAVLSNIVRSDSNDDGVNSKNVVQVTGAITNRLKQDWGLTDIWNELILPRFERMNAITKSSAFMAWSEKYQKFLPTVPLEFAKGYSKKRIDHRHHALDALIIACATRDHVNLLNNIHAKSNVRFDLNRKLRRFEKVTYVHPATGERVTKDVPREFLKPWPSFTVDARSAIESIIVSFKQNLRVINKATNRYEKWGELDGKKKKQYYEQEGVNWAIRKPLHKDTVAGKVELKRVRVPSGKVLTASRRRIDTTFDLATIESITDTGIQKILRNYLASKGGNPEIAFSPEGLEDMNADIKRYNDGKDHKPIYSVRVFEIGSKFPLGQIGNKKSKYVEAAKGTNLFFAVYERPDGSRKFSTIPLNIVIERQKQGLSSVPIEDEKGNRLLFYLSPNDLVYVPSPEERLSGTRIDFGSLSKEQIANIYKVVSFTGNQVFFVRHEVASAIVNKMEFSTLNKMERAWDGTMIKEYCIKLNVDILGRVTNAGITSN

SEQ ID NO: 6910 - protein, 907 aa, unidentified
  REGION 1..907: note = Description of Unknown: Cas Enzyme sequence
REPVRARLDIDKEYLFYVRRDMVMQEFDAIWASQRQYHPDLLTDEAREDLRQILLFQRPLHPVEPGRCTFEPGEPRLPKCSPLFQRFRVYQELNSLRVTAPEQPVPRPLAREERDALADLLLRPEDPNKIVTWAAMRRHINLPKDARFTHESGGPDGKRKGFAPDPTYVLSLTLGEAWTGLSGLQREALAVLVTDSATNEDLRLALRGLPDIEFSRKIIRSVSDKARIQPWLEALAAWPAPLSEDVVEALVDVSLPEDYANLGRKAIEKMLPELEAEVITYDEAARRAGYDHSNFYTGEIFARLPYYGKVLRGHVVPHPQRNLALAEPADNDDGHEQERYYGRIPNPTVHIGLNQLRLLVNAIIRRYGPPEEIIVEVAREFGLSGERRREIEREQKKNQELNEQLDAELKKLGQRPRRENRLRLKLWRELGNGDAMDRECVYSGERFSIQQLFSGEVEIDHILPFSRTLDDSFANKVLCKAWANRQKRGKTPYEAFSGADFESVTERANRLLPRHKAARFRKEAFDVYRGRKNMAPEVLAEYGIAETEGFLVRHLIDTSYLARVAKEYLAAICPPNKVWVSTGRLTGLLRSIWRLDSILDNGIQGKNRNDHRHHAIDAAIVGVCDRRLVQKLSTAARRADEKLLYRLLDDLDEPWAGFCNELRDSVSRIVVSHKPERGLSGGLHEDTNYGARSEPDSKGVRTFVVRKQLTDIQDKDIEKIFDPGWRQKLMDYVGSRKGADFKKAVIEFSQQHGIRRLRLATRLSAIPIRDRNGNAYRYVKGGNNYCYDIWKDAKGKWTGESVSVFDANQKDFDDSRPYSRDGRPLVMRVHTGDMMLIEDGERKRVMRVQQLSKGKLTLVEHKEANAAERQKEEKLFVTRSPNELRKMKARLVGVDLLGYVNDPGFLQ

SEQ ID NO: 6911 - protein, 1429 aa, unidentified
  REGION 1..1429: note = Description of Unknown: Cas Enzyme sequence
MKKILGLDIGTNSIGWALIERDFEAGTGRIIKMGSRIIPTDPDLMSKYETGQPASKNTNRRQARGARRLRQRYKLRRQRLVIAMKELGWLPADFEIDTQNQKSAKSEIPVSQDALNEMRSILGSDQISADWVVYYLRTKALKDKITPAELAMVLYHMNQRRGFKSNRKSGQDPSLEQEDQDAGKPSREKLVEIVQPKRIQDTGEKNKGLLVFEMELEDGRIGTINRKVLPDWVGKEMEMEITTIRNKSGETRLEFRQLTNTDKDLWAKQKVAREMDIKRSGLLYPGAYYFHELRKNKDYRIKDVSIDRSFYINELKAILEKQLELNPGIYAPEVMDRIAEKLYPKNDAKRKEIAQASLQHLFIQDIVYYQRPLKSKKSSIADCRFETKNYVDPTTRIKQPLKAAPVSSPIFQDFRLWQTVNNIRITQREKREGGKLQTDVDVSDSYFTENTAQEIYRLLDGRDKFSQKQILKFFKLSEDTHAINLFRSAEDKELPGNETKAAFRRYFKKAGLETLGESIFQDADAYEKLWHIFYSLDDKAHVISALKRQFGMTQEQATIMGAMPAFKSAYTSMSTKCLKRLLPLMRKGDYWSWEAIDAKTKNRLQKIFDGEYDAGISDHTRELFQKRSIHGEEDCSGFSVKMAEYAVYGPGRELNLAFYDKPEHVVPAQPLNLRNPIVEQVVNETLRVVKDIWKEYGRPFEIHLELARELKKNAAEREEQSKRIEDNRRTNERIAALLRELGIGNPNSMSDIERLKLWEQQGDSKAQEDFRNLKFKRPSEPTRDEIQKYKLWAEQKFLSPYSGNPIPLNLLFAKEYEVDHIIPRSRYFDDSFENKVVVESRLNKEKGNRTAMEYIKDGSAQGNYLLEPADFEQLVTRYYTRKKKKLLLSEDVPEGFINRNLTDTRYIGKKLHELLSPVSENRKDAVIITNGSITSELKSNWGLGEKMKELLKWRFERLQEKTGETWWWYDPEKDANGEPTGRKILRLKGYEKRIDHRHHALDALVIACTTRSHIKYLNDLNAAQYRKQPTDDELKIALPKLLEANKDQYLQSRKFRKPWQGFVNESMQAMEAIVVSFKKNNRIMGRKANRNLRFVQDAQGNWVKKMVVNREKPSVYVRKSLHKATIVGKLRIQDTKTVSIKDALEDVSRIVEKEYRSSLRGLMQRFQYDKEAVMKHLKTSPMRDAQGNEVKKLEVYFHKEVFGNRVEISSGFDANRIKKIPDNGIQRELKQHLEDIAELNANLPPDGQIDPYSNEGIEMLNRKRKRPLVKVTTYEESSSKFEIRPGQFTEADKGTNLFFAIYVNKEDPNIRLFETIPLRKVIESRLNNEPLVSPKTGYSHFLLTPGDLVLVGKDSKNNERLIWKFVSSTGKRAYFIPHTISKMIAEKKEFSELNKVEFDDAGNSIKQICIKLHVDRIGVYRVHDEENTG

SEQ ID NO: 6912 - protein, 932 aa, unidentified
  REGION 1..932: note = Description of Unknown: Cas Enzyme sequence
MNGDETQLNNAPIRYRLGLDIGANSVGWAAVRMSTDEEAGERPVGLLAAGVRIFEAGVEGAVEQGKDGSRAVARRLARQQRRQTWRRQYRKHRLFRLLQRQGLLPAAEDTSSAGRDAVLKTLDVELASRWCTAGDLDSHQKLPYLLRSAAAERVLEPFELGRALYHLGQRRGYKTNRRTPEADDEKTGVVSGGISVLDQARLRDPDDPRSLRSLARTVVDEFRFADGHFAIRSESRESSRRGRVRGHYTSREMYMQEFAAIRSFQLANGGPLDDETWTLLEKVLFRQRPLRSQSNLVGRCTLEKNSKGNGPRRCLMALPEFQEFRLLQSLNHLMIVEEDGSSHPLMPGQRQVLYEHLMRGDDLKLTTRATRSKSAPPSVTSLLGLAKNTKFSLRSPEESDEEDVRLIGHRTNAKIRGVLGDEWDDMDDSQQEKLILQLVYSPDPRILTAWLQKNFAFSDSVAQQLIKIKLEEQHASLSRRAIRKLLPLLRAGATYAAARQAAYPESFQASPPAECLPPVTSWNRQINNPAVIRALTEVRRVVNSLIRRFGKPDTIHVELARDLKRSRKERTKLWKQNEDNRRTRDKIKAEIVRQLGYSNPSRADVEKWQLAEECNWRCPYTGRQISAATLSNFDVEHIYPRQYLDDSFGNKTLCDPDFNRARKRNRLPGEVLEGAELAEVLGRVRHFKGPYAESKLRRFQAESVPEDFVSRQLNDTRYNSRLAAEFLQVLYGGRSDSNRQKRIVTPTGGLTWLIRRGFGLDRILSDGDYKERADHRQHAVDAICVALSTQKVIQRLSRLAGELSRSGERFHAFLSEFSRELPWPEFQADAAQTVRNIIVSHRPDRAISGGLHAQTYYSKPLPAPSDGQAEGKRGKSGKSPTTEHRLRKSLDNLTKKDIEGDAIVDPAVRAAVQRKYQELAAAATSAAGADPK

SEQ ID NO: 6913 - protein, 946 aa, unidentified
  REGION 1..946: note = Description of Unknown: Cas Enzyme sequence
MLAKESGGEMATRLGLDVGTNSIGWALIDTDNGLIIDLGSRIFSDGRVPKSGESLAVGRRDARAARRRRDRFLGRRSAFLETLISFGLMPDKAEEAKLVETRDPYVLRARGLDERLEPDEIGRALFHLNQRRGFKSNRKAERGRKESEDGKIETGAKALDAAMAEVGARTLGEFLHKRLTATDGLGDPDPKPARVRMGGESQAYDFYPQRRHVEDEFARLWAAQAPHHPALLTEAARAALHRILFFQRDLKDQEIGKCTFAGWNGVPDNERRLAKAHPLFQERRLYEEVNNLKIVSPGASDRELTRDERDRLILKLKTTRKSSFSALGKLIRLGEGERFNKESETRKDLLGDEIFAEMSDRKRFGDRWAFFDLDEQLRIIERVQNEENPEILLDWLKTEYGLDEETAVAVGKARLPEGYGRFGETATRALIEALKAEVVTYDKAAEAAGFHHSDLRTGEVWDRLPYYGQILTSEIAPGKADYGDESERRFGKITNPTVHIGLRQLEKLVNAIVDVHGRPDQIVVELARELKLNEEEKKKQEARIRRDTVAAVARGEKLQAEGIPDTGANRMALRIWEELNPSNPLDRRCPYCGEVIGIRALFSGEADVDHIIPYSQSLDDSASNKVVAHRHCNRAKGNKTPYEKWGHDDARWEVISAQVSRMHHSKQWRFGPGARERLEKDGGFEARQLTDTQYLSRATARYLSSLYTPDEGRRVYALPGRMTAMLRRVWGLNSLLPDHNFVENAHSSSPKNRLDHRHHAIDGAVAAVTDASLIKRIADAAGKAEAKELDRLFEELSPPWPTFRDDLKDRLARVTVSHKPDHGRRGRPSKHRDVTAGRLHNDTAYGFTGQVAADGKTPLHGVLYRPPGFDPGQRYPLLHWVYGGPQLRIAPKAFAPRSDNDILHHALADAGYLVLVLDARGTPQRSKAFQDVVWRSFVDHVVADQA

SEQ ID NO: 6914 - protein, 926 aa, unidentified
  REGION 1..926: note = Description of Unknown: Cas Enzyme sequence
ETYPNLKAYPSGKTTHYVSVFQTNQKAYNWQVTNFKRPAANNLIVYELLIRDFVGKHNYQALIDTIAYLKRLGINAVELMPFNEFEGNESWGYNTAFYFAPDKYYGTKDKLKEFIDDFKQHSLRNPIVEQVVTETLRVVNDIWNHYGNGSGSFFDEIHVELGREMKSTSEQRKNMTIQITQNENTNHRIKYLLAEMAHDSEVQNVRPYSPVQQEILKIYEDGVLNSELEIEEDIIKILKTPQPSASDLRKYKLWLEQKYRSPYTGEVIPLNKLFTPEYEIEHIIPQSRYFDDSLSNKIICEAAVNKLKDNCLGLEFVTKFHGQIVEIGFGRKVKIFEVDAYKDFLTRHYAKNRAKKSKLLLEDIPEAMIERQLNDTRYISKYITSILSNIVRSDDKDDGVNSKNVIPGNGRITDELKRDWGLNDVWNDLILPRFERLNKLTGTAQFTVWNERHQKFLPTVPLELSKGFSKKRIDHRHHAMDALVIACATRDHVNLLNNKHAKSSVRFDLNRKLRRFERVSYNNAETGQVINREVPREFLKPWDSFTVDAKSKLEQIIVSFKQNLRVVNKATNSYQKWVVAAGKKEKQWVEQLGTNWAIRKPLHKDTVSSIISIRKKKIVSINNAIDDYVNIVNKKLKQEIKRMLEDGLDKNKILKLFKEADNKFQNKDISKIEIYYFEQDNVATRSSLNETFDPKSIESITDTGIQKILHKHLSQYSGRLDEKGKEIPPHQMAFAPEGIEEMNKNIVQLNDGKFHQPIYKVRTYEPKGNKFTVGQKGNKRSKFVEAAKGTNLFFAIYVDSAGKRKFETMALNVVIERFKQGLTAVPETSDNGDKLLFYLSPNDLVTIPVDEIDGDDNTRNPGEINYVYKVVSFSGSQIFFVAQNIATPIVNKVEFSALNKMERTVEGIMIKDCCQRLKIDRIGRIS

SEQ ID NO: 6915 - protein, 1067 aa, unidentified
  REGION 1..1067: note = Description of Unknown: Cas Enzyme sequence
MYRFAFDLGSGSLGWAVYRLDGSKHICGLVGLGARIFPTGRDPQSKESTAAGRRLPRQQRRQIDRHKDRRIQLEERLVAAGLMPPSDRAAFFASDPYDARSRAAAGKTAPHDLGRAIWHISKHRGFKSNRKTDRSDEDDSGKIDSASAVLRQKLLDGGFATYGAWLASRHAQKQPVRIRSQAVSNETAYEFYPQRAMLEAEFDHIWSLQAPHSPALTDAAKSAIRDAVFYQRPLKSVKPGRCTFFPEEYRLPKWHPLAQEFLIFQQLNMLRLLDGQLERPLDLAERNLLARHLMSGEKLTWAGLRGQLKLPRSTEINLETGGLKELASNQLAARFAGTAKKPGPLAEIWRVMDDAQRQGMLKILEEEASPERATDRLMAEIGLAADLADRVGKITLPDGHLMLGERAARGIVQMLRDDVIVYSDAVKRASDAGLFGEGVELHHSDLRGHGDGVELLPAYNRLPELQRMIGTGTNDPADPDDIRYGRIPNPTVHIALNQFRRVMNGLIAEYGRPAQVVLETTRDMSKSARELNEIEIENRKNTKRNDRWRAELEEAGLLTEGGRVGDRLLRMRLWEELGRTPADRLCPYSGEPIPLHKLHSDEVEIDHILPFEDTFEDSSGNKTLCYRSANRIKGKRGPGDAWFGPDLDAILARVKAAPGMRQKLWRFLPGALEEWQKRSGFEDRQLHATGHLARVVRAYTTALFPRDGTSNVWVLPGRMTGMLRRRWGLHLPDHNAKTRDDHRHHALDAATVGAIDRRMIQALQTHARRMGTQNLDRPLLDAPEPYEGFSEEVRQRIASVVVSHRPDHSASGKLHEDTAYGLVRNVPENQAARMIGNLVRRKPVVELKSGEISRVRDEKIRHALEEATRHLWKDDRALKAELAAWSLRAGHNRLRILTPDESARAVHSRPDKPRAGEPYKWMIPSQNLFLDILKGPDGKWFRYGVNRWSRASGTDVPWQEVHPDATFVMRLYKGDTIQLFDWDDEEKSIIPGTNQIKIIVSIPNSETNNYVTLAGANEAGNLSARHNDSTDSFRWDWARFDRLRLRRARRVRIDELGRVRTVPHGAL

SEQ ID NO: 6916 - protein, 990 aa, unidentified
  REGION 1..990: note = Description of Unknown: Cas Enzyme sequence
TLTADNSYATSASPWTLRAEGLDRRLTNQEWGIALYHLIKHRGFQSNRKSEAASDEKVGEMLSGVSANKRLMQEKGWRTVGEMATNDPAFASAKRNKGGSYSHTFARTDLEQELHALFQAQRGHGGSHAGSAFEQAVHELLMARRPTLSGEDLLKMVGKCTFEKGEYRAPKACHSAERFVWLTRLNNLRVGPPGDLRPLAGSERRLLMNLPFVQSKLTYKQVRTTLNLPMQDRFNGLSYRKKKDSDDELAAESATLFEAKAFHQLRKAYEQCGLEDQWRRDVVEPERLDTLAWAQTVFKDDAEAREWLIAEGVDAAVIDAVLTVSFDKFQHLSLKALRKLLPHLEAGLRYDEAVPAAGYAHHSQLSQGTKTPRLPPISKEDFANPVVYRALNQARKLVNAIVREYGPPTRVHIELARDLSKPFDERRRIEREQKTFQQNKENAVNDFVDRFGREPRRDQLTKWRLYREQDGKCAYSVKELALNRLFEDGYVEIDHALPYSRSFDDGMNNKVLVFTAENRDKGNRTPYEYLGGADDSEAWRQFQAFVQSNPKYRKAKRDRLLRKDFSAASAEGFRERNLTDTRYIAKAFKSMVEAHLQLADGSDSKRCVVVSGQLTAFLRHHWGLYKDRDAGDKHHALDAAVVAACGDSMVKRLADYSRRGELEMVRGPFIDHETGEVLRRTEKEFPVPWTHFRQELQARLSDTPALNLARIEDYPVELAESAVAIRVSRAPQRRGTGQAHQETIRSSKLLDQGQSTVKTPLTKLRLKDVERIVGYGDPRNADLIDAITQRLQAYGGDGEKAFKEPFYKPAKPGKSAPLVRAVRLSDTQKSGLLVHNGIANNGAMLRTDIFTDSKRFYAVPLYVSDAVKAVLPNLAVVAYKPEDEWTMMDATKGYRFLFSLHASDWVRVTLNGKPAQEGYFAGLDRATGAISLWVHDRDRSVGKDGLVRGIGIKTALSVEKFHIDMLGRRYPARHETRKHLNRRGGKADQR

SEQ ID NO: 6917 - protein, 1487 aa, unidentified
  REGION 1..1487: note = Description of Unknown: Cas Enzyme sequence
MNKIFGLDLGTNSIGWAIRNPNLTDNQIEKFGVLTFNKGVGLGKTGEYSYAAERTKHRSTRRLYQARKYRLWSTLENLIKEGYCPLSIEDLNKWRHYDKEEARKNNNAGRVYPIWNMGFDAWIKLDFDGDGKPDYTSPYQLRKELAETKLDFTQEVNRFKLGRALYHIAQRRGFKSSRKGADDVKEQEVNVVDENETTLQKSEKKKTNKLKELFPDYDSSVPVGVFLANKENQGIRVRLDITQYLVREDYKKEIKHIFQFQELRLEHPLYLSMCVVFKTIRNGKEKSYIGGTIFYKRPLRSQKGLIGKCTLEPNKYRAPISHPSFEIFRAWSFLNNIKYKHENGQFEKLPLEIKQKIYTDLFVGRLKAYFPFSDIEKLVNKTTEKKWLFNYKSKTTVTACPVSARLKDIFGDKWDETITKKDANGEVVYITHKDNNGNELGKIPLKQPFYQDIWHVLFSYEDQEFVAEFAEQKLKLEPEKIKQFVIVWNALPVGYGMLSLNAINKINVFLEKGLIYTEAVLLANIPEIIGNDLWQQNEQLLLESISGVITENRNQKTILNIVNSLISKHKNVEVTERHGHRNNDYQLADSDFQDIQAAIEEQFGANKWNGFPDEEKQHILDTVKDCYQAYFSKQGIVRDIGREERLVAIQSNGKNYYKTDTGYYRLPKLIDTLKEFLQDKFKNIDEKQLSKIYHPSEINIYPPAKEDKDGVSKLGSPKTGSFKNPMAMRSLHELRKLMNYMIETNQIDNETRVVVEVARDLNDANKRWAIESWQREREKENEAIASKIQEFRKNNNVVSDEDIDKARLLLEQQIDINQDNEAFELKVTSRDIYKKVKERNKANDDLIKKYRLWLEQGMQCLYTGKIISLQNLFDENTIDFEHTIPRSKSFDNSLANLTVCFADYNRTIKKNQTPSQLPNYSENSGGYTAILPRLKAWEEKVERIKQQIDYWKTKSKKAADKTGKDNAIRQRHLWQMELDYWKNKLDRFTITEITSGFKNSQKVDTQLISKYAFHYLKTYFDKVDVQKGSITAEFRKIYQLQVADEKKDRSKHSHHAKDAAVLTLIPVAAKRDEILEKYYEAKEKNPKATFTEEPYKGFKREFVFGIDDSVLINNITNNQELTPAKRKVRKRGKEVIIDGKNRWATGDTIRGQLHQETFYGAIKPAKRGEKGNIEKDENGKFIQEDSIKYVLRAPFNADFTGVDKIVDEGLKKQIQEHIKRAGNFKKAFEEEIYLLDRNGKPHGNKIRHIRVFKDGEVKEPLAIKKQTNLSNKEYKQHYWAANGENIICAYYKNDSLDKNGKLKKDRELEIINLFDAAQLKKFNLVDEKGQLQIFRKDKSNQVIIDANGNKQTPYVILKAGMKVIFYDEKIEELKIHENEKNSDYNKRIGYRTYKVVKFAGSQVTFLHHIDARDEKQQMEDYPEKGIFKETTYGKRGKNGFTEKIGDSIKYNNGKPWHKLLYTKDYLDFAVEGDDFEIKMDGSIEWLK

SEQ ID NO: 6918 - protein, 1133 aa, unidentified
  REGION 1..1133: note = Description of Unknown: Cas Enzyme sequence
MTDKTPEALTFGFDIGIASVGWCVLGETRIIDLGVRCFDKAETAKEGESLNLARRSARLMRRRLRRRAWRLTKLTRLLKREGLIADTAQLTQTPPISPWHLRVAGLDRRLSDEEWSRTLYHLCKHRGFHWISKADEKKAEGDAKGEGGKVKKGLSDTQRRMAEKGYRSAAEMVLAEFPEAQRNKQGDYGKALSRILLSEELALLFRRQRELGNLRAGAELEFRILGDGDRKSGLFWQQKPPLAGADLLKMLGRCTFERNEYRAPKASFTAERHVWLTRLNNLRIVVDGRTRGLNEDERRVALPLPYGYADAKLSYKQLRTALTRTGLNNFNFAGIAEDKEKDSLVKLPGWEALSKALKGKGLETEWQGMAGTACGGDPALPDEIARVLSVYKDGDEVEAELRKLNLPGGQAMIDALAEVSFDKFHALSIKALRKIVPHMEAGVRYDEACLASGYHHSQLHPAGAGEHKFLPPLYSRRDKDGRMVFNEELDVPRNPVVLRSLNQARKVLNALVRTYGSPVAVHIEMARDLSRPLDERNKVKKAQEEYREKNEKAKSDFVAEHGIEAKGRDFEKFQLYREQQGKSVYPTMDERQGICAYSLTPLDLHRVLHDPGYAEVDHALPYSRSYDDSKNNKVLVLTSENRNKGNRTPYEYLDGANDGPRWRAFVAYVESNKSYRLAKRTRLLRKDFGGKAAEEFRERNLNDTRYICKFFKNYVEHHLKLEAKIGADGTVEDVAKRCVVLSGQTTAFLRARWGLVKLRGASDRHHALDAAVVAACSHGMVKRLADYSRTKELGKVREGFADPETGEILNPAMFRQLHAHFPDPWPHFRRELIARLGVDNEGLVISGDASRLRDELRAELDAFGTYPPEALAQVRPLFVSRAPQRRNGGAAHKDTIYGQPERLKAQGGVTQKVPLSSLSLKDLDKLIDPHRNERLYAAIRERLEVHGGKGDKAFTVSNPLRKPDREGNPTGPIVRSVTMVIDKLSGIPIRGGIAKNDSMLRIDVFKKAGRFHLVPVYVHHAVTDALPNRAIVAFKDENEWTLIDESFEWCFSLYPNDLVKITIRTETQLGYYASCNRSTAAINLWTHDRNARIGKDGMIQSIGVKTAHSFEKFHVDALGNIYPAPPEPRRGLA

SEQ ID NO: 6919 - protein, 1042 aa, unidentified
  REGION 1..1042: note = Description of Unknown: Cas Enzyme sequence
MGEKTILGLDIGTNSVGWALISATDDLSPIKLIDCGVRIFEKPVNAKDQTPLNASRRKARQQRRQLARRKARKLATQKILLSKDLLPTVPEVLEKLMLDDINFNPYALRAKALETKLTPFELGRIFMHLAQRRGFKSNRKTLLTAAIKTLPEIAAIFEEEELDEQREFSEPKEKSKRKPKNDTEEGLIKGSIFLVNQGIRASNSATLGVFLNKIRLGEVPRPTADGTQKTMRGLYLDRSMYEHEFEAIWSSQKPHHSELLTDNLKADLFKAIFHQRPLKIQKFLVGDCIFEYHRKRAAKATLEFQKFRILEQLANIRIKNPLTRNTRSLDASEKTILFKELQNQNEMSWKKVRKLLGLHTGESINLEEGGKPKLIGNRVHTAMEAVLDKNWSTLDQASKSSLLTDLQTIHKKEDLIKRVMNHWQFSAKQAYNLAILELEPGYGSYSMKAMKKILGEMEKGFDVHQACENLGYLAPARRKPSDICLLQSAPNLRNPIANRALNQCRIVINSLIKTYAKPDVIRIELARDMKLTKKQKEQAEKQNKSNRTLNDEARPYLAASGITQAKRDDLIKYRLWKELGGVCAYSGKAIPMSLLFTNEIEVDHIIPYARCWQDSYINKTVCYVEENRLKKKQTPFEAFSTDVEKYREMLQRIYALEALPVAKKKRFDLQEVKQDEFLSSQLNDTRYICQEVRAYFHQLGIPVQVTKGEATAALRRRWYLDGILSLDSSTRKNRADYRNHTIDAIVVALTSVSLFQMLSKLSGSSDLPISNRNFDLPYPWPTFREDVEKRISSILVSHAPDRRLRHAFHEQTAFGVTSEENVYVKRIPLTSLKEKELHLIPDKWIKEAVQERFKNAMSSDPKKIFEEPLFHADGKTQIRQLRMPKRIGSANMRSFQDRKGNFYKAYELGNNSHAELFRRGGKLDMRVINMMEAANRVRRRRQSVVNREDNFVMSLFKNDMVELTHENGAFLYKIIALENSVDKRRLIMQLHTVASSWNETSSLPPELAEIAFLKKVPSYYEQRNIRKVSINPLGKKEYCKND

SEQ ID NO: 6920 - protein, 1193 aa, unidentified
  REGION 1..1193: note = Description of Unknown: Cas Enzyme sequence
MAGNTPEALTFGFDIGIASVGWCVLGENRIVDLGVRCFDKAETAKEGESLNLARRTARLMRRRLRRRAWRLTKLARLLKRTGLSIDVRGPTTVSPWQLRVEGLDRRLTDDEWARVIYHLCKHRGFHWISRAEEKKAEGDAKGEGGRVKKGLSDTQRRMAEKSYRSAAEMVLAEFPDAQRNKAGDYGKALSRVLLADELALLFKRQRELSNPQADADLETKILGSGDRKSGLFWEQKPPLAGADLLKMLGKCTFEKDEYRAPKASFTAERHVWLTRLNNLRIVVDGTTRGLNETERRLALPLPYQQAGDFTYKQLRAALAKAGLLPDNFKFAGLNYPAGKQLDEAKPKDPEAEKLVKLPAWQELRKTLKDAGLETEWQGMTGAAAGGDPTLLDEIARVLSVFKDGAEVETELRKLNLPGGEKMIEALAEISFDKFHALSLKALRKILPKMEAGMRYDEACAVAGYHHSQLHQSEDEKANYLPPLYSGRDKDGRLVFNEELDVPRNPVVLRALNQARKVLNALVRQYGSPVAVHIEMARDLSRPLDERNKIKKAQDEYREKNEKRWDEFVANARRIGLREPPIREKHGRDFAKWILYHEQQCKCIYSLKPLDIDRLLEPGYVEIDHALPYSRSYDDGKNNKVLVLTEENRNKGNRTAYEYLTSFAGGENGERWRTYVAYEESNKNYRLAKRTRLLRKDFGDKAAEEFRERNLNDTRYICRFFKNYVERYLKLAPKVSRGDTPDEAVNKRCVVLSGQTTAFLRARWGLLKIRGDSDRHHALDAAVVAACSHGMVKRLADYSRTKEIAKVRDGFPDPETGEILDPAKFQQLHAHFPDPWPHFRTELYSRLCAEVVTNPVTGKRELAFHDDPVRLSEEIERLGTYPSEALAAVSPLFVSRAPQRRNGGAAHKDTIYAQPEKLKLTNQVVQHIDLESLNRNHFGFLEDYFAERKRLSKGTLTRKAAAALFKTFSDQGADIWSIDRKWRECQLIDPERNKEFYEALYDQLAEHDWNGKKAFTSGFNKPTRRKNAVASPPVRKVATVISSSGIPVRGGIAKNDTMLRVDVFRHKKDGKFHLVPVYVHHTVAQELPNRAIVAFKDEDEWTLIDEQNFEFCFAMYPNDFLRVSLKGEVLQGYFAGCDRSTGNVGLWIHDRNSSVGKDGFIRTGVKTAIALEKFHVDVLGNIYSAPKEERCGLA

SEQ ID NO: 6921 - protein, 1139 aa, unidentified
  REGION 1..1139: note = Description of Unknown: Cas Enzyme sequence
MKKRLGLDIGTNSIGWALVEDEKRILGSGVRIFPEGVVNIGEGEREMSKNSERRQFRGIRRQNFRRKLRKKILLKALSMNGMCPVSIEDLKLSFRAHKFPDTPEMRSWFRLNPYTLRAKALKEPLTLIELGRLLYQLAQRRGFQSNSRSGGDQKEESVLFTGNPEEGKTGIDATQQSIGEGTLGGYLSSIYPPENQSYIAGLPRIRNRYTTRAMYQSEFNAIWTAQSKFNPALTESLRIQLGGIRKLKDPSDGILFFQRPLRSQKFLIGKCTFEPKKPRCPVSAIPFQLFRAYQFLNTVECNGERLNEKEIEAAVAYLTESKSDKKFKDLRKLWKKKDEFYRFNYLDDDKVKSAHTLAALSSFKFNKKTWPELTAKEQEDIWHVLFSFEDKDSLQDHARNKWAMNDAETAAILKVKLEEGYASLSRKAINNILPFLRAGHQYDIAVCLGGIKNAFGEAWETLSEKNKDFIVTNVPEIVRSGIKGGYLEELKSFLVREFGLHDKQLAKLYHHSESIRAGEWVEKLPYGPAADRIIQNLRNPVVSTALFELRKVINALIEKFGKIDEISVELARDLRNPRKRRYEIQLEQRRLERYNEEVKKRLEEHKKANTAENILRYKLWEECQHTCPYTGREISTSKLFSGEVQIEHIFPWSKSLDDSWLNLTLCFADENRLKGERTPYQHFIRSGKAAWEEAKQRALTLFYDSKEFPNRYRKFKRFAAEKFDEEGFIARQLNDTRYISKEATNYLSQVAEKVSVAPGNMTAILRGKWGLNTILSDHDAKDRKDHRHHAIDALVMATYKLSHLQELQQWNKYNRAAELRNFPMPWDSFRQDAELNILSILVSHKAERKILTQRTFRIKKGKTEYRNQGISARGQLHKDTAYGKRKPPGQEEAYHVRKPLKGLSEAAFPKIVDPRVQALVYDRLRQRGIPIDSKSGKPKPETKEQKEAFKSAFDTPILLPNRQGDPVPVYKVRVAENLGNAANQNAGVNRYVNPQSNHHVLLYRDQQDEIREEIVTFWEAVERKRQQLPVVKLPADGKEIMACITSNAPFLLGLSSEEIQQNINNPAFLSKHLFRSQKFSSKDYEFRLHSEATILRDEPPYFCRVKSLNAFIKSQITAIRLNAIGDLIGRPVSIGQPGN

SEQ ID NO: 6922 - protein, 1062 aa, unidentified
  REGION 1..1062: note = Description of Unknown: Cas Enzyme sequence
LLRLGLDVGTNSIGWCLVEYDGEKDIGERIVDIGVRIFADGRDPKSGASLAVDRRAARAMRRRRDRYLGRRSAFLEALITHGLMPADAEEAKLLADRDPYALRARALEEQLEPFEIGRALFHLNQRRGFKSNRKAERKQKDIEDGKIAQGARALDQAMAEEGADTLGQFLARRETKRVRMGGENQGYDFYPQRRHVEYEFGRIWEEQARHHPALLTETARAALHRILFFQRPLKAQQVGVCTFVNSETRLPKAHPLFQERRLYEEVNQLRITTPGAPDEPLKLDQRDRLVRELREKKSISFKGLANSLRLEPGQSFNKASETRTEMVGDEVYATMKKMFGNRWAHFDRARQWLIVERLLEEEDPDKLHTFLAEHGLDEAQIAAAERAARNLPEGHGRLGPTATALILEEHKKAVITYDEAVRRAFPQGHHSDFRTGEVLPKLPYYGELLTREIPPGTQLESDPPEKRWGKITNPTVHIGLRQLEKLVNAIIEVHGRPDQIVVELARELKLNEKDKEEHNRRIRKDTAAAIARGAKLQAEGIADTGANRMLLRMWEELNPANPLDRRCPYCAQPIGMRQLFTGEADIDHVIPYSRSLDDSAGNKVVAHRHCNRAKGNRTPWEKWGGTERWDVIAEQAARLHKSKQWRFGPDAMARVEKDGGFLARQLTDTQYLSRLAGQYLSSLYADKNEGSVYVIPGRMTAMLRRLWGLNELLPDHNFVENEHSNAPKNRLDHRHHSIDAAVTAVTTRRLLMEIARAAGRAEDKDLDRLFEDLPQPWEGFREELRDALAGVTVSHKPDHGRKGRPAPGHDVTSARLHDDTAYGLTGDVGADGETPVVVKRVAFDRLRPEDVSTPGRIRDEYLRSELSEAVGGKTGKEFEEALRRFGEIHPHFRKIRRVRVLGERPGTPSLSVIRIKDRKGRYYKAYKGNANARFIVWRLPDGKWTHRTVSMFDAHQRDFQPERPHPAAKKMLDLRQNDLIAIERNGGPPEIMVVVKFSESGQVTIAPHNEGGALKARDTDPNDPFKYNAPTAGGLKKLKARQVRIDPLGRVFDPGPREPAAG

SEQ ID NO: 6923 - protein, 1144 aa, unidentified
  REGION 1..1144: note = Description of Unknown: Cas Enzyme sequence
MAQKSSYSPKKYSLGLDIGTSSVGWAVLDLDKERIHDLGVRIFERPEDPQNGDSLAKPRRDARSARRRLKRRRQRLNHLKQFFVDQNILTKDQVEEILNYKSDFNKLDVYALRAKALTEELSPEELLKVLYQIAKRRGFKSNRKVVEESDKEGGRVTSALKTNEKFLADNNYTTVGEALSRDEKFALHKRNKRDDYTNSFARDDFLCELEAIIKTQRNYALKNVPEPAINELIYGIDDGQVTNVSAIMYQRPFMTKELIEKMVGKCTFEDGEKRAPKASYSFEIFRLASDLSHLVFIPRDASKRQAKRENLEIRLSPEQIKQVIDLAKSQKSLTYKKVRSTAGISEDYVPKDVRGKKKDGDEFGEENVFGGLKAYNDIRFALKDLPEDWAKIDNESAINQIAYTLTTQKADEGIRTELDTLPLSDKAKEAIIKIKPTNFKAFGHLSIKALQKITPHILDGMTYDKACEAAGYDFKKQSASLEQITNPVVKRAIAQTLKVVRAIERKYDKPYFIKVETARDLARNFKDRNAIKKENDENQGYNEDIKSIITDGYKASPKTKGGKQLLSHLKELNVPLNKNADFNSQQIVKIKLYREQNGVCLYSGKSIDFETMLRDDNAYQVDHIVPFSRSNNDGMTNKVLVFTEENQKKADRTPFEYFGTDEQRWEKFVALVETTYKTRDVKTSDKATNAINYKYNGYAMKKKQNLLLQDYKNDSWNVRALNDTRYITRFIQNYLRQNVDFAEGEEKQRVIAPNGTTTAYLRKRWGLAKDRTEDVLHHAKDAAVIAAIDQSIVRQANLFAKRGEIATLLAAAKTMEEKTDKLTGEIIDEDEFDKAQRRKDAAIVLSSKYFPQPWDNFGKEVMKRTLNTDITTLQNELRGLDNYDEDFRLNVKPIFVSRMPRRKATAKAHKETIRSPKVKDSDQRTVRTPLNKIKRKDVENSVLKESDKWLYNKLLERLDTHDNNPEKAFAEPIYKNDKKFDKNGKKLSPVSTIKVYSTQPSGFYINDGKAFVNNGSMVRLDVYQKPNKKGKIEHFFVPVYAHQVGKNRPTPTKILPTPKGFTDVDETFTKVCSLYPNDYVRCYFGNKIKEGYYVKYGINNGAIQVIAHGTTSKDKDHLIQISPRSANLIERYDISVLGDNYRWL

SEQ ID NO: 6924 - protein, 1118 aa, unidentified
  REGION 1..1118: note = Description of Unknown: Cas Enzyme sequence
METEQMKYVVGLDIGITSVGWATLLLDVHDEPVRILDLNSRIFDKAEVPKTGASLAAPRRIARGTRRRLRRRKFRLHRIRQYILRRHILDKDGLDRLYKPEHTIDIFELRTAGLDRKLESEEWARILLYMAKHRGFKSNRKSASLADGDEGVMLQSIAKNREILSQYRSIGEMIYKNDKFADHKRNKGGSYEFTVARSMLIDEIKLLFAKQRDFGADFADTEAEEEYITLFSAQRNFDEGPGGDSPYGGNQIEKMVGTCIFEDGKNGTKEEKRAPKASYAFMATNLWQKINQIRLIDSTGEERPLTSEEAGKVAEKAWKKEAMTYADIRTEIGMSDDAYFKGLPYKWGNGAQKDETEKKSKFSWVKEYHKLRKVLDKIQKNRIAKLSNDDIDNIAYIFSVYKNDEKIRTALEEKHIDAQDIEVLLEHLGTFSKFGHLSLKACYNILPYLERGMVYSDACQEAGYDFRKSNEDTIADIPNPVVKRAVSQTMKVLKAIKQKYGCPPVEIHIEMARELAKNFDDRRKMTKSMEENQSKNERIKERLKTDFGIAYPNGQDIVKLKLYEEQNETCAYSQKHIDAHRLFHDSNYAEVDHIIPYSRSFDDSYSNKVLVLTAENRQKGNRTPMEYLGSDKGRKQQFIAWVKSDIKQPRKRENLLREKFTADMEKDWKARHLQDTQYISRFMLNYLQDNYKLMPGNTDRKRRIIPVNGAVTAYVRKRLGIVKIRENGDLHHAVDAAVIAAVTQGVVNAVSKYSKRHELQYHVDSDGNCVDMVTGEIMDDAFKEKHQIKGFPEPWPHFRDELEARVSDNAAEAIRNLKLPTYSPDEDIKTPFVSRMVRHKTTGQAHEDTIRGVGGADSNIYIKKVALTELTLNKDHEIEGYYNPSSDRLLYEALKTRLEQFGGKGKDAFKEPFYKPKSKPKSADDRGPLVKTCKIMEKINLSVKVHDGKGITKNTGGSMVRVDVFKVRKTNGQYRYYLVPVYVSDTVKTDLPNRAVVGGKKYNEWPTVDDKDFLFSVYPNDLLYIGGKEVKLNGTRGDTLRQEVMTKDAFLYYKAMNISSGNIAVENHDDTYAQESLGIRLVPVLEKYEVSILGDLTKAKFKEREQFTMKSQATNRSR

SEQ ID NO: 6925 - protein, 1167 aa, unidentified
  REGION 1..1167: note = Description of Unknown: Cas Enzyme sequence
MAQKSSYSPKKYSLGLDIGTSSVGWVVLDLDKERIHDLGVRIFSGQIENKKRRQFSSAQRMNKRKKQRLKHLKAVFINNGLLSPGEIKLALKDQEITENIYSLRAKAVTQQISNRELFRVLYLIAKKRGFKSNRKSDPNDNESSGTKFKEQLAKNSATAEKYQTIGLMLENDPAYTNRKRNSKDNYIATFQREDIRKEVEIILHKQFEKELSTTQTSNEYKKIIEAILDEIIIDSSGEKQYLGIFAQRPYTNASLIEKMTGFCEFEKTERRYVKASYTAEEYTFLSALSNIVILDTNKNDERFRLNEEDLEQLLELAKQEKNIKYSDIRKSLSLDESICFSSRAIEDTYQDSIKYANKKHSSPQNKEMLTEALETARKIRDRSRKNIERQKICEKGLETFCIFKKLFKDSMLGQRIEENPYLLDDIAYILTVNIDDESIKTNLQQLDFLSDHDISVIMNMPNDDLKHFSGRSNLSRLAMQNIIKYLKEGYQSHLAIQKAGYDTKEIYQGNNITLPSLKLSDFSQDGDETFEKYGINSKVAQRALSQSIKLINAIIKKYGSPTYVRVELAREFAKTEEEREKIERNNKRNREKNREYEEIINQIFKDNHKLPPSKIGHIIRKLTLRDQQNCKDIYSGDHIDVTTLVLDESAYEIDHIIPRSKRFINDMNNLVLTSTKNNREKSNQLPLAYISDPTKQKEFLERVNLIKDKQKRKNLRLDSCEDQDNMTERALNDTKHIARFFKNYIQRNLLFAGDDEENGRQRVFTIPGPVTAYLRARWGFDQKDRDANALHHAIDACVIVATTPKLLNRVMYHESHREQGKLYSERQAAKQDTGDFGMQAYLQAKKMYYDSLDRVSGKIIDPYKHNVAYKIMQEHEKRYRYSFPRPWTDFMREVSLRAGDIDKKTLQNKLVEINNYDDEFRRTLHPIFISHMRYGKTRGSGHGEQIYKKPYKGDDRIVQHKSIYGISPEDIENSPIVVSDRKLYELLKLTFQSIELKKNQKEKDKRIDKSIIIRKPSKNPNKSPIVKRIPVYMSDKPIPHDVRGGAALNGKGTVAYSTLCQHTTTGHYKAVPVYFRQIHADENIELGEGWKYVSRVVPNDFVVITKKDGSKISGYYKTRKNDTRISILPHQYNDNNKAIFPSISTVKEIRVYNISILGDNTPDEEYR

SEQ ID NO: 6926 - protein, 1170 aa, unidentified
  REGION 1..1170: note = Description of Unknown: Cas Enzyme sequence
QAVLGGEKFMGEMSKTNMDRHRSYRIGLDIGIASVGWAVLENNSQDEPIRILDLGVRIFEAAEVPKTGAALAAERRDARTARRRIRRRRHRLERIKWLFEREGLIQIDSFMERYHSPNLPDVYELRYEGLERKLSNEEFAQVLLHIAKHRGFRSTRKAELKEGDNGKVLKATEENRKRMEEHGYRTVGEMIYKDAYFHTECAWADNGYLLTPRNKADDYSHTMLRALLEEEVHILFESQRKFGNEKATEKLEQEYLEIMLSQRSFDMGPGQQADGTPSPYAMEGFGNKVGYCTLERESGERRAAKATYTAELFVALQKITHMKLVHMDGTSRFFTEEERNILLEMLSSKKEIKYAAVRKKLNLPLEEKFNTLNYNMKRKGKDNEEEEVDEAAIIAATEKATFVSMSNCYEYRKRIGDYLDTLPEEEQQDLLDEIGTILTCYKNDDSRMNRLTEAGLSKELADSLLELTPAKFQHLSIKAMKNIMPYMKEGMVYDKACEAAGYDFKNDNHGKKMKLLKGENITEIINEITNPVVKRSVSQTVKVINAIILKYGSPQAVSIELAREMSKNFEERKKAEKQIEENRKKNEMAKKEIQELGKLSPNGQDILKYRLWHDQQGICLYTGKKIPLEELFQPGYDIDHILPYSITFDDSYRNKVLVTSQANREKGNRTPYEYFGQDEVHWSAYEARVNHFIKDYKKRRNLLKQGFTKEDRREFKERNLNDTKYITRVIYNMIRQNLEMEPLNREDRKKQVFAVNGSITAYLRKRWGLMQKDRSTDTHHAMDAVVVACCTDGMIQKISRSTQYREVLYKGQSHPDYEIVDVETGEIISLEDLSREEWDERYGAQVPPPWEHFKEELEVRMGSDPKNDLDAHPDMYQLFRYPEDVYNNIRPIFVSRMPNHKVTGAAHADTIRSPRHYKDGGEIFADGGYVLSRTNIEDLKLDKDGEIKDYYNKDSDRLLYEALRARLAEYDGDGKKAFAEKFYKPKADGTQGPVVKKVKTYKKMSLGVEINKDENGMGRGIAENANGGMIRVDVFRENGKYYFVPIYIADALKKRLPNKAAMQNKPYSEWKEMKDENFLFSLYSRDLIGFKNPKGKKVTCASGETMTVMEDIVYYIGADINTASILGIAHDRSYKFKSLGIQSLKELKKYQVDVLGNVTEVRQEKRRGFH

SEQ ID NO: 6927 - protein, 1104 aa, unidentified
  REGION 1..1104: note = Description of Unknown: Cas Enzyme sequence
MKYRLGLDIGIASVGWCILDEDNSIVKAGVRLFPEGSSDENQKRRGRRASRRLLRRRQFRIERVRELLYRYEIIDNYNYDFYTNETTPYHIRKKGLYEKLSKKELAIAMFHLAKRRGAGEFNIEIKEGDEESTKSILADNEKLLREGKYICEIQLERFENKTQEVRGNRNNFKTSDYIKEIRKLIEIQREFYPNLDKKFEEEYVEIIEGRRKYFEGPGKNSPYSWKSQEEWMEGLMGNCTYFPEELRLVKNCYTAEKFNLLNDLNNLKIKRAENDRITKEEKLELLKLFKGAKTEKSVTLKKIASILNVKEEDIFGYRVKKDGSPEFAFLKSYVEINKIFKCDDVDILDSISKIATYYQDVETRKEKYREELKGVAGVTEEVIDTLAQKIKFTGSHSLSKKAIKLIENDLLETSKNQMELFNDYELVPYKMDFKDEKIKYIPKDYVNNWVLSPTVKRSMFQTINIVNEILKEYGTPDEIVIELAREKNSDDMRKTLKDIQNKNEKENKEIIELLEDKKLDKRYFELLKYWRKQDGICMYSGEMIGIDEILQNPLAFEIDHIIPRSISFDDSQDNKVLVRRIENQKKGQRSPYEYFSSKMTERSYEEFKAQVLNMFDNKKISLKKRDLLLLEEDISKYSRNFIARNLVDTRYATREFMSLLRVFFRDKQERVKIKSIRGSFTSQIRKEWKMTKMREISHNHHAQDAYIILMAEKTLHKLKWVKDFDENDELVRTYVRKEEILNDEDFKKLFDYKYSTPIKEYKDFSYSHFVDKKPNRQLTDETLYSTRMFEEKDKKGKKIDNEYIIGKISNIYDKKSNVVNFFGDEKKHSSLLMYHHDKQTFDKMLKIFNEYGGKGAKVNPFTKYFEEFGKIRKHSKKENGPEINDLKYRVSQLGNHLDITHKYKDSKNRVVMLSIPTYRADMYFNGKDYKFISVRYLMLRDRGKYYIIDKKEYEKEKNRKGIDEKYNFVFSLYTGDILEVERQDGSIEKVKFKGVNADELKRFEIDNIERNYGSYIELIREVVTKKKEAEKNEIRYNFEEELSVILGVTLTKNEGEEFLNSTPISSKQKYLTIGGDIKRLRKIYTNVLGKEYNGKEKLEEIIKK

SEQ ID NO: 6928 - protein, 953 aa, unidentified
  REGION 1..953: note = Description of Unknown: Cas Enzyme sequence
NPYKIIDVGSRIFTPGEVEKTGDSRAKERREKRGARRIARRREFRLDRVRNLLYESGYLKGNVSSNIVSVKNEELSEIYNSMINSYYKNKDTNPYKLKVDALDRKLSDDELSIILVHYAKKRGYKSNREEATDNDSGKVLSAIKENAKLMTDKGYRTVSEMYVNDEKFKDKIKNSPGSYKISVTNEMYLDEINKVLDKQIEFGLINEKFKKEYLNIYNSRRSYAKGPGGNSPYGGDLIEKMTGKCVFDKLPRAPKKAFSSELFVTLTRLVNLKYKVNDSIYLTLTNEEVNKIITISKEKETVTYKDLVKVINKDDVTFKDLSLSKKEYGKLIEEVKKKLDISKDVKLEVSKLNNAEKKVYNKLYNDKLLGKTFIELKGYHALKSAINSCYNKEVWQSVSDNIEFLDELALYCTNYKVNDDILEKIKESNVIDSMFADINFVEKLPNFKDHLMLSTNIIRKLIPLMLDGNTYDKAMSILKYNHSDIYGNKKQEKKDLLVPIYVDKNITNQRVIRSLTQTRKVINSIIKKYGLPKTINIETARELARSRQERNEITKSNQEKQETNQKDKELLVELGLFNDIDRITGNDLLKYRLWKEQNEFCGYSMKKIGIDELFENNTVQIDHILPYSRTYNDNYLNKTLVYTKENQEKGNKTPFEWFGKTDRWADYESYINSLVIPQKKKDNYLLKKLDFDMEREMREQNLNDTKYISRELASLIKAYLNVEKVNMYPGATTSKLRARWGFNRLTHSYISDTYILPKDMKKDIKKDRDNHLHHAMDALVIASITPSLQQKITLYEKFSRYIDGLTKKALENVNSENYKDILGEYYNDETGEIDDISFKEYLMEQTNEENIRFNKRNISRLDFPLPYENFTEEAKLRVYEQNLDTLKWNLEKLHTYTSEELSKVHTLIPSIAKTKISGKMHEETYYGIKSIGKDDDKVTYNHGDEILKISTFA

SEQ ID NO: 6929 - protein, 1104 aa, unidentified
  REGION 1..1104: note = Description of Unknown: Cas Enzyme sequence
MSRYVLGLDIGITSVGYGVIDIDNNLFVDYGVRLFKEGTAAENETRRTKRGSRRLKRRKSNRLNDMKNLLKKNDLYFDNYRNYNPYEMRVKGLNEKLSSKELCTAIMHITKSRGTTLEALADESQDDEGTKAMLSKNAKELSNGKYICEVQLDRLNKDHKVRGTENNFKTEDYVKELKEILKHQDLNEELCNQIIEIVSRRRRYDQGPGSEKSPTPYGSYRLVDGVLKHVNLIDEMRGRCSVYPNEFRAPKQSYTAELFNLLNDLNNLTIKGEKITVEEKKKVIAVVNEKGNITVKQLLKLLDAQEDEVTGFRIDKNDKPLITEFKGYSKVLKVFKKYNQQELLEDKLIVDQVIDICTKSKGIDERKKDIKELYPEFDNELIEELASIKGVSAYHSLSFKAMHIINKEMLTTEMNQIQVLHEIEMFDKNRKSLKGKKNIEPDEEAILSPVAKRAHRETFKVINALRKKYGEFDSIVIEMTRDKNTREQTKRINDNQKRFENINKEVDDIIKNAGIDPEEVNGKTKTKVRLYLQQDCKTAYTQQDIDLHTLIFDDKAYEIDHIIPISVSLDDSLSNKVLASRLENQQKGNLTPMMAYLKGKFTDGNLERYKLFVNSNKNFNHKKRSNLLDEQDITKEDVARKFINRNLVDTSYACRTVLNTLQHYFKDNEIDTKVHTIRGQSTNIFRKRINLQKDREQDYFHHAIDALIVASLKKMNIVNSYLMHYDYSDLYDEETGEVFDVLPDKQFIDQRYISFISDLKNIYQESNQYNLGYITQEQMHYPLIKVSHKIDTKPNRQIADETIYSTRNIEGQDMLVEKIKNIYDPKEKKAIELVNNIINDDTDKYIMKHKDPQTFEKIKEVVLNHFNDYKDSKEYYVIDKKGKYSLKEESPLTSYYNENGAITKYSKKNNGPAITSMKFYSEKLGNHLAITSNYNANNKKVILKQISPYRTDFYLSPEGKYKFVTIRYKDVFYKETIHKFVIDENWYHEEKTKKGIQDGWKFVCSMHRDELIGLIKPEGKKFVYDASINGGQTQYHDGKHYEILKFTATNNDKANMFEVKPINTNCSKRLMPSVGTFIKIQKFATDVLGNMYEVKDNRLKLEFD

SEQ ID NO: 6930 - protein, 1269 aa, unidentified
  REGION 1..1269: note = Description of Unknown: Cas Enzyme sequence
HADYRWPLFNGAGGIFEPDYYKRFPTIYHLRAHLVDSCEKEDIRLVYLALHNIVKHRGNFLHQDNPGLSAKNADVDDAVTDLGQALESWCEANDIEIAFDVEAIAAALDDPSLSTAEKRERVEKALGIEKPSKKMASNIAKAIVGYSADFAQIFGIEASEGKFALSNDERVEGFPCPDDGLDLYEALKAAYSAFVLKGILKNAEGKTISFCKVGEYERYRDDLKMLKDLVRDYVPEKHDEFFRGAVFEGTRLYDPSKAEGYTKYDLGSSKMSHDDFLKEVGKLFKGSSAEGDGRYLSMMERIEEKTFLRRLKTSDNGAIPYQLHREEMDAIIENQKAYYPFLGQEKEKIESLVTFRIPYYVGPLTRKNAREAADGSLRFAWSERLEGAEGRKIYPWNWEEVIDRDKSAEAFIRRMTGTCTYLQGEPVLPRCSLMYEMYCVLNELNGARWTQDGDKEYRFDFADRAGIVEDLFKRSKTVSYQIVGQWLEKKHGPNGERSMGGGYRVRGGQGEAGFESKLSSYVDFCKILGVDEIPEDDIPMVEDLILWNTVFEDRSILKRKIKQEYGDRLSTEQIGKVCRKRYTGWGRLSRKLLSGIRVETDNGPKSIMDILEEGDPNNTCRLGVAMNLMEILHDGQLGFGKKIDQINNDRPGTSLAMELADLPGSPALRRGVNQALRIVEEISGIAGKPPASIFIEVTRDEDPRKKGKRTTRRYNQVKQALASLKKQYADVYSQLEHMTPQKMDDRRVMLYFMQCGKSMYSGKPLDINRLSDYQIDHVLPQSYIKDDSLENTVLVLRDENQRKLDSMFLDQSIISKMGAFWKELHRVGLIGDKKLRNLMRAEQVSDSQMKSFINRQLVETSQIVKRVQQMLRERYPETDVQPVKAGMSHQLRVECELAKCREANDYHHAHDAYLAAEIGRFIQYRHGDAFENPTRMAKTVRAFIRKQAENLRYRRDMPGSAGFVVSSFLSSGFDKETGVIFDDAWDAEVEVGRIRRSLDYRDCFISRMPEETSGAFWDATIYSPRETKKTLSLPLKKGLDPKKYGSYSREQFAYFFVYEAFKGAKRKRTVEFAPVPVRVANALKSDESELERYAMGLAEAKGLSFSRILKRKVLKYQMIDLSGDRLYITGLKEVRNARQFAFSNKETKLLCRVVDGGECSDEVLDGLFERIQELFGQHAARLGRQLRIEDIARAYHDASLSDKGNVIVSLLEIASAKRNMIDLSSLGMGSALGCMRLTHSKELVSGSNGYYFIDQSVTGMFERRYKLGL

SEQ ID NO: 6931 - protein, 1310 aa, unidentified
  REGION 1..1310: note = Description of Unknown: Cas Enzyme sequence
MNLRNYSGDYNIGLDMGTGSVGWAVTDAQGKLLHFKKQPTWGSRLFDSAQPASEARVHRGQRRRYVRRRWRLDLLQKLFEPAMSEVDPGFFMRLNQSRTIEGDPIFTKDFTKADYYDRFPTIYHLRAYLMDTDEQADLRLVYLAIHNIVKHRGNFLRQGEKLTAKTAKTSDALERLSDSLQAWCESREYDVAKINKSAVAKILVDERSSRSQKAKDIQALVVVDTGDATANKKLAKGLSNAVVGLQCEFKDVFGEFECEATKIALSDDEKLEALQAACPDDCAEFLEAICGVYSAYVLQGLLSYAEGQTISHNMIEKYKQYDHDLETLKYLVHGAPKDDADTFGGYAPGSYDAFFRGSTYHDANADDPSRDYDVSKAQGYTAYDLHKLSYDDFAKSVKKLFAGTGAETDERYIAMMDAFDKQRFLRRLKTSDNGAIYYQLHLEELQAILKNQGRFYPFLKDEAAKIESLVTFRIPYYVGPLTSKNAAQDKHGKPRFQWSERKPGMEDAAITPWNWDTVIDKNKSAENFILRMTGDCTYLADEKVLPKQSLLYEEFCVLNELNGVRWSEDGDDWRRLDAAQREGIVHELFHKKRRVTYKMIADWLVKEGDATNPVVRGGQGESGLESKMGSYIFFAKDIFGVDELSRAEYPVIEKIILWNTLFEDRSILKEKLQDEFGPSGNGMLDAEQIKKICKKRLTGWGRLSEKFLTGIRIDTQAGRSMSIMDVLREGNPSSERRLGETMVMMEILHDNTLGFQEKVDEYNRKYYAENEKSLGVNELPGSPAIRRSLNQAIRIVDEIAKIAGYAPANVFVEVTRDEDEKKKGKRTAKRWDAIEDALKAFKAEGGDLAVMGDFKELKAANVNLDERLTLYLMQNGKCLYSGRAIDLNKLMAGSGEYEVDHIIPRAYIKDDSLENKALVYREENQHKTDQLLIDKSIRWKMGETWKQLHQAKLIGDKKYRNLLRSSINDNAMKGFVARQLVETSQMVKMAQALLEARYAGEGTKIVPVKASMSHNLREAAGLVKCREANDFHHAHDAYLACRLGLFIQMRHPGMYENPIGYSHVIKKYVREQSELFKKTHRMPGSAGFVVNSFMTAGFDPETGEVFDDAWSEDDEVKRYRGKYLPDGWNAAAEVEGIRRAFNYRQCYISRMPQEDTGAFWKATIYSPRDPKMGAKLELSTKQGLDAKRYGGFSSQQFAYFFIYKAKKKGKPVFRFSQVPVWLAARIEGDSAVLGEYARGLAEKEGLEYVGITRPKIYKKQLIEVDGERFFITGKKEMRNATQLAFSNEQMKLLAGDTCSEDAIKLLDMFN

SEQ ID NO: 6932 - protein, 1004 aa, unidentified
  REGION 1..1004: note = Description of Unknown: Cas Enzyme sequence
MKKRKKKKKKKKKDCHYTLGLDIGIASIGWAVLGNDEDGTPNRIIDLGVRIFESAEVQKTGESLAAPRRDARSARRRLRRHRHRLERIRYLLVQQGVLTQEEMTHLYDKSDMVSPYQLRTEGLDRLLNAREFSKVLIHLAQRRGYQSNSTAEEAKNEKENGIIKSAILENQQRMERGGYRTIGEMMYRDAAFWETINGIRYHCTRNKAGDYRFTVDRASILAEVSILFEAQRRLGSPWASVEMEDAYTAILASQRSFDEGPGGDSPFRKAMSHNVGNCTLIPTELRAARADYTTEYFKLLQDLNHMRLVDNSGSHPLTQQQRAILEEMAFRSANLTYGQLRKKLGISDEVRFAGLYYGEDTIEKAEKRKWPQMQSYHKIRTALDKVSKDAIQTLTQDQLDAIGEILAGGVSDAKRINSFCLAGIPEEYHKALLPLSISKRAKLSIAAMRKLIPFLQQGMRYDEACKAAGLDFHGADGKVEKLSDFLNEITNPVVRRAVSQTIKVVKAVVDTYSNRKEMKLDAVRIELAREMHHSIKERNRMKKRQEENREKNEQVKAQILETKPGTRVTGLDIVKFKLHQEQKGFCPYSGVEIKKERLYEPGYAEVDHIIPYSRCFDDSYSNKVLVLAEENRQKGNRTPYEYFGADEQRWHEFSVRVGASVRDFKKRQKLLNTSFGEEQKNEFTQRNLNDTQHITRVVYNYLRNNLEFADSAYAKAPVRAVNGAVTAMLRGRWGIEKMRGNGDLHHCKDAVVIAATSDSMIKDLTKYYQEEEQLFMGKTNFVDPATGEVLTRKEFQQRFAPKFPQPWDRFREELEARLDPVNPKEALMALNLSTYEFDPEEKIPPVFVSHMPKHTVTGAAHEETIRSRTETGTVVKTALTSLKLDKNGEIEGYYNPQTDPRLYQALVDRLKKFGGDGAKAFAEPFYKLKKDGTPGPRVDKVKIERKSSLSVSTGRGVAKNGDMIRMDVFRIPNERKPDDGYYFVPIYVADTKKATLPSKAVVAG

SEQ ID NO: 6933 - protein, 1112 aa, unidentified
  REGION 1..1112: note = Description of Unknown: Cas Enzyme sequence
MEQDYFLGLDLGTGSLGWAVTNEQYEIQRAHGKALWGVRLFESANTAEERRLFRTNRRRLARRNWRLDLLQDIFAEEINKIDDGFFLRMKESRYVPADKRDKNGNCPELPYALFVDDNYTDKQYHQQFPTIYHLRKCLMDTDTTPDIRLVYLALHHILKHRGHFLFSGEMETIREFQNMFQQFIQTIQNEELEFHLTFTAENIQAVETILKNQDYGVAEKKKQLIKQLGAKTSCEKAILQLIAGGTVKLSDIFDNDELDNTEQPKICFADSGYEDNAGLVEAALGEQFIIIAQAKAVYDWAVLSDILGESTTLSEAKVAVYEKHKKDLAYLKQLVKENLDKAAYQEIFVTTNDKAANYSAYIGMTKQSGKKVALQGKQCSREDFYVFLRKNVLNSIKDEIKTAYLQQEMEKGTFLPKQVVKDNGVIPHQLHLEELKRIIANLKEQIPLLAEQEEKLIQLFTFRIPYYVGPLNGIGEGEAATNWAVKKSKDKIYPWNFDKVIDLEASAERFIRRMTNKCTYLPQEDVLPKNSLLYSKFEVLNELNNLRLNGKLISVELKQRLYTNLFQHYRKVTVKKLKAYLVREGIVGKADAIDIAGIDGEFKSSLTAYHDFKNILTGCSLTQDDKEDIILNITLFGDDKKLLDKRLKAQYPQLTEGQRKGLRALSYKGWGRLSKAFLDELTAPAPETGEVWTIIRAMWETNDNLMQVLSDRYYFTEAIEKRNGKTEQKAISYQMVEELYVSPAVKRQIWQTLQIVKEICEVQGKAPKRVFIEMAREKQESKRTVSRRGQLMDLYKKCKDETRDWLNELGAKDDAALRSDKLYLYYTQKGRCMYTGEVIPLEDLWDNNKYDIDHIYPQSKTMDDSLNNRVLVKKEANANKSDNYPLHVDIRQKMKSFWNMLLRDGFIEKEKYNRLIRADEFTDDELSGFIARQLVETRQSTKAVASLLKQVLPAETEVVYVKAKIASQFRQDFNLIKVREMNDLHHAKDAYLNIVVGNAYHTKFTANAGWFIKQNPGRSYNLKKMFTSDKDIIRNGQTAWKAGGDGTIVTVRRMMQKNNILVTRRSYEVTGGLFDQQLMKKGKGQVPIKGSDSRLSDIQKYGGYNKAAGTYF

SEQ ID NO: 6934 - protein, 1291 aa, unidentified
  REGION 1..1291: note = Description of Unknown: Cas Enzyme sequence
  MOD_RES 4..7: note = Any amino acid
VGNXXXXATRQFRTARRRRRRERDRIAFVRDVFRNALEEKDPGFLQRLQDSFFYPDDKHVNQKYSLFNDSNFTDVDFYKQFPTIYHLRDHLVSNQQEQDVRFVYLALIHIMKNRGHFLYPGDSYNPDQQFDACYSSFCDACNSLLGEASIPDIGSEIREVLIQTGITRSKKSNNLLQVFNDNHYDIASTQKKELAKLLAGLTCSFYKLFDDEDLKETNPKDCDLTKDYDTARTSIEDSIGTERIELIDTAYALFNWMRLSAILGDHRLLCEAKVAVFEKHKGDLRRLKAIARTLDKVERESLTNKKPYLYDRIFNINKKDHNNYVAYTGHFKKRGKRQELEYHNRNQQEFLKYLEKELNVYKDIDDPEVNNLLAEISQGKFLPLIVGTDNSAIPRQVVCAELKLILHNAKNYLCFLDDNLCKKIEHGRFAWVVRKNPGKVYPWNIDEKIDIEKSAEIFIQKMTRDCSYLNSEKALPKQSLLYSEYMLLNIVNAININGTRLDYDTRKRLLQDLFYNPNAAKRVTRKSVLNWFISNGIVIENRDLGGFDNDIPVQLIALHDYRKLSSPDLDMFDMENIVKIITLFPNDEKMIRKRLKEEYGNAITEEDLKFLVTRRYSDWGRLSEKLLTGIRGVGSNDYNKTIIDIMREEPVLLMELLSDKYTFTNQIEKINKAKNPTINNLTYDLLDDYIVSPAVKRMIWQTLLVYKDIEKIMGGVPEKIFVEVAREDLPLGQRTKSRKSQLQELYRTCRSDTNDWHLELRNHLEAEKETALDSKRLFLYYLQQGRCAYSDEVIDIHSLYTNAYDIEHIYPRSLTKDDSIHNNLVLVKTELNRLKGDKYPVPEALQKKAKLLWDRLLQQGFMTKEKYSRLTRKTQLTADELAGFINRQLVETRQSVKVVTDILERTIPQQTRLVYVKAGHVTDFRKNGFQSASTEREEEKLFFVKCRELNDIHHAKDAYLNVVVGNVFDEKFTKNPKQFIAEHHRDGSNNYGYNLARLYENDIPYRKRNKGFAWKAGSDGTIVTVAKNMARNDVLYTEQTVIRSGGLFDQQITKASSVKSLEGKAPIKGRIDQISDSMADSEINNPLSNIKLYGAYDKVTVAHYALIETKKNSTSERSIEPVPLHVFMQTGQKTGNSTTVLKEYFQKTFQTESVRVIISLIPFNSQLLIDNYRCRIRGKTGNYYRLESHIQPYITSDKEAILAKVIDCVRKTTLSEYNKLPDEGREKLNHICEDRLSGVDLLDLMRYLQTRFETGPWKYSPQLSKLAGQLNEKICISEGLSAYQKCYCINQ

SEQ ID NO: 6935 - protein, 1142 aa, unidentified
  REGION 1..1142: note = Description of Unknown: Cas Enzyme sequence
MKKLKQMSGPYSIGFELSSTAHGFVATDPNGNVLYHGKQPVMGTRVFKEGQHAAEARMPRTSRRGIQRRRGREHEMERVFAPVISSIDPDFFIRRRMSYKLGKIRFESDPIGFSYSRLFHSFPTLAHLDVALMESDSAMDPRLIFESVANHVVRRGHFLLEDQNVSSTNSDIDTQVANYAEVLVSYFEDTLDERIEPSLEALDINGNVTARELQKRFASAMCVSGDDIQKKTEKAQIKAIADLVAGYKADLTALVPDAEKLPKVSISDGDALEEFLSDSCPDSLVSVLMAAQALYTSWKLQGMLSYAPGKSLSHNQVAQYDVYGKQLRMLKNLALKYVAKQDADGNIDEDGFKDYVRFFGGPKCEDRYRYDKVQVKKQDSPKKNMGYTAYNLNVLGYEEFAKRVELLFKDTDAVNDPQYKTMMEAFANHAFLRRIHTVDNAAIPYQLHAEVVNRIIDNQGRFYPWLIDAREHILKVLTSRIPYYVGPLDSTDHGKAGENGTRFAWVKRLAGHEDAFVSPWNYEDHIDIDTTAELFIRRMTGECSYLDGEDVLAKNSLLYEKYCFFNELASLSFTEDGDSWMPFDAGMRKAIYDAASDGKTMTVKRIESVLQRDFFIAHPHVRGTSNPKAMSSKRSNYAYFCRLFDVKALSASDMSMAEDLVLWNTVFEDRDILRRKILKTYGDLLTEKAVDDFCHKRLSGWGKLSERLLTGIWADTASGDMCVMDVLEQGRPYGRYRGSSMNLMQILNDDVLDFKMEIKRLNDSHMQMAEGFDLNALPGSLRRGVSQAMKVLDDIVSVAGKTPDRIYLKVTRTASNSRKGKRTAKRSDKIKQALKALDADAAADLGAAKLLRELGMFDEKEINERIYLYFHQAGKCLYTGKPIDITRIASNDYYVDHVVPLAYRKDESLDNKVLVYAEASRYKSETLLVSPAVQRKMLPFWRMLRNAGLMSERKLNALIRTEISEGMLKSIIGRQFTENSWEAKLFTAAVAAKYPGTVVIPVKAGVIGAVRSRIGIPKSLKRTSSITHTTLCLQPRSGAIWNLRSQRSSIIALSMSSTCARSSWLMRRTRRLRSHNLISLPAVSSLTVSTRTQVRFTGTRMKRWSASIVHVDGRTFVSHMPPLKTAAHFGNRRFTLQGRSRN

SEQ ID NO: 6936 - protein, 1338 aa, unidentified
  REGION 1..1338: note = Description of Unknown: Cas Enzyme sequence
MAVLGFDIGSNSVGSVWIERKAGTITPGVSVFPAGVDETDDKRGDPKNAKRRMTRRTRITLARRSQRKRELRLKLIEAGLLPPSEAEFRRLLEETDPWELRRRGLGEPLSPFEFGRVLLHLAQRRGALGLHVPEPGEEEDADEAASEDGKVKAAIGAVRAKMLESKARTFGEFIAMVRAERVTPITSKDVRPDGHRKGPREWREAVRNKAASYEHCADRLMIRDEFAKLWDAQRGFGGETAKRLTPELRLALDDESVDAMWRHKGLLFGQRRQSWDLGTLGRCVLHPEERCVPHADMYASRYLVVETVNNLRIIERDKPPRPLTPEERDRIRAYLSGPLRTETKGKRKGQPKRTVTVTDLRNLMSWGRASKSSQFRFNIENDEDRTINTDWFSREIIHGAVTPETWEAMTDRVREGLNRAILKFDPDQEEDAAKLRKGVMDWAGLSEAQADALVAAWKTRPKPDAKRLNMGRRATRNLLAVMDRPEPWDDPKNPTGYRWLTQIEARKIIVEDGEFVDVTTGSPFDDHTRRRYATGAKGATARDRYYMGKHVLMKDGKPVIGPDGHPLAEPPPAPLISNPVVRKAIHEVRRHLIEYMKTFGRRPDEVYIELAREAKMGKNDADRLLFRNRLRNRIRNNIIHELDLESQTSTQQRAAVDRVILCVQQGGVCPLCGRGGLTARLAATGEECEVAHIIPRASGGHNGLSNIVLAHTKCNREMGRRTPRQYWSAGPGFEQGMLWVEGIYGDVKRPKPSEVRTAEGEALWACYFTGRDDRAKIERFKLDVSDAQVQGMTERQEAATKYAARQVMAYLADALYDGKGLPERGGKRRIYATDGMWTSRLRREWGLFFDPHDARSHGLSGDEERERKEKNRGDHRHHAIDAVVIALCTRQVQIDWEDREKQADRDGINTADEEQMENYRRLHRLRPPSPFDRPDLPVDEAIEAFRAAVKRAVFSDDGEVRPICHRPVKRKLIGALHEETLFGPVLDRAGNLTGYYTAKKSVLALDRNHLRMPRPETEREAIERLAARRQRDKSIDERAARKWARAVVSSPGYKPAIVDPPPGKSGIVRDVALRARLRECIEEAGLDPDDFSATEIKKLHEAGRIRHASGVPIRSVVLLRTMNDPVIIDRKRPDYATGRMLPDDDPASKRAYVGGNNHHVEIRINDKGDLSGEIVSAFEAAQRKLARLRAFRDARIPRPDEFRKLPTAERRKLAPVIRAIEREHPLVDRRDDDAKGGRFLMSLCEGEMLLMKHKETGDVGYFVVAKLDKPRSIVVVPHWDARAATERKDAEGDKVPNSKREQFAVTPSDLGTLAPPGREYAVKVRVSPLGVVTELEKD

SEQ ID NO: 6937 - protein, 903 aa, unidentified
  REGION 1..903: note = Description of Unknown: Cas Enzyme sequence
LHQGYIYSDAVFLANLSKVLDQSLTSEEEEKLIANVHRLMINQKSNKNKSAIINNLISNYINNEEMNEKKESSYISDDALNKLVENEIINVLGNNRWIELGEQNQNHLINEIRDNFKNLLITRGNFSRGVLYDKVPRFDDQIKTLLKKEYPEWDEKRFKYLYHPAESEFYPAAKEIDGKKILGSPEPISKGLKNPMALKTLYILKKLINHLILTEKIDSETRVVVEIARELNDANRRAAYERWKNERQKENESLVDKITQSASEAGYPDISVDDNILTKYKLWLEQGRQCLYTGKVIAFSELLNGTSVDIEHTIPASISFDNELSNLTLANSRYNRDIKKKLIPTQLPNYNTTIEINGESYKAILPNIKFIENKVKHYSKLVEDAKKKSKSAQSKDQKDTQIQNRHYYKMHYDYWNKKLRTFTDTEIRNSWKNSQLVDTQIISKYAFHYLKTVFNIVDVQKGSVTAAFREIFNLGFKKDRNSSIHHAIDAATLTLIPYPKKRDYLLLKYFEATERKLAFHTKPEYWNNFSSEIIKDLEQKTFVNYYKKDTTLVQTYKNVRKRGRIQYIRKQLANGKFEYILDDKGNKIPMVSQGDAIRGQLHEETFMGAIKLPPNNTGIRTNYKIEKKPLIYVFRKPIKSFTKIEELKSIIDDKVRNDISQTINERIALGKSFTEAINEDIWMKDSSGSPIKQDKNGRVLFPIRHVRCVGAIGRGILTSEKALPIKQHSFLSKQEYKQNYYAKNEEITACIFYENNFDGIISREFRLIGLFELAQLKINNLNELSTIPEYNVCEKKNIPSKYFIKTGYRVIVYENSPDELRELKPDELIKRIYRVYKFNNAGTNYIYLQYNSEARQDKELGVGSTEFKLDEYQPRLKLTANNFNCLVEHYDFDISIDGEIIFK

SEQ ID NO: 6938 - protein, 926 aa, unidentified
  REGION 1..926: note = Description of Unknown: Cas Enzyme sequence
PRRQKRLLRRLCRRKARRMAGIKNLFVTNGLIGKDALFDEKNNIYKARDNADVWDLRVRALTERLTTVDFIRVLTHLAKHRGFKSYRIALEKEDAESGKVLEAVKANRALLENGKTLAQIIVEKGGQKRNRKDKKGNATYANSIPRDEIERETRLIFERQRAFGLAAANEKLQRDFERIAFRFRPIAGVDKMIGKCQFEPDEPRAPKNAPSAEFFVAWTKINNCRVKDEDGRSRFLTQEEKETVFNLLKDQKEIKYSALRKALFAKRPDIKFADVEYNPKPVYDKKTGEIKEPPTPENLKFFSLKGWNELKRVIDVSAYPVETLDKIATVIATQKNDADISGELKQLGLPDSDIERLQGLQFKEFIRLSLKALYKILPEMMRGKKYNEACDAVGYDFKSTGESFAAQKGKFLPPIPESLATTVPTVNRAISQFRKVYNALAREYGTPDQINVELARDVYNDHDERKKIEARQKEYAEEKEKAKALAQSKTGIENIGGRDLLKFRLYEQQDGKCVYSGEALDLRRLTEQDYCDVDHIIPYSRSLDNSQSNKVLCLSRENRQKSDKTPLEYISDPVKQAEFIARVKSMKGLNKAKKDRLLTRGFDEREVEFRDRNINDTRYMARYVMKYLDDCIDFSQSKAAIKDRVQSRNGALTDFLRHQWGLRKDRAENDRHHAQDAIVIACATNGYTQYLACLSKIFENKQAYANKYGEPWYKAFKQHVKQPWDGFYQDVQASLAEVFVSRPPRKNATGEAHQETIRTLNPDKPQYSEKDIKSGVKIRGGLANNGNMLRVDVFSKKNAKGKEQFYLVPIYLADGIKPELPNKAIAQGKPESEWIVMDETYAFKFSLYKDDLVKAKGKELYFGYFDGCDRATGNFHIEAQDSSQYWKGLGPRNLEYIKKYQVDPLGRYVEVKSETRLPLNAKKGKS

SEQ ID NO: 6939 - protein, 350 aa, unidentified
  REGION 1..350: note = Description of Unknown: Cas Enzyme sequence
  MOD_RES 336..338: note = Any amino acid
MENQSTISQDSTQFESAQSGIQPYFLGLDMGTSSLGFAVTDQQYNVIRKRGRLLWGIRLFEEAKTAAATRQFRTARRRRRRERDRIAFVRDVFRNALEEKDPGFLQRLQDSFFYPDDKHVNQKYSLFNDSNFTDVDFYKQFPTIYHLRDHLVSNQQEQDVRFVYLALIHIMKNRGHFLYPGDSYNPDQQFDACYSSFCDACNSLLGEASIPDIGSEIREVLIQTGITRSKKSNNLLQVFNDNHYDIASTQKKELAKLLAGLTCSFYKLFDDEDLKETNPKDCDLTKDYDTARTSIEDSIGTERIELIDTAYALFNWMRLSAILGDHRLLCEAKVAXXXQYLRNTKVICGA

SEQ ID NO: 6940 - protein, 1076 aa, unidentified
  REGION 1..1076: note = Description of Unknown: Cas Enzyme sequence
VERESLTNKKPYLYDRIFNINKKDHNNYVAYTGHFKKRGKRQELEYHNRNQQEFLKYLEKELNVYKDIDDPEVNNLLAEISQGKFLPLIVGTDNSAIPRQVVCAELKLILHNAKNYLCFLDDNLCKKIEQLFEFRIPYYVGPLNPAHRFDKEHGRFAWVVRKNPGKVYPWNIDEKIDIEKSAEIFIQKMTRDCSYLNSEKALPKQSLLYSEYMLLNIVNAININGTRLDYDTRKRLLQDLFYNPNAAKRVTRKSVLNWFISNGIVIENRDLGGFDNDIPVQLIALHDYRKLSSPDLDMFDMENIVKIITLFPNDEKMIRKRLKEEYGNAITEEDLKFLVTRRYSDWGRLSEKLLTGIRGVGSNDYNKTIIDIMREEPVLLMELLSDKYTFTNQIEKINKAKNPTINNLTYDLLDDYIVSPAVKRMIWQTLLVYKDIEKIMGGVPEKIFVEVAREDLPLGQRTKSRKSQLQELYRTCRSDTNDWHLELRNHLEAEKETALDSKRLFLYYLQQGRCAYSDEVIDIHSLYTNAYDIEHIYPRSLTKDDSIHNNLVLVKTELNRLKGDKYPVPEALQKKAKLLWDRLLQQGFMTKEKYSRLTRKTQLTADELAGFINRQLVETRQSVKVVTDILERTIPQQTRLVYVKAGHVTDFRKNGFQSASTEREEEKLFFVKCRELNDIHHAKDAYLNVVVGNVFDEKFTKNPKQFIAEHHRDGSNNYGYNLARLYENDIPYRKRNKGFAWKAGSDGTIVTVAKNMARNDVLYTEQTVIRSGGLFDQQITKASSVKSLEGKAPIKGRIDQISDSMADSEINNPLSNIKLYGAYDKVTVAHYALIETKKNSTSERSIEPVPLHVFMQTGQKTGNSTTVLKEYFQKTFQTESVRVIISLIPFNSQLLIDNYRCRIRGKTGNYYRLESHIQPYITSDKEAILAKVIDCVRKTTLSEYNKLPDEGREKLNHICEDRLSGVDLLDLMRYLQTRFETGPWKYSPQLSKLAGQLNEKICISEGLSAYQKCYCINQILSVMNCHLQLFDLSCFGLSKNSGARNLNRILNRDSSYFLVTRSPSGFFENKIDLWSV

SEQ ID NO: 6941 - protein, 1111 aa, unidentified
  REGION 1..1111: note = Description of Unknown: Cas Enzyme sequence
  MOD_RES 772..783: note = Any amino acid
MSGYVLGLDIGITSVGYGVIDIDNNLFVDYGVRLFKEGTAAENETRRTKRGSRRLKRRKSNRLNDMKNLLKENELYFEDYRNYNPYEVRVKGLKEKLLPEELCTAIMHITKSRGTTLEALADESQDDEGTKATLSKNAKELNDGKYICEVQLDRLNKDHKVRGTENNFKTEDYVKELKEILKHQDLNEELCDQIIEMVSRRRRYDQGPGSEKSPTPYGSYRMVDGVLKHVNLIDEMRGRCSVYPDEFRAPKQSYTAELFNLLNDLNNLTIKGEKITVEEKEKVVAFVNEKGSITVKQLLKLLDAQEDEVTGFRIDKNEKPLITEFKGYSKVLKVFKKYNQQELLEDKLIVDQVIDICTKSKGIDERKKDIKELYPEFDNELIEELASIKGVSAYHSLSFKAMHMINKEMLTTEMNQIQVLHEIEVFDKNRKSLKGKKNIEPDEEAILSPVAKRAHRETFKVINALRKQYGEFDSIVIEMTRDKNSKEQVKRINDNQKRFKNENDQVDEIIKNAGIDPERVNGKTKTKVRLYLQQDCKTAYTQQDIDLHTLIFDDKAYEIDHIIPISVSLDDSLSNKVLASRLENQQKGNLTPMMAYLKGKFTGGNLEKYKLFVSSNKNFNGKKRSNLLDEQDITKEDVARKFINRNLVDTSYACRTVLNTLQRYFKDNEIDTKVHTIRGQSTNIFRKRINLQKDREQDYFHHAIDALIVASLKKMNIVNSYLMHYNYSDLYDEETGEVFDVLPDKQFIDQRYISFISDLKNIYQESNQYNLXXXXXXXXXXXXEQMHYPLIKVSHKIDTKPNRKIADETIYSTRNIEGQDMLVEKIKNIYDPKEKKAIELVNNIINDDTDKYIMKHKDSQTFEKIKEVVLNHFNDYKDSKEYYVIDKKGKYSLKEESPLTSYYNENGAITKYSKKNNGPAITSMKFYSEKLGNHLAISSNYNTNNKKVILKQISPYRTDFYVSPEGKYKFVTVRYKDVFYKETIHKFVIDKNWYHEEKIKKGILEDWRFVCSMHRDELIGLIKPEGKKFVYDASINGGQTQYHNGKHYEILKFTATNDDKANIFEVKPINTICKKQLRPSAGSMLHIQKFATDVLGNIYEVKDNRLKLEFD

SEQ ID NO: 6942 - protein, 1538 aa, unidentified
  REGION 1..1538: note = Description of Unknown: Cas Enzyme sequence
  MOD_RES 1501..1504: note = Any amino acid
MKKILGLDLGTNSIGWAVINSVADESVEKRNIELAGSRIIPMDAAVLGNFDNGVTKSQTAERTSYRSIRRLRERQLLRRERLHKVLQILGFLPEHYVNDIDFENHPGKIKKNTEPKLPWRKNSMGQFEFIFQASFEAMLTDFATHQPVFVSEGKKVPYDWTLYYLRKKALTEEISKEELAWIILNFNQKRGYYQLRGEEEEEQSNKLVEFYALRVVKVEATDDKKGKDTWYNVHLENGWIYRRTSNIPLDWEGKVKEFIVTTDLNEDGTPKLDKYGEVKRSFRAPKEDDWTLIKKKTESDIANSHKTLGCYIYDALLQNPNQKIKGRLVRTVERKFYKEELRLILEKQLSFHPELQDRDLYRACIDALYVSNEAHKNNISGRDFVYLFIDDIIFYQRPLKTKKSLIDNCPYEKNQYMDRETGEVKQAPIKCIAKSHPLFQEFRLWQFISNIRIYQRERVMDDGKLETDVDVTPDFLKTEDDYTTLFEWLNDRKEVDQKAFLKNPQFGLKKTFTEYRWNYVEDKSYPCNETRNAILNGLQKAGVSADFLSREVEEALWHILYSVEDKIEIESALRKFASKHDLDDRFADVFKKLPPFRKEYGAYSAKAIKKLLPLMRMGKYWELSNIDDKTKERIDKIITGEWDENIHNRVREKAIKLSDITDFKGLPLWLSCYVVYNRHSEARAIAKWESPEDIDSYLRLFRQHSLRNPIVEQVITETLRTVRDIWKRIGQIDEIHVELGREIKNPADKRAKMTAQIVENENTNLRIKALLAEFINSEYEIENVRPYSPGQQEILRIYEDTVLNSVEEIPEDISAVLKKFRESDLKKRPTKSEFLRYKLWLEQKYRSPYTGDIIPLGKLFTSAYEIEHIIPQSRYFDDSFSNKVICEAEVNKLKSNELGYEFIKNHHGQYVEIGFGKVVQIFSIEAYEKFVKANYSGIGSKMKRLLMDDIPETFIERQLNDSRYISKVVKSLLSNIVREKDSNGEYEPEAISKNVIVCTGSVTDRLKRDWGVNDVWNSIIYPRFERLNELTGSQQFGCWENKEGKRVFQTAVPLEMQKGFSKKRIDHRHHAMDAIVIACAIRNHINYLSNESASKKAKISRIDLQRLLCTKCRTDDNGNYKWIVKKPWPAFTQDIRKALENITVSFKQNLRVINKTTNYYVHFDESGKKVLEKQINGDSWAIRKPMHKDTVFGKVNLQKVKEVRLSLALDTPKMIVDKKLKEKVLQLYSYKYDKKRIDKYFKENASLWKDLNLSKVAVYYFTNDSTEPLVAVRKPLDTSFNAKKIKESVTDTGIQKILLNHLSNNQDNPNLAFSPDGIDEMNRNLTTLNDGKYHQPIYKVRVCEPQGNKFSVGTSGNKTSKYVEAAKGTNLFFAVYQTEDGKRNYETIPLNVVIEREKLEWAPVPENNNNGDKLLFWLSPNDLVYVPTADELNNGMRLDNMDKGRIYKMISCSGPQCFFIPQNVSNPIIPVIELGVNNKAEKSWNNEMIKVVCVPIRVDRXXXXYNTNKQSKIRKVIVLCSFLFMYVIVPVAKMRMLT

SEQ ID NO: 6943 - protein, 1026 aa, unidentified
  REGION 1..1026: note = Description of Unknown: Cas Enzyme sequence
MAAFEDPCEHGFDPDLVKTALMSREQFSSKPRKLILGIDMGIAGVGVCLMDELNHEIVLMATHLFDCPWNPKNKTSLASERRQARSQRRNIARRAAKKKHISKILMAHGVIPEGASSEWFSVRKGEQDNIQLRVKGLSEILSSRELARVLYGFASRRGYIDHGKADNDKDAGKVKKALKANAWIMEANGYETFAQYLITQPKIRNRQDDYIHCVDIGMVVDEVQAIFRHQRELGNGLATESLEGEYLAALRWLTDTTKRDRFIYSKVGYCTYFGEPIKRGPKSSISSEMVRAYQTLANVKIEHIGGGATQISPSVRNKIVYDLFMVSKNPKPLKWSELRKKLDLADTATFAGIRQSDEKKDICVKVPAWNALCSTLHDLNPALLNRLHDDIDLADTVCAAATFASSSEAFATRISELTDGLSKEDVDALLELPYGSKLFTGYGSTSLKALQMLRDAFEDTNINRLYDAEVATGLYDARKALATKRNVTDGGLLKPYSSYSPICTNPVVLRSCAQLRRIINSIIRHYGLPDTIRVEVANDLKRTEYEKKLITSGNIYNRRTNEKAKDDIVEFFGLKSTDHVKAKDLEKVRLYNEQGGKDPYTGQGIDFGRMLTEKGYVEIDHILPFSRSCDNARTNKVLVLTKSNRDKSNRTPYEWMTSGEPTAPNWDEFCIRMEVWASGKEPKHYYSSKLAKLKEDNFTNNIDSFISRNLNDARYMSKDVAKWLADCLPFPEDGRKHVFCVSGAATAFMRGIWRIGILDDNGKKNREDDRHYAVDAAVIAACTPSIVKGIALISEEHATNRDADRLLNGSLPYPEYRDQVKVWIPCIVPTYSPTRTATGALFKDNTFSYKGIDGKGKDLIKKKKGALGPCTTAWKDGKGTARAYDEQYGLLAVYDESAARWLLDPLYYIDVQKRKTEEPFIRKFSKDLSIDYWKKIPLTGNEPSLLLKRGVVLIQDGIVGRYYGYDIAHNNVKLSSSGKVSFQKTGPLAAEKFPTPTKWTDELKVMQEDCLGLCWLEFLTNRAARC

SEQ ID NO: 6944 - protein, 1320 aa, unidentified
  REGION 1..1320: note = Description of Unknown: Cas Enzyme sequence
MTQSERRFSCSIGIDMGAKYTGVFYALFDREELPTNLNSKAMTLVMPETGPRYVQAQRTAVRHRLRGQKRYTLARKLAFLVVDDMMKKQEKRLTDEEWKRGREALSGLLKRRGYSRPNADGEDLTPLENVRAEVFAAHPAFSTYFSEVRSLAEQWEEFTANISNVEMFLGDSNIPADKEFVDFAVAEGLIDKTEKKAYLSALSTMRANANVLTGLRQMGHKPRSEYFKAIEANLKKDSRLAKICEAFGGADRLARLLGNLSNLQLRAERWYFNAPDIMKDRGWEPDRFKKTLVRAFKFFHPAKDQNKQHLELIKQIENSEDIIETLCTLDPNRTIPPYEDQNNRRPPLDQTLLLSPEKLTRQYGEIWKTWSARLTSDEPTLAPAAEILERSTDRKSRVAVNGHEPQPTLAYQLSYALQRAFDRSKALDPYALRALAAGSKSNKLTSARTALENCIGGQNVEKFLDCARRYYREADDAKVGLWFDNAEGLLERSDLHPPMKKKILPLLVANILQTDETTGQKFLDEIWRKQIKGRETVASRCARIETVRKSFGGGFNIAYNTAQYREVNKLPRNAQDKELLIIRDRVAETADFIAANLGLSDEQKRKFANPFSLAQFYTLIETEVSGFSATTLAVHLENAWRMTIKDAVINGETVRAAQCSRLPAETARPFDGLVRRLVDRQAWEIAKRASTDIQSKVDFSNGIVDVSIFVEENKFEFSASVADLKKNKRVKDKMLSEAEKLETRWLNKNERIKKASRETCPYTGDRLAEGGEIDHILPRSLIKDARGIVFNAEPNLIYASSRGNQLKKNQRYSLSKLDPDYLNKVFKTSNIAAITAEIEDVVTKLQQTHRLKFFDLLNEHEQDCVRHALFLDDGSEARNAVLELLATQRRTRVNGTQIWMIKSLANKIREELQDWCRTTNNRLHFQAAATDVSTAKNLRLKLAQNQPNFEKPDIQPIASHSIDALCSFAVGSADAERDQDGFDYLDGKAVLGLYPQSCEVIRLQAKPQEEKSHFDSVAIFKEGIYAEQFLPIFTLNGRIWIGYETLDSKGERCGAIEVSGKKPEELLSMLAPFFNKPVGDLSAHATYRIQKKPAYEFLAKAALQPLSAEEKRLAALLDALRYCTSRKSLKSFFMAANGKSLKKREDLLKPKLFQLKVELKGEKAFKLNGSLTLPMKQDWLRICNSPELADAFGNPCSADELTSKLAQIWKRPVMRDLAHAPVRREFSLPVIDNPSGGFRIRRTNLFGNELYQVHAINAKKYRGFASADSNVDWANGILFNELQHENLTECCGRFITSALKSSKAPTNYFTPNILRKSWSR

SEQ ID NO: 6945 - protein, 1096 aa, unidentified
  REGION 1..1096: note = Description of Unknown: Cas Enzyme sequence
MDNKYVLGLDIGISSCGYGVIDLETGKFVDYGVRLFKEGTAEENEKRRGARSRRRLTSRRHTRIMDMQKLLKENGIMSDDYHPLQNVYELRCKGLNEKLTNDELTAAILHITKHRGSVIETVEEDVKKSDDELSLKATLQHNEQLIKQGKYICQIQLDNLNDKDHIRGHENNFSTKDYVNELNEILHHQELNEQLIQKIIDIVARRRAYYEGPGSEKSPTPYGRFIEVDGQIEEIDLIEKMRGKCSVFPDELRAPKMAVTADLFNFLNDMNNLTVDGNKLCPEEKKGILTIVSQKGNITLRQLAKELNVDEVDIKGYRIDKNQKAIFTEFKGYKKIKTILEKEGYSISLNDYEMLDRIIEILTNKKGIQERKDYLYHLEYKLSDSVVDTLANTTGITGYHSLSFKALNLLNKELFESEMNQMQLLHELKLFDKNRVSHKGKKNIESDPEAILSPVAKRAQNETFKVVNALRKKYGEFDSIVVEMTRDKNSDEKKKRISNYQKNRENGSKEMDKFLNEKGYDPTKINGKTRMKISLYLQQGGKSAYTFEPLDLNRVIKDPKYTEIDHIIPISISLDDSQNNKVLALHSENQVKGNLTPFMAYAANKFNGMGCSYPEFKTNVLSNKNIPYKKKLNLLNEENITKEEVAKKFINRNLVDTSYACRVVLNTLSDYFKDNEIDTKVHTINGRVTDLFRKKIHLEKDRDENYLHHAVDALIVASVKKMNLLNGYLARQEHDFNDLYNEETGEIITIPDDKVFFDERYIQYIVNLKTLFEESSNYYDHVIDKENMRFNPIKISHKVNTKPNRQIADETIYSTRNVDGTDYLIEKIPNIYDPKDKKCIRLVQDILNGEDEKYLMAKHDSQTFDLIRDIVKYHYEQFKSDSKMYKVTKKKGEEIITLVGENPLTKYKEENGTIHKYSKKGNGPEIISMKYESEKLGNHLDISSNYQTNNKKVILKQIKPYRTDFYQCEDGKFRFVTVRYTNVSYHKAKGMYVIDEQWYKQEKINKKIKETDKFLFSMHRDELIGIKKKEGNSYIYDLSTEKGGDKYYYDGNSVEVLKFTASNNETTGTIEVKPIYTYCKKQLMPTVASSLEIRHI

SEQ ID NO: 6946 - protein, 1332 aa, unidentified
  REGION 1..1332: note = Description of Unknown: Cas Enzyme sequence
MGENNYIFGFDIGIGSTGVAVISDDGNLAYDGTHVFNTAEEASESRKNRGARRNLSRKKWRRNQLLEAFDDFNVLSKQETSQNGYLCYTVNTDTIQRPLEKTVYHLRKKGLFEQISKRELLLCLYNMLHARGHFLMETIDFANTNTISFDDFKEHFYTTVEEIIHISDNEKQNFENDILKPVFSGSIKRSNDIKKVCDNAKLTLEDDERVSLIEVLKLISGYKAKATNISNNLEYTKESFNVTDLKNDENELPVFLQSAVDLYDLMNVARIMSSHNYLCEVAVDKLDHFDEVAKDTHSDEYKNEVKNIKDHSSNGKHLRVVRNLENGYPNGLYVKEARAILRKQQEFYPKISDDFIEVCESIISARIPYYIGPLKNDAKNAWVTKNGKIKYSYAYSMKQADKPVDEYDSIEKWKKRMISHCTYLPEEYALPKGSFIAETFSILNELNILRAEDENGNTYYLTYDDKVKILDTLFMSGKEVKYSDVRDLLHLKNFGTRKQSNDNRKFNNKYTLYPRICKLIPSLKLDSVIDIFSENEKVKEIEEIVLSINLYNEEKTKIDYFKDKKGYSQEVSKALSKLTSNSFYSYSEKFVLHQPMNERGDSMMSLLFEDNNRFYTNEQMTLISKAVDEEGNPLDFSANKYEKILEENGGKLNIDLLLEEGNPIIPISRPVIRGLNEAMKMYTELVKVYGVPKRVVIESARDLKDHSIIGTQSEKHFDQTKKLYDYLVEQFGGEKNFAKKSNVEEWEQIESYVNKNKVKIELYLRQNGVDLLTGEKININELEKYEVDHILPRGFGDDSLDDKMLISKLANAKKANRLPLQFIESGEQIGNHVVTSSEFIHRVENLYDMKLISQKKRDRLLLENDKDLETFINQNLVDTRYIIREFMSILNAYNKHHHYDTHVVSLRAAYTSLYRKTFNFDKDRGYGQQHHAHDAALIVVADKTLSTYYPHYDERNHRNDSGFSKTYRDFIQEMQSNDQAKKDSLKYFIRGMFRKAYGVSFSDSSSIISQIKRTVPFYSTKVEKNYKGKYFEATKLNKKMYKEDAVLSIVGVNDDKQVFSGVNCAAVDFYKYKDKKGNRKHLAVHIPKVIIDKDGNINQEKYIALIQKHYKVPELLDENGKLKTGYFRFRAFTNDIIYNTVANCPMLFNIGSITNKKLELKFINVFSYDDIYKNGLNIQNDLINVYDLKTKQNPDGVAFNDISKDVFISYVNRKYWNLSDKDPKLKSVSEKVEKDKNVYELSNHLSYLGLIINRVGTPPTVDGRCLLVAHNNIVKENENAQYVKLKYNILGLRFIQSPDGGLIIQSPKELPGAFTQVKKEKFSWKICNDDIQ

SEQ ID NO: 6947 - protein, 1378 aa, unidentified
  REGION 1..1378: note = Description of Unknown: Cas Enzyme sequence
GFPMHTDKKADYYVGLDMGTGSLGGAVTDPQYHLMKVKGKDFWFVREYESAQPQLERRTHRISRRKLQRHQVRIGLLRSYFAEEVLRHDPLFYIRQDNSKYYREDKDPRLTTKDSLFADPGYGDKEYYKEYPTIFHLRQALLKDKVASEERYSRLLYLALIHLFEHRGHFLLNTDSGDLNADMVKDAGETVMNYICESIEEESSDVSYKQIIEKLADKEISRSTKKDKIASLLGIKRSDKKQMELVKCLCGMDADARVMFQMEADEKIKVAFQQASFEEEKGEIEAAVGEEYFFIIESMKQLYDYSQLQAVLKGFDYLSDARVAMYNKHKEDLRLLKKVYKRDLGQEAYDRMFRSSEKGSYSAYCNSLNSTDSLAAEQKYRRNMKNVKERGKGDLHDRIKKDLKNLANEETTVILKEIELEQFLPKQMTGANGVIPNQVHQKEMKKILENAEKHLDFLKETDDSGYTVSERILMLFSRNIPYYVGPVGNGSKTGWAVRREQGQVLPWNMEQKIDMNATSERFITNLIRECTYLSGEKVLPKQSLLYEAYCVLNEINNLRINGKRIVPEVKQDIYKELFQGVRLGKKVTRKTLCSYLMNRGILKDESELSGIDKEVNAYLSSYGKMYAVFGERMREEVIQGAAEEIIYYGTIYGDSKRMFQKKLDQYISSGILTESQAKRIAGYKFKDWARISKSMLCLSGRDNRTGEILSLIRAMWEYNLNFMELLHSEEFTFKEELEKRKQTIQKTLSDFQFEDLDEYYYSVLVKRMIWQTVQALKEITQIMGHYPKRIFIEMTRTDEEKGEQGRKNSREKRLLKLYENIKDGRNWETEIKNASASGKLNSKKLYLYYLQMGKDAYTGNDIDIEDLFKDNRYDIDHIYPRSLTNDNNMENNLVLVSKKINEEDKQNDSLVPKKVRENPKVRELWAVLHKMGFMNDEKYNRLTSNEKLTDDQLAGFIERQLVETAQGAKGIADLLKSLMPGTEIVYVKARNVSDFRKEYKMLKSRLINDYHHAQDAYLNIVVGNVYFTKFTRNPLNYVKKEARRDGKNYNYNLYKMYGKDVVRNGEIAWVASKNQEPGTIRLVKEVMEKNTPMITRQTFEQKGELFNLQPVGKYSAKAENYVPLKAKDEKLQDVTKYGGYTSLKPSYFVFFEHGSEKKRKKCFEVVHSYYASQIKNKADLTKFLEEKGYKNPRVIAEKIKKNALIKYNGYFLYIVGMDARKNVEFSNAMAMCLKYPYVQYICKLERLRAAMLLPEKQKMSLRWDEKITGEKNLELYQELTTKHLHAIYANHPKCIGTCLENGESSFKLLGIEQQVMLLCDIVAYTSFQKGTFSLQAIGGPKDVGRIRISGNMTDATELKLIHYSITGMYKKEEDLLHM

SEQ ID NO: 6948 - protein, 1028 aa, unidentified
  REGION 1..1028: note = Description of Unknown: Cas Enzyme sequence
  MOD_RES 131..134: note = Any amino acid
  MOD_RES 592..595: note = Any amino acid
EYSDFFHKEKDKSGNYIVNYANYIKGIKRLTNKDNKNYSAKQQLYISIRKILDDRALKDETYQKILKEMEEETFLEKINNVDNSAIPYQLNLMEMDKILTQQGVYYKELKDNKEQLLKMLISKIPYYVGPXXXXITRMTNYCTYLPNEKVLPKESLLYQKYMLLEELSQIKIDDNKLSKEDRKAIINDLFIGERRAKVSDKNFKEYLNKINYVKINDKGYDVTGYQSDDGFACALSSYNKFRRVLGYVDERNEKMIEDIIYWLTVFEDKDIVKRKINKQYPDRLTDEQLKKILKLKFKGWGRFSRKFLAGIKGDMGTTIIDMLEDADDRFLYCNYCPNLMQIINKDEKIKQIIDDNRPRYDGTEDLLDVIQDMHTSPANRRGIWQTMKAIEEIIEYMGEKPQQIYIEFAREDDPKAKNKRADSRKRAIDKALKKLKEDVVDEYNEKVYKELKQYEKRLDEEKVYLYFMQNGKSLYTGKELNLNEPENLEIDHIIPYSLSDDDSLDNKALVLKKENQNKGNKIVKEAFTQSFSDSEMMDYWKNLKKAGLISEKKYNNLQKNNVDDILTKGFINRQLVETRQIVKSVANLILDXXXXIEVKASLSTSVRKMLTYEKKDNNGFWIENKDNCMFYKNRDMNDYHHAHDAYLANIIGLYIQKNYPRLQKELNYSQYRRIWRKYYENTKNNNGVNWFATLGKFSSNNEEADWYGQDIIAYMRKIFCYRDVLISKKVEENTGAFYSETKYPREDKAGSKLVPLKQGNNMRGANNLKELDTRKYGGYKGGEKAYFVLVKYCIEKALKKSVKKEYHMEFVEIPVYIARGIKNNDINLYDYVCDILNEANKNSVADVEILRNKVPKYQMIIGENGEEYYLVSATEVINSKQFVLGGANQQYNRLLNYIKYGKNDKWQYIQTELLDEQLIGLYNLLIAKIKDEYKGFSKEAVRIQENNSFDKLDVKDKKEFIAEMIKLVQPDSDYPYLGKYATGLSNRMGRKTGEKVGKKITLVDKSVTGLYERRTTFELEDDSSTKSC

SEQ ID NO: 6949 - protein, 1214 aa, unidentified
  REGION 1..1214: note = Description of Unknown: Cas Enzyme sequence
MARILGIDTGTNSLGWAIVDKDEKGYHLIDRGVNIFQEGVKIDKGIESSKASERTLHKSTRVRYYRIKLRKINLLHILSDNHLCPPLSHEELRDWRLKKKYPKTELFMQWQSTDDAAGKNPYACRHRCLHEVLDMDKLTDRYELGRAFYHIIQRRGFLSNRKEQDSDDSGKVKEGISDLTKEMEKAGCEYLGDYFYTLYNNKEKIRNHYTARIEHYHAEFKAICEKQRLPEDLAQQIEKAIFYQRPLKSQKKQVGKCVFEKNKAKCPVSHPKYEEFRMLAFINNIKIKTPEDATLRPLNAEERENIMPLFYRKSKPNFDFEDIAKKLAPKKMYGCIKKSKDAEMPYLFNYDMDTSVSGCPVTASLKDIFGDDWEQGIREVYTLGEGKSGSQIINDIWHALFFYSDTDKLKEFAQKRLQLDEEDAKKFSTIKIPSAYASLSLKAILKILPFLRRGLLYSHAVFLANMGKVVPQYIWELPETREGAIENVINEINRYDARTDSRTLEVCIKDYLKQQYGATDDALKELYHPSMTETYARVMPNELGEYRLGSPRLDSVRNPMAMRSMFRLRKLTNRLLAEGKIDADTTIHIEFARELNDANKRAALHDYQRENQNEKDKARKAIIDLYKEETGLEIVPNDKDILKYMLWEEQEHICLYTGDNISVASFIGANPKYDIEHTIPRSVGGDSTRMNLTLCDCRFNRETKKTKLPSELPNREEILSRISGWKREYEELETKIRKNKRATKGCSTKEQRDRMIRKRRLLEMQRDYWKGKYMRFTMQEVPEGFSRRQGADISIISKYARLYLQSLFHHVYTVKGIATSDFRKIWGIQEIYDKKERVNHVHHCIDAIVIACIGRDEYNKLGAYYHDEENSEWFGASKAHFDMPWPTFVTDMKSIQNELLVYHYTPDNMHKQGRRRILINGKKVMSKGDAARGSLHNDTYYGAIEHDGEIKYVKRVELASLNVAQLNVDSFIKSIVDETVREIIRKAIAEKGIKEAIAGPIWMNEEKRIPIKKVRCYMPSVTSPLHIRQHRDQSVKEYKRTFHVANDRNYMMAIYKGKDQKGKEKSEFELVNMLEAARYFKTSNDKEAADYNIVPIKSTSGYPLAYTLKIGTMVLLYENNPSEIWEGTKAEISRRLYKVTGLSKSTVKPYVYGMITMLYHEEARPQKELKPKKGEYVQNEAFRPIIIMSHRQINALVQGYDFEINEVGEIKRLR

SEQ ID NO: 6950 - protein, 963 aa, unidentified
  REGION 1..963: note = Description of Unknown: Cas Enzyme sequence
MEKAPGMDIGELGFDPGTFATALMTLEEFRSKDRVIWAGLDIGVASCGLCLVDVLNHEIVLMASHLFKSPVVDKKKASAAPESLASVRRGARSVRRNIMREGRRKKAIRAVLADAGLIPADAGGEWFSARRDERTVVKVRAKALKYPLNSRELARVLYSFASHRGYIDHGKSDKEDDAGKVKKALAANHAALADGECETFGQYLSGQPRSRNRAGDYSYTADIGMTVDEVRTIFARQRELGSEIATEALEERYIAELTWLTDTSKRDISTYLKVGFCTYLGAPYRRGAMSTISFEMVRAHQTLCNAVILHGDGSSSTIPGDVRIEIVRELFAVKKSVKPLKWSGLRRRLGLAEDDLFKGCPVEEEKRDCIALPAWAVLCSGLYVNHRNLLERLHDHVDDADAVCSALTFASSAASLAGRLAPLALTDDEVEAVVDLPYSARLFSGYASASLEALQMLRGTFEDPRIMNLRQAEEASGLAQVRAMLTEERGESSDGLLCAFSEYDPTCKNPVVLRATAQVRRMVNSAIRHYGLPDIIRVEVARDLKRSKHEREIVAEGNRARLELNEQAKRDIIEFFGLPDGHHVRGRDLAMVKLYREQGGKDPYTGSGIDFRRMLEEHGYAEIDHILPISRTCDDSQTNKVLCLTKSNRDKSNRSPFEWMASGEDSAPDWGEFCGRMERWANNCEPRRYARKKLANLTCENLAERAGDFIDRNLNDTRYMSAALAKWLRECLPFPKDDHEHVFCVAGGATALMRGVWGVGITGPDGRKNRDDDRHHAVDAAVIACCTPGIVKNVALVNEGHAGAEARLRLFRDSLPYPEFKEQVDAWIPCIVPTLTLPRTVTGSVLKDTVYPYLGRDEAGKDLYLTVKKDKEGRTVEKKVNKATTMWKDGQGGCRAYGSMCALDAVFDASAGKRGKWTFDPVYCIDIPQRDDEIRTMRVFSKEKAIDMWDTVEVPEDAPRMTI

SEQ ID NO: 6951 - protein, 951 aa, unidentified
  REGION 1..951: note = Description of Unknown: Cas Enzyme sequence
MEMDKILTQQGVYYKELRDNKELLLKMLTSKIPYYVGPLNNNSNGNRNFAWMTKKDGKENEKVYPWNVKDVVDIDVTAEDFITRMTNYCTYLPNEKVLPKESLLYQRYMLLEELSQIRIDGRKLSKEDRKAIINDLFIGKGRVKVSDKDFKEYLNKVNYVKVNGKGYDVTGYQSDDGFACALSSYNKFRRILGHIDEQNEKMIEDIIYWITVFEDKDIVKRKINKQYADRLSAEQLKKILKLKFKGWGRYSSKLLNGIKGDMGTTIIEMLEDADERFAYCDYCPNFMQIINKDEKIKQIIDDNRPRYDGTKDLLDVIQDMHTSPANRRGIWQTMKAIEEIIEYMGEKPQQIYIEFAREDDPKAKNKRADSRKRAIDKALKKLKEDVVDEYNENVYKELKQYEKRLDEEKVYLYFMQNGKDLYFPDKELNLDELEKLEIDHIIPYSLSDDDSLDNKALVLKGNNQNKGNKIVKEAFPQLFSNNGTVNYWKNLKKAGLISEKKYNNLQKNNVDDILTKGFINRQLVETRQIVKSVANLILDYYNEQIDVIEVKASLSTSVRKMLTYEKKDNNGFWIENKDNCMFYKNRDMNDYHHAHDAYLANIIGLYIQKNYPRLQKELNYSQYRRIWRKYYENTKNNNGVNWFATLGKFSSNNEEADWYGQDIIAYMRKIFCYRDVLISKKVEENTGAFYSETKYPREDKAGSKLVPLKQGNNMRGANNLKELDARKYGGYKGGEKAYFVLVKYCIEKALKKKVKKEYHMEFVEIPVYIARGIKNKDINLYDYVCDILNEANKNSVADVEILRNKVPKYQMIIGENGEEYYLVSATEVINSKQFVLGGANQQYNRLLNYIKYGKNDKWQYIQTELLDEQLIGLYNLLIAKIKDEYKGFSKEAVRIQENNSFDNATGLSNRMGRKTGEKVGKKITLVDKSVTGLYERRTTFELEDDSSTKSC

SEQ ID NO: 6952 - protein, 1368 aa, unidentified
  REGION 1..1368: note = Description of Unknown: Cas Enzyme sequence
  MOD_RES 1316..1319: note = Any amino acid
MEKKSKKIYLGLDIGTDSVGYAVTDDQYNLLRVHGDDAWGSVIFDAASLSDERRSHRSARRRLDRRQQRINLLQEIFAKEISKVDDRFFIRLSESYRWREDVQDRYVFFNDEEYTDVQYMGEYPTIHHLICELMNNKNPHDVRLIYLACAWLITHRGHFLNNLNVEKLDEIMDISSVYQNFINYFTENGYRRPWGEIDVSALSEVLKQKTGVTVKNKELQNILLEGKKPEKSGTEEFPFSQDSIIRLLAGGQCKLKDVFCKEEYLDLGSVSLGMDEEKFGEISGNIGEDYDLLIALRGLYDWSVLADILNGHSETISMAKVQIYEQHGKDLQILKYFIRKYVPDKYNEVFRKAKADNYVAYTGHMDKDTASQIKKKAKAEEFSKYVLKLMSPIKPEKIDLQSYEDMCERLKLNIFLPKQKNTDNRVIPHQLYEYELIQILKNASVYLPFLNDTNNGISEADKVLSVFRYKIPYYVGPLNEKSSFAWISRKAGKITPWNYKDMVDEDASENAFIRRMTNKCTYLPTEDVLSKDSLCYQKFMVLNEINNLQIDGLKIPVKAKQGIYHELFEKNKKVKRKDIEEYLIRNNYLDKDSTKLISGIDEQIHSGLSSYCAFFNLLNKKILSEDDVERIIERASYAEDKSRVIKWLRKEYPGLSEDDIRYIARIKIRDFGRLSKTFLTGLKGCDVSKGFDGQDVEMISILQTMWETNDNLMEILSDKYTFLEAVEAFTQEYYTGKKKSLKERLDEMSASNSVRRPVYRTLAVVKDIEKAFGKPDKIFLEMTRGGQADQKGKRIKSRKQQILDLYDKCKDDVHDLIRQLEAMGEYADSRLQSDRLYLYFMQFGKCAYSGAHIGFEQLMAGSVEYDIDHIYPQSYVKDDSLNNKVLVLSDLNGTKDNIYPVSPEIRGKMQGLWSWWNHVGAISDEKYKRLIRSAPFTDEEKMGFINRQLTETSQSTKFIADLLKERFPDAEVVYVKAGLVSDFRHEFDLPKSRSYNDLHNAADAFLSVVAGNVYDMRFSKKWFRIDEKYSVKVKTIFTHEVKCRGDIIWDGMPMLEKVEDTARKNTAHFVKYAAFKTGGLFDQNPVKKGTGLIPLKAGLPTEKYGGYNKAGVMFLIPVRYNIGKKSEILILPVELMHGKHFLEDKVFARNYTFTRLENILGKKVGEVSFPMGMRPWKINTMLSFDGFRVCLTGTGGRGKCLVAQPVMQFSADEHWRFYIKRLERFVEKIGINPDLLYDKDHDKVSKDENLKLYELYVDKLQNTIYKKRVNSPVQTLLKGKEEFKKLSIEEQCQVLLNIQSVFGRMTGGCDLTLIGXXXXIGGSAHSAATGSLSTTISNWKKKYSTVRIIDQSPSGMWEKSSENLLDLL

SEQ ID NO: 6953 - protein, 1002 aa, unidentified
  REGION 1..1002: note = Description of Unknown: Cas Enzyme sequence
MGRLVLGLDIGITSVGYGVIDIDNNQFVDYGVRLFKEGTAASNEERRTKRGARRLKRRKTNRLDDMRKLLKQNGLLSEKYVSFQNPYEVRMKGLTQKLTNDELCCAILHITKSRGTVLEISADASKDEETTKAVLSKNAALLKEHFVCEIQLERLEKEGRIRGIDNNFQTKDYLHELSTILDHQDLEDDLKQQILQIVARRRRYDQGPGSEKSPTPYGSYRIVDDELVHVNLIDMMRGRCSVYPNEFRAPKQSYTAELFNLLNDLNNLTINNEKISLDDKEQVIQFVNEKGNITVKQLCKLLNVTEDEIKGFRIDKNEKPILTEFKGYKKVLSIFKNHHLENILEDKTIVDEIMDINTKAKGVDERKESIQQMYPSLPEEVTNDLANMKGVSGYHSLSLKIMRELNVEMMKTEFNQIQLLHQLELHDKNRKSLKGMKKIYPDDEAILSPVAKRAHRETFKVINKLREKYGEFDSIVIETTRDKNSDERRKRLNESQKFNENINKQVNELLNQNGFESDHINSLTKLKVRLYLEQDGKTAYTQKDINLNLLINDPHAYEVDHIIPISISLDDSYSNKVLVSHIENQEKSNMTPIQTFLKGKFTGGSLEQFRSYVRNNKNMKSKKKGYLLSEKDITKFDNIQEFINRNLVDTSYACRTVMNTLQHYFKDNEIPTKVHTIKGQATNTFRKNIHLEKERDNDYYHHAIDALIVASLKKLNLVNSYLMKYDFDKLYDEKTGELFEIPEEKKYLDPEYISFVSTLKNIYEESYKHNLGLMKKEDMHYPLIKISHKIDTKPNRQISDETIYSTRNIDGTEMLVERIKNIYDPKEKAAIALINNIINNDTDKYIMAHKDPQTFEKIKEVVISHFNTYKDSKEYYTINKGKYELKSISPLTTYYEEFGPITKYSKKNNGPAIRSMKFYSEKLGNHISITNHYKTHNKKVIMKQISPYRTDFYVSPQGKYKFVTVRYKDVFYKASISKYVIDEKWYYNEKTRKGIEEDWKFV

SEQ ID NO: 6954 - protein, 1082 aa, unidentified
  REGION 1..1082: note = Description of Unknown: Cas Enzyme sequence
MGRLVLGLDIGITSVGYGVIDIDKYEFVDYGVRLFKEGTAAENETRRTTRGHRRLISRKATRLNDMKHLLKSLGIINGDFHSLDNVYEIRVKGLKEKLSNDELATAILHITKRRGSTIETVDDTEEASKETGELKEILQANSVKLADGKYICELQLELLDSGKSIRGHHNNFKTKDYIKELKEILSHQELSEEACEAIVQIVSRKRAYYEGPGSQKSPTPYGRYIEANQKEPIDLIEKMRGKCSVYPDEPRAPKLAVTSDIFNLLNDLNNLTYNGDKKITMDQKDEVFKIVTKKAKVEPKDIAKILGTDLSNISGFRIDKKKNPLKSEFKGYAKLKKCFKDCGETISLEDYEVLDQIIEILTNRKGIEERKQLLNLVNSSLITDETVEKLANLDGIANYHSLSLKAMRELNEEMYVSNYNQMQLIQQIHKGKDVSALKGKKSIEADDTAILSPVTKRAQRETFKVINALRRKYGEFDTIVVEMTREKNSADQKKSINNRQKFYEEKNKEVDKLLKENGYNPDKINGKTKMKVRLYLEQDGKSAYTLEPLSLGEVITNPRYTEIDHIIPISISLDDSYNNKILATANENKAKGNRTPIDAYNKHLFDNPTLGLSGDLQKYISVVQTSKRFSRRKKNYLLYKDDITKMDVVQKFIARNLIDTSYANRVVLNTLTDYFKANEIPTKVFTLNGNITHKFRTQINLPKDCEEDYLHHAVDGLIIASVKTMGLLNGCLAKYELKDLYDQNTGEVKKVPGKEEFFDPKYIEFISTLKNIYDESNKYYRGIMTRNQLAYAPIKISHKVDTKPNRQVADETIYSTRVINGEEILVQKYKDIYDPKFKNLAEDIVNGKAEDKYIMAKKDPATFEEITRIVLDHYETFKDDPKQYVKDKKGVKLKGENPLTAYKEEFGKIRKFSKKGNGPEITCIKYYAEKLGNHIDISKNYDTKHGKKVILKQISPYRTDFYRDTDGKIKMVTIRYKDVSFKESIGLYCIDRDWYQSEKAKKQISDEAIFLCSLHHDELVGIVKKEGQKYIYDDSTESDGDTKYHDGVTPEVVKFTATNNEVANKIEVKPLYTRTKKQFEYP

SEQ ID NO: 6955 - protein, 1033 aa, unidentified
  REGION 1..1033: note = Description of Unknown: Cas Enzyme sequence
  MOD_RES 1016..1019: note = Any amino acid
MTKPYSIGLDIGTNSVGWAVITDDYKVPAKKMKVLGNTDRKSTKKNLIGALLFDSGETAEATRLKRTARRRYTRRKNRLRYLQKIFAEEMTKIDESFFHRLNESFYVAKDKDYDKHPIFGNQGEEVAYHKDFPTIYHLRKHLADSSEKADLRLVYLALAHMIKFRGHFLIEDKNFKAENSDIQSSYTQFLQTYDSVFETNLSDEGIQVESILSDKISKSAKKDKILALYPQEKSNGRFAEFLKLIVGNSADFKKHFGLEEKTSLQFSKDTYEEDLENLLARIGDGYADVFSAAKRLYDVALLAGILTVSDNSTKAPLSASMIERYKEHEEDLAKLKLAVAKQFGKTSKEYKEMFRNSSANGYAGYIEKDVKQEVFYKYTESLLSKVDGSQYFLEKIKREDFLRKQRTFDNGSIPYQIHLQEMHAILRRQGEFYPFLKENQDKIERIFTFKIPYYVGPLARKDSRFAWAEFKSDEKITPWNFEEVVDKEVSAEKFIQRMTLNDLYMPEEKVLPKHSLIYETFTVYNELTKVKYINEQGKSFFFDANMKQEIFDAVFKANRKVTKEKLLNYLKLEFEEFRIVDLTGLDKENKAFNASLGTYHDLLKILDKDFLDDKANQGIIEDIIQTLTLFEDREMIRQRLQKYSDILTKEQLKKLGCRHYTGWGRLSYKLINGIRNKENHKTILDYLIDDGRANRNFMQLIHDDSLSFKDEIEKAQVIGDVDNLQETVSNLAGSPAIKKGILQSIKIVDELVKVMGHNPENIVIEMARENQTTQGGRNRSQQRLKRLQDSLKELNGDILKKYPTDNDALRSDRLFLYYIQNGKDMYTGEALDIDNLSQYDIDHIIPQAFIKDDSIDNKVLTSSAKNRGKSDDVPSIDIVRARRTDWQRLFDAKLISKRKFDNLTKAERGGLTDADKAGFIKRQLVETRQITKHVAQILDARFNTEVDENKKTIHKVKIVTLKSSLVSQFRKDFQLYKVREINDYHHAHDAYLNVVVGTALLGVYPQLASEFVYGEXXXXGSERKQRGLWESNS

SEQ ID NO: 6956 - protein, 305 aa, unidentified
  REGION 1..305: note = Description of Unknown: Cas Enzyme sequence
MRFFAKDNIKVDENGVIVWKKEDHIKNIRRVLSYPQVNIVKKVEEQTVGQNGGLFDNNIVSPKNVNPDKLVPIKEGLDAKKYGGYQKPTTAYPILLLTKDKQLIPIAVMDKKKFEKDSVNYLRNKGYKNVDNNSIVKLPKYSLVDVGDGVKRMWASAKEVHKGNQLIVSKNSQKLLYHAHHLDNDLSMNYLQNHKQQFDVLFDEIISFSKKCKLGKEHVQKIEETYKRKRTTVSIEDLSTDFITLLGFTKLGATSPFNFLGTKLNQKQYTGRKDYLLPCINGTLIHQSITGLYETRIDLEKLGEK

SEQ ID NO: 6957 - protein, 1391 aa, unidentified
  REGION 1..1391: note = Description of Unknown: Cas Enzyme sequence
MNLRNYPGEYSVGLDMGTGSVGWSVVDEKGNLLHFKKKPTWGSRLFDSAMPASEARVHRGQRRRYERRRWRLDLLQGLFKNEMDKVDPEFFMRLNQSRTIEGDPIFTKSFTKADYYDRFPTIYHLRAYLMESNEPADLRLIYLAMHNIIKHRGNFLREEEKSLSAKHADSKKAVTQFVDALKEWCFSRGYEFGKDPAKSIEKCLSDSKSSRSQLASEIAKALAVSTDAAAADKKLADNLAKAMVGLQCEFKYVFGEFDCESTKLALSDDEKLELLRAACPDDSAELLDALCAVYSAYVLQGLLSYAPGQTISHNMIAKYDLYKTDLKTLRALVREYAPGAYDEFFRGATYHDANPDDSSKDYSYADAEGYTAYNLHKLSYDDFAKAVKKLLGETDAVTDERYLNMMERFEKQQFLRRLKTSDNGAIYYQLHLEELMAIIKNQGRFYSFLKEYEGKFESLVSFRIPYYVGPLTSVNAAQDSHNHNRFQWSERKPGMEREVITPWNWDTIIDKNKSAENFIMRMTGDCTYLAGEKVLPKQSLLYEEFCVLNELNGVRWSDDGDDWQRFDAAQREGIVRELFHKYRRVTYKMLEDWLVREGDANHPIVKGGQGETGLESKMGSYLFFAKDIFGLGELSPAEYPAIEKMIKWNTLFEDRSILKEKLEDEFGERGNGMLDASQIKAICKKRFTGWGRLSEQFLTGLKVESPAGRAVSIMDVLREGNPCSERLQGETVVMMEALRDEGLGFQKKIDEHNRNYYGQHGKDLGVNELPGSPAIRRSLNQAIRIVEEIASIAGHAPANIFIEVTRGEDAGKKGKRTVKRWDKIGEALKKLKEEGVAVEVMDDFKEQKAINANLDERLSLYLMQNGKCLYSGKAINLEKLLAGSGEYEVDHIIPRAYIKDDSIENKALVLREENQHKTDQLLIDKSIRWKMRETWSQLHDAGLIGDKKYHNLLRSNINENQLRGFIARQLVETSQMVKLAQALLEARFANEETRIVPVKASMSHNLREAADLAKCREANDFHHAHDAFLASRIGLFVQMRHPGIYENPIGYSHVIKKYVQEQSEVFKKTHRMPGSAGFVINSFMSSGFDKDTGEVFKDSWDAEAEVDGIRKALNYRQCYISRMPQQDTGAFWNATVYSPRDPKMGPKLALSTKQGLDPKLYGGFSSQQFAYFFIYEAKKKGKPTFRFSQVPVWLAARIEANPLALEEYARGLAKGEGLEFVSIQRPKIYKKQLIEVNGDKLIITGAKEVRSGAELAFNQDEISAISMCSKLRAAEAGLDGAFSEEVSAIWNRISNAPVQSCGRLLRQLTLPKYQSNFDSSSNEEKAAVVLGLIALLNGNNRIVDLSGVGGSSHAGAMMMSYPKLLDDPKVPFFIIDQSVTGMFERKTRVGL

SEQ ID NO: 6958 - protein, 1054 aa, unidentified
  REGION 1..1054: note = Description of Unknown: Cas Enzyme sequence
MANLTADLEFSFDVGHSSIGWAVLQTKPALEVKGCGAVIFRADDCLASKRRDFRRQRRHIRSTRQRIRRMKALLLHLGVLTQKQLDTPGCAWPWKLAAQVLAGGESLSWPELWDVLRWYAHNRGYDGNRRWSGQSDEDTEDAEKVQNAHTLLDKYGVETMAETFCQHLGIDPLGAKSSSVIRFKGLNAAFPRNTVESEVRKILRAHFGKLPQLDEKLERMLAGKDNRDNEAWKTIPCPAIKLPQRYYGGLLFGQLVPRFDNRIISKCPVTGGKVPSRNTPEFLNFRWGMLLANIQVARLGNTGLQPLTPPERKKLDDRMRAVGSMTEKQFKDAIRDVSGAIRGNFDTMFMEVNQKEALILDPVQDCLTSGHAASLFPTLPAQIQKRARGQLRRGKTLILGEIGKDVPAFDAAVQKILDERAGKGRKKDKPLTREEILGVRLQAKRLSGRAAYARPILVKAFEEVMAGKHPKEEQDGYRGCLFVTEKMRETQLNRSLTDQTNNHLVQHRLLILGRLLGDMLKEYAGGDKARIGKLTIEVNRDLREFSGKTAKEIAQDLGSRLANHHHVAEKLEAALGKSRITAGLIRKARIAEDLDWTCPYTGQTYEPIDLVTRRVDKDHIVPRADRVSDSLESLVITFSAVNKWKGKRTAVQFMQDEQSKSVPDLPNLSVMSLTRYKDFVAALDIRRGHNDDQKRKKRRKELMLLANYDEPEFTPRDLTVTSQLVRLGAQVLRKAFDGCEDKPVIVSLPGAVTGEVRKAWDVLGCLSAACPQVLDETGKVKTKKEVRDLTHLHHALDACVLGLAAHHIPNNGRVWELITKRNLTTAEQAELVKLKVFSVVGERRAELNDLSPERKNQIRQRLAEKRVVQHIPKRVSGLHVEQNTWRVREINGDDVLLEQRIRQPDGKRPLKQASERAGKLMGLEPGKLHTLQGALVIGDNFGVALDPTPTVIPFHKVWPRLQELKAKNGGKMPRVLRNGQLIEIASGTFKGTWKVFSAKNNKTGMALDIGQPDVVRLKNKTEGHKINVLLSTLLKNGMRGLNAPLTGVAAVKTT

SEQ ID NO: 6959 - protein, 1381 aa, unidentified
  REGION 1..1381: note = Description of Unknown: Cas Enzyme sequence
MMKELKNYFVGLDMGTTSVGWAVTDENYEIIKKNGKALWGIRLFDEAQTAADRRMHRIARRRIERRSRRIDLLQELFAQEICKKDPGFYERLNESGLYEEDKTVHQKNSLFNDVDFDDKAYYKEYPTIYHLRYDLMTKDRPFDVRLVYLAVHHILKHRGHFLFDSFQIDENGASGFDESFAAFGNALYRIRGISLDVRGTDTVKDIFRNKKLGVKEKAKALLQALGKEKEKDFKAMMTLAAGGTALLSDILGEEGLKDFEKNKVSFSSAQFEENEPDIMAELGDRYDLIAALHGLYNWSLLAELMGNYRYISEAKKAIYNKHKEDLKVLKRMLKQNPAVYAKIFKEPGSKSNKNYSAYVGVCKVKGKKAAIDKCSYEDFAKTLKSCLKDLPDSKDTEYISRELEQGTFLPKSVTKENGVIPYQLHLQELKKILANAEKYLPFLKIKDAYGTVSDKIISLFTFRIPYYVGPVNEHANSCWAVKKDKKGKVYPWNFSEKIDVEKSAEGFIRNLTNKCTYLIGEDVLPKNSLLYSEFTVLNELNNVRIGENAQKLSPALKEKVLENLFMKHKHVSRRKFINYLVTEGIDKKEAESISGLDGDFKSSLSSLIDLTNILGNDFSREDGEQMIKDITIFGGDRKMLKSRLHREFPYLTPEQLTRLIHLSYQGWGRLSKELLVNLLPAEKSAGEVLVDKGSGEVLNIISAMEQTSYNLMELLSSRFGYATAIEERNREKEGNGTISYQDVEDMYISPAVKRPLWQALKIVREIVKILGKEPSKIFIEMARENGEKGKRTISRKARLQELYKKCRDDSRDWAKELAEKPEEDFRSDRLYLYYTQMGRSMYTGKPIDINQLFDRNVYDIDHIYPQSLTGDDSLDNRVLVEKTVNAKKGDTYPLGSALDGCHIGGQIHIQDIQKEMRPFWRMLLEKELISKEKYNRLSRTTPLSDTEKAAFIGRQLVETRQSTKACAELLSKAYPQARIVYTKAGNASRFRQYGGFIKVRDMNDYHHAKDAYLNIVVGNVFDTRFTSNPLHFLKGNHPVYSLNTEALYGHKVSRGGVDAWIPAEKDDEGHIMAGHEGTMGTVRKWMRKNNILFTRMPLEGKGGLFDQTIMKKGKGQVPLKGDSPVSDIEKYGGYNKASVAYFVLTKSKLDEDTVYTLETIPLILKAKMQTNKDQEVYIQEQWEKNGKKMRNPTVCLRHISIQSLLEINGFKVHLSGKNGKTFLLRNAEQLCMNDGDAVVLKRILKFNERANLSPKGTALSINPFDNIQEEDVNRLYHIFEDKLTNQVYKVKLSKQAAVLKKGEKAFNALTLEQKCKLIGEILHLCQCNVVNADLQLIGGAKNAGALTMNTQIYPKDHVYLIEQSVTGFFEKRILLAPYGEK

SEQ ID NO: 6960 - protein, 1050 aa, unidentified
  REGION 1..1050: note = Description of Unknown: Cas Enzyme sequence
MENKNLHYILGLDLGIASVGWAVVEIDEKENPLRLIDVGVRTFERAEVPKTGESLALSRRLARSSRRLTQRRVARLKKAKRLLKSENILLSTDERLPHQVWQLRVEGLDRKLERQEWAAVLLHLIKHRGYLSQGKNESKSENKELGALLSGVASNHELLQQATYRTPAELAVKKFEVEEGHIRNQQGAYTHTFSRLDLLAEMELLFSRQQYFGNPFASEKLLENLTALLMQQKRALSGEDILKNLGKCTFEDEYKAAKNTYTAERFVWITKLNNLRIQENGLERALNDNERLMLIEQPYEKAKLTYAQVRSILNLSDDAIFKGVRYSGEDKKAIETKTTLMEMKAYHKIYNVLKSNKLKAEWAELKANPTLLDEIGTAFSLYKTDEDISAYLAGKLPQPVLNALLLKNLSFDKFIQLSLKALYKLLPLMQQGLRYDEACREIYGDHYGKKTEETHHFLPQIPADEIRNPVVLRTLTQARKVINGIVRLYGSPARIHIETGREVGKSYKDRHELKKCQEENRKQREKTISEIKTLFPNFSGEPKGKDILKMRLYYQQNAKCLYSGKPLELHRLFEQKYVEVDHALPLSRTWDDSFNNKVLVLANENQNKGNLTPFEWLDGKNNSERWRTFKALVETSAFPYAKKQRILSQKLDEKGFIERNLNDTRYVARFLCNFIADNMHLTGEGKRKVFASNGQITALLRRRWGLAKSREDNDRHHALDAVLVACSTVSMQQKITRFVRFEEGNVFTGERVDRETGEIIPLYFPAPWELFREEVEIRIFSDDPKFELENRLPARPQANHEFVEPLFVSCMPIRKVTGKGHKETLRSPKKLNEKRSIKKERLIDLKLKDLEKMVNKEREQELYQALKEHILKYGEHSKEKFFKKGGAEVKSIRLWKTQDKYVKLNNGRAIADNGDIVRVDLFKKEKKYYAVNIYAWQVAKGILPQETTTGLFIDESYIFQFSLFKNDLVKIPNPNNKSEYLFAYFIRPDDEPRWILKLQDNAIIPDGFSKNEKNSFRFSFQNQSFIEKYHIDELGKNINLCKRSKRLDVR

SEQ ID NO: 6961 - protein, 914 aa, unidentified
  REGION 1..914: note = Description of Unknown: Cas Enzyme sequence
VGALLASRERRRNRADHTGAPRYDLCMLRSLQEDEVNILFTRQRELGNPLAGEDIRCRYAELAFAQRPLAPVSHMVGPCAFLEGERRAPRFAPTAELFRYVQALCTMRLRQETGEETPLSEEQRQAACAVFGSVQSVTYKKLRQVLRLPAGCRFVGLSYGVTGKGKVQDPEKADVVMRTGKCCQGTACLRGILGDAYDALHEQRLDEADAARLAATDALSAPAAALLARGMAGLRLTDALVRIVSELNDLGQIRAILALLPLPAPRIAALSQAAGEGKLGFFQGTARLSLRAMEAILPHMLACGEYAAACELAGFDPRAAQKTDVTDIRNPVVLRVFREVRRQFSAICREFGFLPGRVHVELLREVGKSGEERNRISRGLERRTKEKEAARKAVAQLLGKSPEAVSAGEVQRYELWRQQDGKCAYYMLWRHAGGERAYGNAMPQGSIPPAWLADGVNAVQVDHILPRSRTFDNSFHNLCLCCHAANQAKGGRTPWEWLGAAQPQAWHDFEQWVQSLPLKGLKKRNYLLRDLSAEVQGRFHARNLTDSSYVARLTLRWLEEEYARHDVPMQDAEGRTRRRFFARPGQVTDFLRRHWGVQALKKIGGQRSGDRHHALDALLVAACSEGMLQRMVRAFQREENGPERLHIPCPWQDFSTTVGRALGSVFVSRVERGRTKGPLHEETLRAIREERQPDGETRRVLYERKAVARLTVADLDRIKDAARCPDVVAALRRWLDAGKPGDDLPRSAHGDIIRHVRVRAGEFSSGVILQRGSGQAQAKNGGIVRTDIYSRDGKFYMVPVYAKDVADKRLPLRACVAHKDEKDWLELTEDYHFLFSLTPDCYVLTENRKGEVKEGYFEGPDRGSANISLSLAHDKKNTIRGIGIQNLKRFEKYRVDRFGRLSPVRREADPRGRS

SEQ ID NO: 6962 - protein, 1211 aa, unidentified
  REGION 1..1211: note = Description of Unknown: Cas Enzyme sequence
MTKILGIDTGTNSLGWAIVEKQADEYHLLDKGVNIFQEGVKIEKGIESSKAAERTAHKAARVRNYRIKLRKIRLLRILSDAHLCPPLSKAELSAWRLKKEYPKNELFMQWQATDDDSEKTPYAYRHKCLHESLDFSSITDRYILGRAFYHMIQRRGFLSNRKDQNGDETGKVKESISNLTQEMHDEGYEYLGDYFYSLYNKGEKIRNHYTARNEHYLAEFKAICEKQDLDKNLGSDVVRQIEKAIFYQRPLKSQKGQVGKCVFEKNKTRCPSSHPMYEEFRMLSFINNIKIQTPNDDVLRPLSPEERALIMPLFFRKSKKLFDFEDIAKKLAPKKQYGFYKKSFDAEMPYLFNYPMDTSVSSCPVTTALKDIFGDDWIDSLCETYTLAEGKSRLNVVNDIWHVLCFYTDDTKLAEFAKNRLQLNDEEAKKFCEISLPGDYASLSLKAICKILPYLRRGLIYSHAVFLGNLCEVMPQYEWDIEEMRNAAIDHIIHEMNLIDSKDARTFEVCIKEYLKEQYHVSEEKLKKLYHPSMMEVYPRVQRTNSHGVYQLGSPRIDSVRNPMAMRSMFRLRKLVNRLLEEGKIDSDTEIHIEFARELNDANKRNAIAAFTKENQNKNDEARKKIKNLFKAETGKDIEPTDVDVLKYVLWEEQGHICLYTGKQICISDFIGGNPKFDIEHTIPRSVGGDSTKMNLTLCDSRFNRDVKKTKLPTELPNHEEIMARINDWREKYESLDGQIRRQKKMSKGATTKDQKDAIIRKRHLLELQRDYWRGKYLRFTMESVPEGFSRRQGTDISVISKYARLYLKSLFKHVYTVKGIATSDFRKIWGIQKAYSKKERVNHVHHCIDAIVIACIGLDEYNKLGAYYHDEENHEWYGMSKAYFKKPWSTFVEDIEKVQDEILVYHYTPDNMPKQGRRRIMVEVKANGRRKKTKLLCKGDAARGSLHKDTYYGAIMQSGEDTPYYVVRKNVDNHLSDQDIKNIVDDVVRGIIQNAVAKGGKEALNGTIWMNEEKQIPIKKVRCITSVKKPLSFEHRKPRDISNKCYKNDYYVAPDDNYLMAVYKGVTSKGKVKYMYEFINMLDAARFYKQSNDKVLVDGNIVQLNKDGLNLYYTLKKGTMVLLYVDNPDEIWENNGDWSRRLYKVTELWKDGRIVVTKHTEARPSSEVPKVTKGFCVGDSKGLYSYSKFSALVQGYDFEINELGEIKRLK

SEQ ID NO: 6963 - protein, 430 aa, unidentified
  REGION 1..430: note = Description of Unknown: Cas Enzyme sequence
MWCDIMFSMKVRYKYRLRPGKQAERYLLAEWDACRYVWNRMVDESQARYERGETFGAAQAQKYLTFLRASKTDKDGGKWLAAHSCVPQQQIVRDYSQSRGKAVSDRKTSSRKRKAGMPRHKSRKTTLPSLNYRIGGFTLVEQDGKTRLKLPKGMIIPVVWSRELPSRPKSVRVYRSPDGHWYASFVVEVESKPLPETGHAVGMDWGVKTTASTVGLNLSTGEVFEDSPDDFPHMGFERARHRQVVRLQRRMARRHKKGVKYPNQSKGYKKARKQYRELCQRIAGQRLTVAHTWAKHVCERNDIIASENFKPKFLSKTNMARNAQDAAIATNIQILQWQAVKNGRKLIPVSPAYTTQTCSECGEIANPPIGLKVRTYRCQHCGMVNDRDKNAALNMLIRAGLVPEAHGTVRRHPGATPETHVPSKLRIPRL

SEQ ID NO: 6964 - protein, 1108 aa, unidentified
  REGION 1..1108: note = Description of Unknown: Cas Enzyme sequence
LTAKTNIRYRVGADVGLNSLGFSAIQLDANGNPTALLKTLSYIHDGGVDPTQNKSGTTRKAVAGIARRTRNMRKRRRHRLSQLDRQLCQLGYPVDEVPDCEQDLYEDWNTRSALATTYVSDKDRRDRMIVMAVRHIARHRGWRNSYSRVETLFEDVEPSDQYKDLKQRVETRLGVKLDDDMTPAQLVALTLSERNGKLVRLRTSTKYGEGVLPNRLMQSDNARELRRIFTVQQVPEDVWKPILRTVFHCASPKGSAEKHVGTDPLDLTQKRALKASIAFQKYRILNVITNLRIRRKGEASRPLTVSEKQDVYELLTTAKEDLEWLDVCAVLDIERNELKGVGTITHDGEERIGNKPPVLDTVIRLHGIKNTKLRKMVDAWWNAATEDEQAAMIRLLSNTVDLDKVRDLIEYASPIEFIDGLDEDLLTPLDSISLPVGRAAYSEKTLDRLSKRMLETEDDLHYAIRHEFDVPADWKPPVPPVQEPTGNPAVDRVLKAFNRFLSQCEQEYGIPESVAIETTKESFSSVAFGRTLDYERRQRRDKDNQMRAAIREDMRKQLSNGGSFKVHDYDIRRWEIVQSQNNTCLYCGATSPRFSFDKSELDHIVPRRGVGSDSKRTNMAAVCPECNASKSNVPFAVWVHSDYAKAHGITMNDVIARVNQLMFPPSMNRKQVGQVKKSIISRLKQTEQDEPLDNRSIESVGWMADELHRRLDGRYANKTVKVFTFPGSITYEARRASGIDGQIHFIGAQWKTRLDRRHHAVDASVIAMMNQSVALRLAERHYLRESQRLCGTPFGQADWKQYPNENTPGYVRYQQWSEQMKSLLNLLNKGLDEDTIPVVRSRRLRLGNSTAHDATVKPLQYVRLGDALSPTLIDHAITPQVWKALTRLPDYNPQTGLPANPNRVITALGEVCHAKDEIGFLPGNNAQLYVNGGAADIGGTIHHARIYRCEQVLKNGKRKTFYGMVRVFQCDLMKRRKNTDLFRPPLHPADVSIRYADSKVREAIALGNATCVARLTLNDEIKLTSELMEDMCLEYAHMFHTDSGAERRFIVAGFKSPTTLRLVPSFIASEGLSKLEESGVEIPKSVRSMLVPHLFCPAINKLGHILDE

SEQ ID NO: 6965 - protein, 1152 aa, unidentified
  REGION 1..1152: note = Description of Unknown: Cas Enzyme sequence
MKVAYATTRENGVYYDKVEHLGALPLSCFTVRQGYLRSMEKTGDNAMKKGQKHCHYTLGLDIGIASIGWAVLGNDEDGTPNRIIDLGVRIFDKAEVENTGESLAAPRRDARSARRRLRRHRHRLERIRYLLVQQGVLTQEEMTHLYDKSDMVSPYQLRTEGLDRLLNAREFSKVLIHLAQRRGYQSNSTAEEAKNEKENGIIKSAILENQQRMERGGYRTIGEMMYRDAAFWETINGIRYHCTRNKAGDYRFTVDRASILAEVSILFEAQRRLGSPWASVEMEDAYTAILASQRSFDEGPGNESPFRKAMSHNVGNCTLIPTEPRAARADYTAEYFKLLQDLNHMRLVDNSGSHPLTQQQRAILEEMAFRSANLTYGQLRKKLGLSDEVRFAGLYYGEDTIVKAEKRKWAQMQSYHKIRTALDKVSKNAIRTLTQDQLDAIGEILAGGVSDAKRIHSFCLEGIPEEYHKALLPLSISKRAKLSIAAMRKLIPFLQQGMRYDEACKAAGLDFHGADGKVEKLSDFLDEITNPVVRRAVSQTIKVVNAVVREYGNPDAVRIELAREMHHSIKERNRMKKRQEENREKNEQVKAQILETKTGNRVTGLDIVKFKLYQEQDGICLYSGKTMEIERLYEPGYADVDHIIPYSRCFDDSYSNKVLVLASENRQKGNRTPYEYFGANEQRWHEFSVRVGASVRDFKKRQKLLNTSFGEEQGKEFIQRNLNDTQHITRVVYNFLRNNLEFADSAYAKAPVQAVNGAVTAMLRGRWGIEKMRGNGDLHHCKDAVVIAATSRSMVQRLTDYYKEEERLFMGKTHFVDPATGEVLTRKEFQQRFAPKFPQPWDRFREELEARLDPTNPKEALMALNLSTYEFDPEEKIPPVFVSHMPKHTVTGAAHKETIRSRTETGTVVKTALTSLKLDKNGEIDGYYNPQTDPRLYQALVERLKKFGGDGAKAFAEPFYKPKKDGTPGPRVDKVKIERKSSLSVSTGRGVADNGRMVRIDVFRVPNERKPDDSYYFVPIYVADTKKATLPSKAVVGKKPPEAWKQMKPEHFLFSLFKGDLIYVESRKGISLALAEKATGEKTIQVKSDLFYFCGADISTGSIGMEIHDRRYTKRGLGIKTLTLIEKCQVDVLGNVSKVRLPETRLEFRGRK

SEQ ID NO: 6966 - protein, 1126 aa, unidentified
  REGION 1..1126: note = Description of Unknown: Cas Enzyme sequence
MTDRISLGLDIGVASVGFSVLDIDKGKVIELGARLFNATVAAGNQDRRDMRGSRRLLNRNKQRRKDVGNLFQKFGLLDNFDKDNFHAAFNNNWNPYELRVKGLTKQLTKEELAESLYQIIKRRGISYALKDVDANEDGTDYSSSLKINSQELVEKTPAQIQLQRLNDYGKVRGKVIVGDDIDDQKVLLNVFPTSAYEKEARQIIKTQQQFYPEILTDEFVKEYCQILTRKRDYFVGPGNEKSRTDYGIYKTDGRTLDNLFEELIGHDKIYPNELRASAASYTAQLFNVLNDLNNLRILGYEDGKLTQTDKENIIAEIKSNTTVVNMLNVIKKAVGCQKDDIKGFRLDEKDKPEISSMPIYRKIHKDMLKVGVDISDWPLEFVDRLSFILTLNTENGEIRKQINRRLVPDFDFLNDDLIQLIIDNKDSFDIKTNNKWHRFSLKTMNKLIPEMFERPVEQMTLLTEMGLIKKDTKRFENNKYLPYKEIASDIFSPVASKAVREALKIVNAVLKKYGHIDYIVVEMPRDRNLDEERKQIADFQKKNKKIKDAAFKDFVKAVGNERNVKIALSKNRKLQMGIRLWHQQQGIDPYNGEEIDASDLISNPDKFEIDHIIPQSISFDDGINNKTLCFASMNQVKGQKTPYEFLNEGHGQGYVKFKAMVSKNKNFSKAKRDNYLFEENVSNIETRKRFLSRNLVDTRYSSRVVLNSLQEFFHEKSADTKVTVIRGKFTSNMRKHWHIDKTRDTFHHHAIDASIIAATPFLRMWKKGSTIFPTKVNETSIDIETGEILDDKNFDKVMYEEPYSGFISEIMNADDRIKFSHQVDKKMNRKVSDATIYSTRIGKLAKDKKDAEYVVAKVKDIYSVDGYDNFKKVYEKDKTKFLLYKYDPRTFYELEKIIADYPDKIEKVQTNGKVKAVDISPFELYRRDHGMVRKYSKKANGPTIKQLKYLDKKLGSHIDITPHNANNKHVVLQSLKPWRTDVYLNHETGEYEIMGIKYSDLKFNKNEGYGIKKDKYLAIKKIEGVSENSEFMFSLYRKDRIKVQNIKNKDCVEVLFWSRSTSNKGYAELKRIESFDNDEEISVYGKGRLIKRLIPKNCKIWKTNTSILGDTYYLEKESNYPQKILD

SEQ ID NO: 6967 - protein, 1397 aa, unidentified
  REGION 1..1397: note = Description of Unknown: Cas Enzyme sequence
MARKLKNINGPWYVGIDLDGTSVGFVATDECGEVLYHKGQPVMGTRCFKEALHASEARMPRAARRRLQRARGREREMERVFAPAIAPTDPDFFIRRRMSYWLMREDIATDPAAAAWQVLLDGYPTLAHLDVDLMEADGPRDPRLIFWAIANHVVRRGHFLMEGNDVTSANSDPSAQVDALVRELDALGEACGEAIELDGGALAGMGGSWTARELQKAVSSAVSVTGDDIDAKIARAQAKALGDLVAGYKANMDAFALEGEQIGKISVSDADAIDEFLANCPNRLAPTIEAARGLYSAWRLQGLLSFAPGKTLSHNQVAQYEVYGRQLRTLKDLALKYIVHADSEDGPDEDGLALYRDFFGGPKRSGRRGYDKVLVKKLDGAKRNMGYTAYDLNVIPYEEFKKRVERLFKGTDAAKDPAYIDMVAALGEHRFLRRIHTADNSAIPYQLHAEVVGRIIDAQGNFYPWLKDAGAHILKVLTSRIPYYVGPLDSSAAPLDAHGKARFAWSRRLPGHERAFVVPWNYEEHIDTDAAAEAFIRRMTGKCTYLVDEDVLPANSLLYERFRFLNELAGLRYTEDGQDWMPLDAKMRRAVVDAASDGSVMTLNQIEGILSHDFKMAHPHVKGTSDAKRMTSRLSVSAWIAGLLGVKSLTAAQKSMAEDIILWNTVFEERSILKRKVAKEYGDILDEGAIEAFCAKRLKGWGQLSERLLTGVWVDTARGDMCIMDVLEQGAPHGRFRGTPMNLMQVLSDTELGFRAKIDEINAAALVKASELGIDGLPGSPALRRGVSQAMKVIEDMASVAGCAPVKVYVEVTRTASNKLKSKRPRSRAQEIEALLKALDEDARRDLDAARLLRELGTFDEREIDERVYLYFRQAGKSLYSGKPIDIARIASADYCIDHILPRSVRKDESLDNKALVMSAESLDRRGSTLIPQPVQRKMAPFWMHLRRVGLMSERKVTSLMRTQISERMLKSIVGRQMTERSQECKLLAATLETTYAGVRVVPVKAGVAGAIRRRAGIPRSRKANRYYHTHDALIALQTGRFIETRAPIWSNNRVFYERTMRDIEAQGRQGGADSELDFFTGGFFRDLVDFETGEVLWDADFERERLVRACSWKNLRVTFAPYEEGGAFWKQTVYSPRDSKTKLIPVKGDRDAALFGGYTSQTFAHFIIYESKGKKGRQFRFAPIPTAVADKATDSLVELYARSLCKESGETFVRIVRDRILKETVFEAYGERFRVKGLKAAGPVRQLALGAADIRLLRVVERMVDGEVPSPRRDLGSDVQVLCRLWARLLELAPTNFPRVSKVLKLVDLKTPEEVFADTKEEDLAKAVHAVAESEIQVVELLSGIRNNADVRPFGGSAFAGTIQMTFDKVINDPKAGFAIVDISAAGLHERITKIR

SEQ ID NO: 6968 - protein, 1142 aa, unidentified
  REGION 1..1142: note = Description of Unknown: Cas Enzyme sequence
MTTSKDYSLALSIAPDRIGYAAIDNNFKVIHRDRKRVVGVSKFTPGETAEETRLKRTSRRNTTRRRRRVGYLNDFFAPHLAKVDPDFLHRLKYSFINNEGLFSEPKLTAQYLQKYPTIYHLRQALMTEKRQFDLRLVYLAIHHLVKYRGHFLSDLPMASFAQDDALDLDVSLQTINSLLAADSATAMIELNADTKTGTQLKTLLLDKQVKKGQLKKAAVELLINGSEKGKLLKLEKQTATAVVNAITGDDFSIDQLYRPETPTGIKLNFGSETFDQDVLELGDLLTSERQAILQVLERMYSRLALERLVPDGKSISQAKIEAYDRYDQQLHVLKRFWLDADLKDYRILKDAYARYAGKKRNARPDKNLTREQFNDVVKKVLKQQRYQAVPAAQQLLAWIDADNFLVKQRIRENSAIPHQLIQHELDLIIDNQRQYYPFLAEPNPVEERRDEAPYKLDELIAFRIPYYIGPLTEAGQNRFAWMIRKPDENGTVNRQEITPWNFTQMVDQAASANAFIRNMTAHDTYLLAEDVLPKASLLYRRFKVLDELNTIRINGQQRLTVAQKQSIYRDLFMQTKTVTVKRLARYMVDQKWFKGTDADNHASLPTISGLTDPKRFVSSLSSYLDLRRILGSQADKPKHYRDLERIIEWSTVFPSGHIYKEKLNELHWPGVMERSQLAGLHYSGWGRLSNRLLTKLYDNEGRSIMDLLWQTNQNFMQIISKRVFQAQLQAENAAYLSNDTLDSVLDRAYLSPVNKKAIRQALYVINDVQKFMGSAPKTISINFVRQQQPLNTSNERKKKLQKLYDALPGEFIKQHKERCQKLKMALKQAKTIDDRLYLYFQQFGTDLYTGGSLNQDDLDLYAVSPILPLNLTNDDSMNNKVLTARKVDTAEWATVRTKRRRLWDDLARVGLLPVYKKNRLLQDSQHLSDADRLHLLNRALNEKSTVARFTAALLTDRYPQIDVIEVRQAMIDQLRRGWQMPRMPLINDYDAGMDAYLIGAVGQYLYQAYPKLRSFFVYGRYQRTPVDSELKNRQFIRRLRDLNLLYLLVAKRKPAALSKEREVMADQIAREARIVYDYHYMIVHQMATEFRGALFDATKVSHLKATDKFIPLKKGLPTTIYGGYAKSNMGFMTILRVEPSQR

SEQ ID NO: 6969 - protein, 1111 aa, unidentified
  REGION 1..1111: note = Description of Unknown: Cas Enzyme sequence
  MOD_RES 197..200: note = Any amino acid
MSRSLTFSFDIGYASIGWAVIASASHDDADPSVCGCGTVLFPKDDCQAFKRREYRRLRRNIRSRRVRIDRIGRLLVQAQIITPEMKETSGHPAPFYLASEALKGHRTLAPIELWHVLRWYAHNRGYDNNASWSNSLSEDGGNGEDTERVKHAQDLMDKHGTATMAETICRELKLEEGKADAPMNVSTPAYKNLNTAXXXXRLIVEKEVRRILELSAPLIPGLTSEIMELIAQHHPLTTKQRGVLIHYGIKLARCYRGSLLFGQLIPRFDNRIISRCPVSWAQVYEAELKKGNSEQNARERAEKLSKVPTANCPEFYEYRMARILCNIRADGEPLSAEIRRELMNQARQEGKLTKASLEKAISSRLGETETNVANYFTLHPDSEEALYLDPAVEVLKRSGIGETLSPSVYRLAANRLRRGKSVTPNYLLNLLKSRGESVEALEKKIEKERHQQANRKKAKKTDPDYAATPLKPRYATGRAPYARPVLKKVVEETLDGEDPTRPARGEAHPDGELKAHDGCLYCLLDADSSVNQYQKERRLDTMTNNHLVRHRMLILDRLLKDLIQDFADGQKDRISRICVEVGKELTTFSGMGSKKIQTELNLRQKSHTEAVNKLKRDLPGKALSANLIRKCRIAMDMNWTCPFTGERYGTHELENMEMEHIVPYSFRQSNALSSLVLTRKEVNKMKGQRTGYDFVEQEQGKPVTGRTNLHICSFNNYREFVEKLDDKKWHEDDRKRKKKRKALLMVRGLSHRHQLQNHDAMKEIGMTEGMMTQSSHLMKLACKSIKTSLPDAHIDMIPGAVTAEVRKAWDVFGVFKELCPEAADPDSGKILKENLRSLTHLHHALDACVLGLIPYIIPAHHNGLLRRVLAMRRIPEKLIPQVRPVANQRHYVLNDDGRMMLRDLSASLKENIREQLMEQRVIQHVPADMGGALLKETMQRVLSVDGSGEDAMVSLSKKKDGKKKKNQVKASKLVGVFPEGPSKLKALKAAIEIDGNYGVALDPKPVVIRHIKVFKRIMALKEQNGGKPVRILKKGMLIHLTSSKDPKHAGVWRIESIQDSKGGVKLDLQRAHCAVPKNKTHECNWREVDLISLLKKYQMKRYPTSYTGTPR

SEQ ID NO: 6970 - protein, 1200 aa, unidentified
  REGION 1..1200: note = Description of Unknown: Cas Enzyme sequence
MEKSKYILGLDIGISSVGWGLLELDDNDNPFRIIDAGSRIFSPGEETSGDSKAKARREKRGARRIIRRREFRVDRVRNLLYENKYLKGKVNENDVVSEKNNQLTNLYSNMIKEYYKKHHTNPYILKVEALDRKLTDEELCIILVHYAKKRGYKSNREDQNNDKQLGKVLSAIKENEKLMNEKHYETVSEMYVKDEKFKQKIKNSPDDYKISVTREMYEDEINKVLDKQIKFGLINKKFKQSYIEIWKSQRHYSKGPGGDSPYGGDLIEKMVGECRFDHEPRAPKRAFSSELFVGLSKLINLRYKTEETEYTSLTKEQIKKLLEQAKTKNDIKYTDVNKIIRKDSVKFKNLQLTKKEYIKVIEDLKAQLNISKDTRVDISNLNNEEKKLYDNLYNKALYNKKLFELEGYHKMRKVIEKTFGKEHWQEIRDNVELLDKLALLCTNYKTNDDIKEVIKKESIFPEKYNDDNFIIALPNFKDHLMLSTNIIKKLIPLMLEGKRYDEAMLSLNYKHSDLYSDKEKHDLLLPINAISTIKNQRVIRALSQARKVLNAIIKKYGLPQAINIETANELAKTKKERREIEKYQIEKQKENEIAKEHLVELGLFSSTDKVKGNDLLKYRLWKEQKECCGYSLKKIKIEDLFQNNLVQIDHILPYSRTYDDNYLNKTLVLTKENQDKKDRTPYEWFGNTKKWESFENFINSLAIPNKKKDNYLLKKLDLDTAREMREQNLNDTKYISRELSSLIKAYLNVEKVNMFSGKLTAKLRARWGLNRLIHSYISKTYIMPEEFKKEVKKDRDNHLHHAMDALIIASINTSLQQKITLYEKYSRYIDGLVKNKLENMDEEEYKKYNGTYYIDETGEVCEKEFKEYLKEEISKDHIHYGRHNIAKLEFPTPYENFVQEAKIRVYERDLNTMKENLKTLRTYSENNLKDLKVLTPSLAKTKMSGQLHEETYYGIKKLDDKIYKTLKVPVEKLKKRDLENIPDKKSGSKDIYNAIITWLGNNTTGQEALKANNGKYPINANDKEHKEIKKIKIYLPYKNTGHMINNSNVEKSGIYQIDILKSKNKEDKKLYFIAYDLFDIKQMNKKTKNKDFNVKLEYAQGENYILTTYQDMKEKYDIILKLNKNDLIKVTNKQGKQSIGYVVGASSGMIEIKSIIGDSYDLIGENNIFKKERTQYCITISTIQNIEKLKINILGEISGL

SEQ ID NO: 6971 - protein, 1121 aa, unidentified
  REGION 1..1121: note = Description of Unknown: Cas Enzyme sequence
MVYLSCSYNIPRTIRLLQKGRKPKSANGSFLEPLSFYLKKGKIMKYGIGLDCGIASVGFCITELDLNDEPKRIVRLGSRIFDKAENPKNGDSLAKPRREARGTRRRIRRHKHRLERIRYMLVRNGIVTQDELDTMFRGQLSDIYEIRTKALDEPISNIEFARVLINLAQRRGFKSNRKVDENTKDKETGKLLSAIENNRENIYKNNYRTVGEMLFKDERYLKYKRNKGENYLNTASSDMIADEIKKIFDSQRNFDVLFASEEIENEYTDIVMSQRPFDLGPGNGNEKSPSPYAGNQIEKMVGKCTFFPNEFRAAKATYSFQLFSLLQGINNITLIDNGGNTFTLSQQERSILKEYCFNTVNVTYASIRKKLGISLDYKFKNITYTQQGIEKSESKTKFQHLNAFHKMKKILGDSINTFSQDELDEIGKIFTFYKNDSKIIEQLENTSIDKSMYDLLLQLPSFSKTGHISTKACKMIIPFLEEGKTYNEACECAGIDFKAHSETSKQMYLPPKSYELDDIVNPVVRRAVSQTIKVVNAIIREMCNSPTYLNIELARELSKSKKERDEIDKKYQLNKAANDKIKAEIVEHFNIEPKGQDIIKLKLYYEQNGRCPYSLDPIEYERLFEIGYVDIDHIIPYSICFDDSYNNKVLTFSSENRQKSNRIPLDYLPESKHSDYRVWVNSTIRNYKKKQNLLKESFTEKDRKEFKSRNLNDTKYLSKVLYNYINDNLLFDDFLDGRKRHVISVNGSITAYMRKRWGIDKIRENGDLHHGIDAAVISCVTQGMINQISKYSFYKETEFDIDRQTGEVIERFPLPYSEFRNELYARSQISDEKYLKSILLRLPNYSYDDVETAKPAFVSRMPRHKVTGPAHEDTIRSGKVEGYTISKVALTSLNLKDIKENYYKPESDTLLYNALLQRLVEFDGNAQKAFAEEFHKPKADGTPGPIVKKVKILKRSSSNVPARNENKLGVADNGSMVRIDVFHIEGDGYYFVPIYVSDTVKSTLPDLACSQSKSGWKKMDDKDFVFSLYQNDLIKITSKKDMKFTLVNKDSTLPTIKYGNKLLLYYEGADISTASINGITHDNSYKFKGCGIKTLVNIEKFTVDTLGNISKVKKEKRMYFK

SEQ ID NO: 6972 - protein, 1090 aa, unidentified
  REGION 1..1090: note = Description of Unknown: Cas Enzyme sequence
MTKNYSIGIDMGVNNVGWSILNNDTKKLENYGVRLFPTSNDAKERREVRNTRRRLKRKETRLDDTLYLLKKYGFNEDNTIEENLIEKRVKGLNEKLEKQDIVNILCYMIKHRGYIPFGDEEVTLVDLNGKYPCEFYYEMYKNGGKYRNRKMTVRITDNEKEIKKILETQSKYYKNINQDFINEYLNILTRKRKYWEGPGSINDLTPFGRFKTQEDVENYLEEKRKNPSYEKYIYEDLIKKCDYELEERCCCKLNIYYELFNMYQDFINVSFKNIEELENKDCFYETKNGLYKLNKKGLLMVKDYCMNNFKLKYTDILKKLFNTDKDNISGYRIDKDHKPEFSTLNSYRKIMLEFTEKGFDTTWVSDYNCYNEIMEKMTLTPGGVEFIKEIENNKLVPYKFNEEEKSLFKELKEYFNKKTLLSYGSLSQKILQKAINDMLDLEKNFMQVSRIKDYGKEARENFIKQYKKTSNKLEINASFVDDIIASPQVKKSLRQAIKIINAIIEKEGCLPVSIAIESTKELNSDKKKKEIEKEQKIQENLRKQASNYLSVVFGDSNATETNILKIMLYNETNGHCAYCNKPLNINDIFTDNIQVDHILPISKSFNDSFNNKIISCKKCNDDKKNNTPYQFLKNKNYFEEFEKRVLENKNISDYKKDNLLYKDDLDKYKTRFFNRNLRDTAYATTELINQIEIFNNYLEILDKKRINTLSVPGQITSSIRNRYVKNEDKKSLEKNRDAGVFHHAVDASIVVSVSDTHIGQIMLKAQNDKEYWIKNKSNYDDIYKYLINLRIDDTINQIEKINNENIKVSKQVSKNPQGKLANSNIYKMIKKDNEQYIINQIDNIYTFDFKKDENKKLFEKLLNEENNEFTLLCYDNDKNTFNYIKKIYNEYKNEKGNPFVNYLIDKGEISDGNSLDYDITGIRMITKKGNGPIIKRLRYYSKKNDLYILNKKNINKKDSNYLALDSLKQFCVKVYVDNDNKKFVFLPIYTISLDPKTKKVNENGEFYKLFYNKYIGNKNVTFFADIYNGNKLEITKKDRTIVSGYYSTFNKANNKLILNNGDTFTLSDKKISIIHTDILGNEKKRLTKEL

SEQ ID NO: 6973 - protein, 1098 aa, unidentified
  REGION 1..1098: note = Description of Unknown: Cas Enzyme sequence
MRKKIRYVLGLDIGIASVGWAVLLLDGEDNVCGIVRAGVHTFDEVTVGKEKITATANRRGYRSGRRLVRRKAHRIQRVKSLLQEMNIVSKKDMDEYYSGAVEDVYFLRWAAIQDEPVYILNNRELAQLLIYFAKHRGYKSTAVHEQEDEDDKKVLSAISENKKYMHEHGYRTAGEMIYKDAKFRQKRCGSSEENELLVARNSEGNYSNSISRDLLVEEVRIIFEKQRELGNTLATKELEERFLSIMQSQRNYDEGPGEGSPYGGNLIEKMVGECTFEKGEKRACKASYTSERFVLLEKINHLRICTADGNERPLNEDEKSAVIKLAYKTKVVKYNAIRKELKLDLEERFGGLTYSKVNNGDFKQRILDTEKKSDFISLKYWHEVKDILNLSYKDLTEEQKQLMDSVGKVLTYYKSEEKRREELSDLSLNQAQIEKMLKLNYAKFHNLSFKAMKKLMPEMEAGYSYMESCLRVGYDSLSTDGVKTKYISKELLNEAVDKIMNPTVKRAVRRTVRILNEIVKLYGSPVEIHIEMARDLPHSGEVKKKIATAQKNNNKEKKEAIKFISENFGKTESDIRRKDILRYRLWKNQSQMDLYSEKLIPVEDILDYEKYEVDHIIPYSRSFNDSFNNKVLVKKKDNQDKKNHTPHEYIGHDDEAWNKFVKMVNNYVLSPGKRKNALTKSSDSDEWRSRNLNDTRYTTKVVADLIRRHLVFEPYFNGARNKHVYPLNGGVTARLRHEWGLEKDREKSDKHHAQDAIVIACCTEKMIWKMSNIYKQEELGGVVRKGNKLVDRRTGEILETTALPWKWFREEVEMVMADHPEDYIERAKDRGYMGDIPKPIFVSRLPVKKKTGVISENTIRVVDEASSRTVEKTSLDKLKLIEVNGKKQIKDYYRPEDDVLLYNKLLDRLIRYGNAKDAFAEPFYKPKKDGSDGPIVKKVKLYVGVADDQVKVRGRGEDIDREGVKDRGGMYRCDIFRKDGKYYMVPVYYKDLYLHRMPTKAVVAHKETADWKEMDDKDFLFSLYPDDLIKVQKKNKEIENGYYKTSDRYSAGISYVQHDLGAKSYVRLCIQNLAIFEKLNVDILGNIYSCSKEEREWL

SEQ ID NO: 6974 - protein, 1209 aa, unidentified
  REGION 1..1209: note = Description of Unknown: Cas Enzyme sequence
MKKDYILGLDIGISSVGWGLLELDDNNNPYKIIDVGSRIFTPGEVEKTGDSRAKERREKRGARRIARRREFRLDRVKNLLYENGYLKGNINSNIVSEKNEELSIIFNNMINNYYNGKNTNPYILKVEALDRKLTDEELSIILVHYAKKRGYKSNREEASDKESGKVLTAIKENEKIMKDNNYRTISEMYIKDDKFKNKIKNSPNDYKISVTNEMYLEEINKVLDSQIKFGLITDDFKNQYLEIYNSRRSYAKGPGGNSPYGGDLIERMTGKCNFDGNPRAPKRAFSSEIYVALTKLVNLKYKVNDGEYIKLSEKEIKNIIEKAKEKKSISYKDLTKMIGNNIDFKDLTLSKKEYIKLIEELKKKLNIKKDTKININELSSEDKELYNKLCNDKLLSKTLIELKGYHILKDSVIKAYSKDIWDEVKDNMYLLDDLALYCTNYKVNEDILNKIKESENIDNIFNDIHFVELLPNFKDHLMLSTELIRKLIPIMYGGNTYDKAMNILGYNHSDINGDKEKKDLLVPICVDDNITNQRVIRSLTQTRKVINSIIKKYGMPKIINIETARELAKSRQERNEIAKNNVEKQAENEKIKNQLVELGLFVSTDKISSTDLLKYKLWKEQNEFCGYSMKKISIEDLFGNNIVQIDHILPYSRTYNDNYLNKTLVYTKENQEKGNRTPYEWFGKTDKWDEYETYINNLTISQKKKDNYLLKKLDFDTEREMRSQNLNDTKYISKELSSLIKAYLNVEKVNMYPGAITAKLRARWGFNRLTHSYLSKNYILPKNIKEDINKDRDNHLHHAMDALVIASITPSLQQKITLYEKFSRYIDGLTELQIKNISYIKIEDSEGQYYNDDTGEVETIDIREYIKQQLAENNIYYNRHNISKLEFPLPYENFDKEAKLRVYEQDLDTLKWNLKSYNTYTQKDIDNVHTLIPSIAKTKVSGKMHEETYYGIKEIGKDEDKKIYKTLRTPIEKVKRKDLDNIPDRLGGSKDVYESLVEWFGDYEVGEEVLKANGNKYPVSKSDKEHKEIKKLKLYSEYKNTGHMINKSNVEKGGIYRIDVFKSKDKEDDKLYFAAYDILEIKKINTLKEKNRVDDNFNIKLDYGQGKNSKIMSYTDIINNYDLYISLNKNDLIKITTNDGKESVAYVVGCSSGMLEVKSKLGDGYDIIKTDLNENNIFSKQRAQYQITVSTIKEIKKLSISVLGEISGL

SEQ ID NO: 6975 - protein, 1105 aa, unidentified
  REGION 1..1105: note = Description of Unknown: Cas Enzyme sequence
MKYILALDIGIASVGWAVLDKESETVIEAGSNIFPEASAADNQLRRDMRGAKRNNRRLKTRINDFIKLWENNNLSIPQFKSTEIVGLKVHAITEEITLDELYLILYSYLKHRGISYLEDALDDTVSGSSAYDNGLKLNAKELETHYPCEIQQERLNTIGKYRGQSQIINENGEVLDLSNVFTIGAYRKEIQRVFEIQKKYHSELTDEFCDGYMLIFNRKRKYYEGPGNEKSRTDYGIFTTQLDANGDYIKKANIFEKLIGKCSVYPDELRAAAASYTAQEYNLLNDLNNLTINGRKLEENEKHKIVERIKNSNTINMRKIISDCMGENIDDFNGARIDESIFHKFEVYNKMRKALLKIGIDITDYSREELDKIGYIMTINTDKEALMEAFQESSIGLPEEVKQCLINMRKTNGALFNKWQSFSLKIMNKLIPEMYAQPKEQMTLLTEMGVTKGTREEFAGLKYIPVDVVSEDIFNPVVRRSVRISFKIFNAVLKKYKALDTIVIEMPRDRNLEEQKKRIKDSQKLNEKEMEYIEKKLAVTYGIKLSPSDFSSQKQLSLKLKLWNEQDGICLYSGKTIDPNDIINNHQLFEIDHIIPRSISFDDARSNKVLVYRSENQKKGNQTPYYYLNHSHGEWSFEQYKATVMNLSKKKEYAISRKKIQNLLYSDDITKMDVLKGFINRNINDTSYASRLVLNTIQNFFIANKADTKVKVIKGSYTHQMRCNLKLDKNRDESYSHHAVDAMLIGYSELGYEAYHKLQGEFIDFETGEILRKDMWDENMSDEVYADYLYGKKWANIRNEVVKAEKNVKYWHYVMRKSNRGLCNQTIRGTREYDGKQYKINKLDIRTKEGINVFSKLAFSKKDSDRERLLVYLNDRRTFDDLCKIYEDYSDAANPFVQYEKETGDIVRKYSKKHNGPRIDKLKYKDGQVGSCIDISHKYGFEKGSKKVILESLVPYRMDVYYKEENHSYYLVGVKQSDIKFEKGRNVIDEEAYARILVNEKMIQPGQSRTDLENLGFKFKLSFYKNDIIEYEKDGKIYTERLVSRTKNQRNYIETKPIDRDKHENSKDGRKIIGLSKTKLVKKVRIDILGNKYSCSEEKFTNLLT

SEQ ID NO: 6976 - protein, 1123 aa, unidentified
  REGION 1..1123: note = Description of Unknown: Cas Enzyme sequence
MKKYTIGLDLGINNVGWAKYDLETKKVIDKGVVRFKESSTAQDRRIIRGSRRLRKRKQHRVERLAIQLSNINFCTSRSYEPELLNKRIKGLNESLSEQEITNIIYWFAIHRGYIPFDEEKPEREVHKFAEDEYPCQYIFDYYKEYGVYRGQCDLISLKDNLKELKQILLTQQKYHSKLTDEVIDNILYIIQSKREFWEGPGASKENQLSPYGRYRTLEDLEKYKADSTYHQYLYEMLIGKCELSIDKDGFMDQVAPKCNFYAEEFNFYNDFINMSVKEPSQIDEEYRNKITLKGKFTKDTIEEIKKEILNTKTVSLEKLVKKVLGLELKDIQGYRIDKKYKPEISKFEFYKYLLKSFKDKKLNPHWLENDDKTIYNQIIYILTVAPSTYAIEDMLKDRVKEVEFKKEEIDVLIDIKKKKNPDLKYHSLSERILKKALDDIKRHNCEYNFMQIMKRLEYEKEMKEYFQNNYSTKTQSPYTIEDQYIDHLIANPQVKKTLRKAIKVINAIIKKEKNYPETIVIESATSLNSKERKKQIKAEQKKYDKLNEEAKNELEANGYEATDKNMQLLINWKETNESCIYCGESISLKEVLTTEIEHILPKSKSMDNSHNNTTCSCLKCNKEKNNRTPYQYLTSENRYEGFKNRVMNQYDKMSQDKKSNLLFEGDIDKYSIKFINRNLRDTSYASVALVQELKKYNEYLGAKEGYKINIITSPGQLTSKIRQYLKIKDKDRTYLYHHVVDAMILASIPDTEIGKVLIEAQNDSQYWFKDKNKENKYKEEVYNMLNHVWLSNRDQIQKFNQDCDNMPEDNKDGLIKRSYEVLKNPIQQFSQYTEYAKYIKQDDGYYKILQVDNIYNLLIRKKDGSVDKDKQLLDELFDLSNKKTISLLCEKKDPKLYQKLKDIYIKNASSINPFVDECKYMYGLEEGDKFNYLKQGIRKTDNPNSPLVIRLRYLKRVTNPYIKNNITTRRKNVYNEFTINKPKKDTIIGLDGLKQVSTRIFYSYDDKKFIFLPICAISFVNGKLNKKEKNYQTTYNRLIGNKNVKEIGNIYTGEWVGVYKKNGEYLEGRYKGYHKTSNVLEYYINGLDTLSCVKICSSDLRIIIYTTDILGNRHIRLDTQKEI

SEQ ID NO: 6977 - protein, 1394 aa, unidentified
  REGION 1..1394: note = Description of Unknown: Cas Enzyme sequence
MKHILGLDLGTNSIGWALVKERENENEQSSITRLGVREIYLTADEQSNFEKGKSITTNADRTLKRSMRRNLQRYKLRRNSLISLLKDYGFITAETLLNENGNRTTFETYRLRAKAVTEEISLEELARVLLMINKKRGYKSSRKAKSNDESGQLIDGMEVAKKLYDDNLTPGQYVLSLLRKGKNNIPDFYRSDLVAEFDKIWNFQRQFYPDVLTDSLKEELKGKGDKETWAICSKPFAIEGIKRNIKGWEQKKEDYAWRAESLQHKIDLERLAIVLQKVNGQIKNSSGYLGAISDRSKELFFNKLTVGQYQMAELDKNPNFSLKNQVFYRQDYLDEFERIWETQAKFHKELTSELKHIIRDIVIFYQRPLKSQKGLISLCELESREIEIERDGKKTKKTIGPRVCPKSSPMYQEFRIWQAINNLQVSGMVVADNQVDLFGKTIGKKFGKRFLEQEEKEILFKELNFKSKLTKKEILKLLFENYKELDLNYNEVKGNTTMAALLEVCSKIIEMSGHGEYDFSKMSADEITGIVFPVFSGLGFSTDIFSFDSSVEGKAFDKQPSYMLWHLLYSYEGDKSKTGNESLISKISECYGFDKEYAAVIAGISFEPDYGSLSVRAMHKILPYMKDGLGYSDACQYAGYRYSKRSLTKEEIEARPLKDKIDLLPRNSLRNPVVEKILNQMINVVNAVVDTYGSPDEIRVEMARELKKTKTQREETVKAIRKTTAENEKYKKELEEEFGLKNVSRNDIVRYRLYLELKDNGFKTLYSNTYIPREKLFSKEFDIEHIIPQAKLFDDSFSNKTLEARSVNLDKADSTAYDYVKVKYGEDGLEKYKEKINQLCEKKIISKTKLKRLLTTEKDIPDGFINRDLSNTQYIARKACEILEEITRRVVPTTGSVTSRLREDWQLVDMMKELNWDKYDKLGLTEIIEDKDGRRIRHIKDWTKRNDQRHHAMDALTIAFTKPAFIQYLNNLNARSDKGGSIYAIERKELYRDNKDKLRFYPPMPLDEFRTEAKRHLENILVSIKAKNKVVTRNVNITKAKKAEKGKRKRIQLTPRGQLHNETIYGRIRQYATKEEKVNASFTEDKIMTVACKRYREALLVRLRQHDGDAKKAFTGKNSLAKTPLYTDSLHTETVPEKVKTVMLAPLYTKREAVSPDLKIEKVIDIGIKRLLQKRLEQYEGDMQKAFSNLDENPIWLDEEKGISIKRVTISSVSNAEALHDKRDNRGQLILDKDGKKQPTDFVQTSGNHHVAIFRDADGNLQEHMVSFYEATARAIQHLPIIDKEYNKDLGWQFLFTMKQNEYFVFPNEETGFNPKEIDLLNPKNYALISPNLFRVQKLSSKDYVFRHHLETKVEYNKELFGVTWKRINTLSKIKDIVKVRINQVGKIEDLGEY

SEQ ID NO: 6978 - protein, 1433 aa, unidentified
  REGION 1..1433: note = Description of Unknown: Cas Enzyme sequence
MKKILGLDLGCNSIGWALVNEAENTEEISSIIKLGVRVNPLTVDEMQNFEKGKSITTNADRTLKRSMRRNLQRYKLRRDTLIEVLKEHGFITDSTLLSEHGNKTTFETYRLRAKAAVEEISLEKFARVLLMINKKRGYKSSRKAKGSEDGVLIDGMDVARKLYEEGLTPGELCLQILEAGKKKLPDFYRSDLQNEFDRIWNFQKQFNPELFCDAVKEEVRGKNRSQTWAILAKFFVWSEKESVWNEKEARTEERVKEYKLVGLKRDTKGNELKLENYRWRVQALSEQLNPEIVAIVLQEINGQISASSGYLGAISDRSKQLYFNRQTVGQYLMSELEKDPNVSLRNRVFYRQDYLDEFDRIWEKQAEFHEELTVELKKEIRNIIIFYQRRLKSQKGLISFCEFEKREVVVEEDGRKKNKTVGCRVIPRSHPLFQEFKIWQTLNDIEVFAWDKQSKCKKADKSSILFDNSEDALLVEGKRFLYQEEKELLAKELFVKESMKKAEVLKLLFENYQELDLNFKQIDGNHTGFALFSAYSKMIEKYGYEPVDFKKSADEIIEKLETIFTNLGWNTELLSIDLSKEDKELERQSYFRLWHLLYSFEGDNTPTGNGKLLEKIMQLCDVEKEYAVELANVSFQEDYGSLSAKAIKKILPYLKEGNQYDVACDYAGYRHSRSSLTKDEIENKILKDKLEILPKNSLRNPVVEKILNQIVNLINTLIDTYGKPDEIRVELARELKKNAKEREELTKSIARNTREHDEIRQLLRTEFGMMNVSRNDIIRYKLYEELKDNGYKTLYSNEYIPREKIFSKEIDIEHVIPQARLFDDSLSNKTLEYRAINIEKGNKTAYDFVKEKYGNDGLEKFLNRCETLFKDKRTKLRKLKMEEKDIPEGFIDRDLRNTQYISKKAFAMLNEISRRVVATTGSITDKLREDWQLVDLMKELNLPKYEKLGMVEMFEDKDGRKIKKITDWTKRNDHRHHAVDALTVAFTKDVFIQFYNNKNAAWMPASKEHANITGIKARYFENGKALAPMPLAQFRAEAKRHLENLLVSIKAKNKVITSNVNRTKNKNGENRKLQQTPRGQLHLETVYGSHRQYATKIEKVNAAFDAAKIATVSKLAYRNALLKRLEAFGNDPKKAFTGKNTLEKNPLYLDENQTEMVPEKVQTVEFETVYTIRKPIDPNLSIDKVVDVKIRSVLEKRLKEYGGDAKKAFVNLDENPIWLNEAKGISIKRVSIRGISNAQSLHEKKDKDGNLILGKEGRKIPVDFVNTGNNHHVAIYKKPVLDKVGQVVLDEEGNPKYELDEVVVSFFDAVTRANLGQPIIDKDYRRSEGWQFLFSMKQNEYFVFPNEKTGFNPKEVDLLNPENYALISPNLFRVQKFAYKNYVFRHHLETTIKDTSSTLKGITWTDFRSSKGLDKIVKVRVDHIGQIVSIGEY

SEQ ID NO: 6979 - protein, 1352 aa, unidentified
  REGION 1..1352: note = Description of Unknown: Cas Enzyme sequence
MTAFKYYLGLDMGTNSVGWAATDPEYRLLKAKGKDLWGIREFNEASGAVERRTHRISRRRKQREQVRIGILKDYFHDAICEVDPSFFQRLENSKYHEEDKDVEVRYKNNIFNDGNYTDKDYFNEYPTIYHLRNELISSTEKHDVRLVFLALLNMFKHRGHFLNAGLGENNGESNIDNAYFELTELLSELTEYHLSQDIDCKQIEAILSRRDMSRTHKAEELAGVLHVDLKNKPYKELIRGLCGLKFNACVVFPDVQSEEVTKLDICLSESTFDEKSDEIANIIGEDYFEIIMAMKEMFDIGSLASIMKGHNYLSQARVASYTKHKEDLKLLKEVIKKYCGKKEYDKFFNSDADGSYASYVGSYNSKNKERRVGNKRTSEELYKEIKKLLKDAQKEDENIQKILTSIENETFLPKQLTASNGVIPNQVHAREMKKILSNAENYLPFLTEKDETGLSVSERILKLFTFQIPYYVGPTSENSGKNGGNGWVVRREDGQVLPWNIDEKIDMKATSEAFISRMVRRCTYISGEQVLPKASLEYQSYCVLNEINNIKIDGERISVELKQDIYKAVFQKGKKVTKKQLCKYLHTRGIIETEEQVTGVDVSINNALTTYGKFKPIFGEDISKDSVQKMIEDIVFWCTVYGDSKKFLKDRIEEKYGNKLSEEQIKRILGFKFKDWGNLSKKFLELNGADTSTGESISIIRALWNNNLNLMELINSSLYNYKECLAEYQNTMLKTLSEIEAEDLNEYYFSAPVRRMIWQTILVIKELVKVLGYEPERIFVEMTRKPDEHKTRTSSRRNKFEELYKKVKDETTDWMQVIANAEEDGKIRSKKMYLYLTQKGRCMYTGKHIELDDLFDNNLYDIDHIYPRHFVKDDNIDNNLVLVCKEKNAHKSDHYPIEEEIFLSQKKMWLELRKSGFITEEKYNRLMGRSPFSDEQKAGFIARQLVETSQGTKGVANILRQLLPGSKIVYAKASNVSEFRHTRDDIPKSRLVNDFHHAHDAYLNIVVGNVYYVKFTQNPLNFIKKDYDKYKEDYNLSKMFDWDVKRNGEVAWIAQRKDGEAGTITTVKKMLSRNTPLMTRYSFEGKGGLANETLYSAKKAKGEGYIPFKSSDDKMQDVTKYGGFTKVTGAYFFLVEHTEKKKRIRTIESVPVYFVQKIEKNPGELKKYCEEILGLVDADIRLKKIKIGSLIKRNGYFCYITGKTGNRLSVRNAVNLCLKNEWIKYISKLEKVKEKDTIDEIITKEKNEVLYSELIQKFKHCIFSKRPNPVGDKLEKGSEKFSNLSIKDQCAVLCQVLRMAAILGSECDMTLLGESSICGEMKISKKIGDEEIYLINQSVTGLYEKKINLHTV

SEQ ID NO: 6980 - protein, 1377 aa, unidentified
  REGION 1..1377: note = Description of Unknown: Cas Enzyme sequence
METKFTYYLGLDMGTDSLGWAVTDSSYHILRAKGKDLWGVRLFPAAETSVDRRTYRVNRRRRQREVARIGALKELFADEIEKVDPGFFVRLDESKFHMEDRSENNKQKYGLFADKLFSDAEYYKKYPTIFHLRKELLESEEPHDVRLVYLALLNMFKHRGHFLNSSLQIEGENSNIAEAYQMFVDTLKDEELDFPEQVSGERLQEIFRSSDSRKKKVENLLAEMNLSKKQKREIQFVNLICGLKGKLSELFPDKEYDEEQKKIAFSFQDSDYEDKENTIQELLDESEMNMIYAVKAVHDSGVLSGIMNGERYLSVARVASYEKHKKDLQILKDVLKKYDIKEYFEMFRNESAKSESYSAYVGSVKYHGTFRRGLSGGKQEDLYKHIKKVLGKFPQDDEGVTYILEEIETESFLPKQLTASNGVIPNQVHAREMLAILKHAELYLPFLQKKDDTGLSVSEKILKLFMFQIPYYVGPLGQEYKDKKGYNVWAERKEPGKIYPWNFEEKIDVKKSAEKFIGRMVRRCTYLSGEQALPKQSLLYEKFQVLNELNNLRIRGEKIPVSLKQEIYHDLFGDGKKVSMTRLTNYLLQNGVISSEEKDSCISGIDGGFHNSLSSVGKFKGVFGDTVHTDEHRKMIEDIIFWGTVFGDGKKLLKEKVEEIYGNQLTEAQKKRIFGFKFSGWGRLSKAFLTMEGASKDDREIKGLIQAMWDTNCNLMELLSERFTYKDKLNEMVTTAEKPLCEWKIEDLDEMYLSAPVKRMVWQTIRVVDEVQQIMGCPPKRIFVEMTRSDGEKGKRTVSRQKKLVDLYKALGKEGKIWSEELNNTPEGQFRIKKLYLYYLQMGKCMYTGESIELEPLMNDNHLYDIDHIYPRHFIKDDNISNNLVLVKKERNAHKSDSFPIEPEIRNKMMPFWKSLRKKGFLTEEKYNRLTRMSAFTDEEKAAFISRQLVETSQGTKAITQIFEQAFANSEIVFSKASVVSAFRQKFDCYKVRCVNNYHHAHDAYLNIVAGNTYRVKFTSNPLNFIKEAKKNPNSRENRYNMDKIFEWDVTRNGETAWVAQTKENPGTIQLVKKYLNKNSPLITKLAHEKHGGITQKVTIFSAKKAESGNTDAYIPVKMNDPRLSDVTKYGGVTTIAVAGYTLLEYKAGGKTVRSLEALPIYLGGSKNLTEEQMVEYFSNVLQQENKKKVVSDVNIRKKMIPMGALIKYNGFYYYLGGKTNADMYIRDAVQVCFAPKDMEYIKKVDKAVSNNDYSEKDNGVGTTVLTKEKNVSLYKNICEKYALTIFKKKKGTIKTIVQKGKEVFEHDLTIEEQCIVLRNLMLNFQTGDSVDLHLIKGSAATGTMKLNKKVSNAEELKLIDQSVTGVFSREIDLLTI

SEQ ID NO: 6981 - protein, 1498 aa, unidentified
  REGION 1..1498: note = Description of Unknown: Cas Enzyme sequence
MNPKRILGLDLGPNSIGWATILETDNSKTIESAGSRIIPMDAAKLGDFEKGNPQSQTNERTTFRGTRRLRERHLLRRERMLKVLHLLKWLPEHFEQGIDFSNNGAKFLQDKEPKIAWQPTTDGRYEFFFKEAFREMLADFARMQPALVEEGKKIPYDWTLYFLRKKALTEKIRLTELAWLLLNFNQKRGYYELRGETEEKTDKLEEFYSLKVVKVEKSDEKSKGNPWYNIHLENGWIYRRQSAQLLNWEGKVRDFIVTTDLNPDGTPKLDKEGNVKRSFRAPNEDDWNLKKKKTENEISISGKAVGEYIYDTLLQNPKQKINGSLVSTIERKFYKEELRRILETQSRFHSQLNDSFIYEECLKLLYPSNEAFRKNISGKNLIYMFIDNILFYQRPLKSKKSLIANCEFESYSFVKDGKTQTVPIKCIAKSNPLYQEFRLWQFLSNLRILQRTKEVDGKLSVDVDVTGEFLPDNEAWANLFDILNDRKEIDQKTLLTAVGINKKKQAEYRWNYVEDKKYPCNETRHLLLSRWNKAGLDKAMLTQKLTMELWHILYSVEAKDESKKALSTFAHKNGLPENEFVEAFLSAAAFKKDYGAYSRKAIKRLLPLLRRGKYWSAENIDTKTKTRIENIIDGVADDSINERTREKLTAFSDISQFQGLPVWLASYVTFNRHSESDEQTKWNSPDDIDTFLKNFRQHSLRNPIVEQVVTETLRTVRDIWRKYGQIDEIHIEMGRDIKQTAEERKRRSAIIQKNENTNIRIKMLLSEFFNEGNDVENVRPMSPIQQDKLRIYEEGVLNSVDGIQDNIETILKKFNESDPKKQPTKAEIRTYRQWLEQNYVSPYTGQPIPLSKLFSSEYQIEHIIPRSLYFDDSFSNKIICESAVNGRKSSMLAYNFIKECGGEIVQLGNGKSVRILKVEEYEQLVKRVFASNRKKQQNLLATDIPDDFSQRQLTDTRYISRFLLALLSNIVREKDEKGQYESTSTSKNVIPCNGSITDRLKKDWGVGDVWNRIIAPRFERLNGIYGDKQFGDTVTVDGKQFFRTQIPLELQRSVNKKRIDHRHHAMDAIVIACTSRQMVNYLNNSNAHDQDKRIDLRNAVCDKIKIDANSSHYLVKKPWPTFTEDMTYTLSQMLVSIKQNLRIVNRCSNRYQRYENGKKVTVRQTKGEMLAIRKPLHKDSVFGQVNLRSVKTVSLNVALENPSRIVDKQLKTLVRQLAAQQMSVKQIADYVKKQTDFDVKKVDVYIFSNETNTPLVAIRKPVDTSLTQEKILKSVTDTGIQKILLRHLEANDNKPEFAFSPEGVEEMNKNIVQLNNGRFHQPIYKVRIYEPKGLKFNIGTTGTKATKFVEAAKGTNLFFAVYLDSDGKRNYASVPLNIVVERLKQGMSPVPETNENGDRLLFHLSPNDFVYVPTEEELESGRVNMPIDNSRIYKMVSTTKSECHFIPYFIASPIVQTKELGSNNKSERSWDNIMIKSVCIPITIDRLGQLSIASTLIR

SEQ ID NO: 6982 - protein, 1086 aa, unidentified
  REGION 1..1086: note = Description of Unknown: Cas Enzyme sequence
MQYWRLGLDIGTNSIGWARIGLQQNEDSSAFLPVCILDMGVRIFPDGREPAGTDKKTGLPKIGKSLAVARRAARGMRRNRDRRLKRIRAFAAKLIEVGLVPPTGASLDPKYQKGRIDLTIDPYAARANAASASVAKGELARALFHLCKRRGFLSNRRTDSADKESSERTVAMNGLAAILKQRKQTLGQYLHARRMSGQHVRFRGQEVEILNEAETAIYPCRSMYEDEFSAIRTTQGNRYLTDEQWDDLFDIYSFQRPLLPKEPGVCTFEHGRNGRARHLRASRHLPITQTFRIVQEVNNLRYITETGEQSLSLQQRQQVCAALEKQKSLSFGKIRTLLKLPKTSRFNLESNRRKNLDGNVTACDMRALFEANDSNWDVLSAAVQNDIVQAVLDAADEKALIAKNRESGWNLPEGLLLALSNKHYSSAHGHLSRQCMQKLLPLMAEGRQYWQAACEVYGDHTDYSQFATGEVLDQLPYYGEVLQGATAPVSITSHTPEEERTYGRIANPTVHVALNQLRKLMNALVARYGHPYSIHLELARELKTAGKRYQDLLKKLAANTSQNANRIKLFKEIFPGTEPTRNDLLKVRLWEELAASADHMVHIDVYTGRPISFTQLFSAEIEVEHLLPFSRTYDNSSANCTVTFREVNRRKGGDKLPYDFALGDKQIDPQAMLARAQNLRSANKRWRFQPDAASIYERLITKNMTTAERQRYEVDKDGSFIDRQLVDTQYISRMAARYLVPLVGDPARVVPVNGYVTGMIRARWNINAFKDKGGAAERNDYRHHAEDALIVALADRALIKRIADATRARQEASADYRARLKFPERPAWATDAEIFRAACGINISFRQNHQRQGKFYQETAYGLLKKDDPLYKKGYTAVVRRELMKLKESEVEQIRDVAVRAAIYNFLNKPEICAMTNWEAKLGRLYNEGLIIGTAQKPVRVRRVRILVKNQSIVAVPDAPYKGYAPDAVAFCDIWQTPDKQYKGAFVGYALAVRYAGNEDALHEATKPHPAARKIMRLFKNDMVMLTDKNGNEQLFRVAGFSTTNDRIDIRPHTENSSKQNSKSIQKLIEESSMRKVNVTVDGIIF

SEQ ID NO: 6983 - protein, 1397 aa, unidentified
  REGION 1..1397: note = Description of Unknown: Cas Enzyme sequence
MWNPKKGDYENSLFEPCSVISYGNQLRYFYYKQIDFFCQEWRGTKMNKKYYLGLDIGTNSVGWAVTDENYNLYKYAGKRMWGIRLFEAADTAAERRMKRSNRRRLSRKKQRIDLLQELFSKEIAKKDPTFFIRLNESGLHLEDKSTGEKYPLFVDKEYTDIDYHKEYPTMYHLRKELIENPEPHDIRLVYLACHHILKNRGHFLINGSISDVKNLSFVCGEMIKEFNSVSEYEISLTDIRELERILSDKKTAKSVKAKQVAQLFECTPAEDKEQQKCAKAIITNLSKLIVGLKGDISKMFHQPLEEISTKSFKFTEAKYEDEIMPAIEENYPDYASVIDRIKGVYDWSVLVEILDGEDYLSFAKVKAYEKHGKNLHILKNIMKKYCKDEVYQAFFNGINEKNGYGNYIGAIRKNGHTYKMDRCKSEEDFYKGLQKILSTIVPDQEDEELLEKLKAEVENQTLLPLARSKENGTIPNQVHLQELMKILDNAKEYLDFLKKEDEYGTIAEKIISIAKFRIPYYVGPLSRRHKEEGSNSWMIRKEEGRIYPWNFGDKVDVEQSNKEFIERMTNKCTYLIGEDVLPKNSLLYSKYMVLNELNNLKIRGNKISVELKQRIYKDLFCTMAKVTGKRILEYLKMEDPEIVQEDISGFDIDFKSALTSYLDFKKQVVGNEIEKDHYKEIIEEIIKWKTIYDDDSKMMRRMIEREYPEVFDKEQIKKICQLKYSGWGNFSDRFLNGVRGADKETGESYTIIEALLKTNYNLMQLLSKQFSFKEEIDQINAEKAGDVGKINYENTVKDLIVSPSNKRAIWQTIQIAEEIKKVMKCEPERIFIEMARGGEKEKKRTVSRKTRLQELYAGCKDDTRNWMKEIGDREEREFNSRKLYLYYTQMGKCMYTGDEIDVDALMKGNSNWDIDHIYPQSRIKDDSLDNMVLVRKDVNNKKRNKILSPKIREDMKGYWTMLCQKGLISKRKYDRLTRTTDFTDEELSGFIERQLVETRQSSKAVAELLNRLYKDSEVVYVKAGLVSDFRHDNDLLKSRRVNDYHHAKDAFLNIVIGNVYHARFTSNPRKWIKDNRDSNYSIRRVFNYDVKQGDKIVWHGSENGGHSIDQIKKIMSRNDILYTEYTYCEKGQLFNETLAKKGNEKAIALKKNLDPVKYGGYTTPKTSAFAFVEFDGKKKERKNHIVEIPVYVVNIAKREPDAVKKYLEERKGYSNVVIKKYPIKKNSLIKMDGYLARLRGGDDNRIEIKNAVQLILNKNIYEIIRKTEKYIEHNQQYEVNSEFDGFTEEDLYKVYKELCLKLKNSIYKKRPVQQLKILEQGVEKFKSLESLKDKAKIINELLVMFRCDATTEMNLKAIGGASSAGRMRVYKNTLASKQLKLIYQSITGLFETEEELI

SEQ ID NO: 6984 - protein, 1379 aa, unidentified
  REGION 1..1379: note = Description of Unknown: Cas Enzyme sequence
MQKSKNCDYYIGLDMGDASVGWAVTDTNYNILKFNGKALWGIRLFDSANTAASTRVFRSGRRRIDRTTWRLKMLQELFAEEIAKVDPGFFMRLEDSRLHLDDKRDKAVYNLFVDKNYTDKDFYQQYPTMYHLRYALATQAVPFDVRLLYLAVQHIAKHRGHFLFDNLDASKVNDFNAVFSEVENYVRDEMGIEDWSCQNIDELAKVLCDVNLGRTTKQKAMQSLLPAQTKQQKAIIQLFSGGKAKLAELFVDEELDECEKNSVSFQDDDLNEFEPVLTAALGERYEGLLRFKAIYDWSLLAKILHLDTSKKDEDEQHLLSECKVQVYEDHKRDLAVLKSMLKGKPLYNKIFRQDGDISYEKYAKGIKGRNQIDFCKDLKKQLEGIAEYKKIMQEITNIDDAKTEEERLLFRITNGFAFPKQTTKDNGIIPIQVHLAELKCILDNAEGYLPFLGETDNNGLSVREKIEQIVKFRIPYYVGPLAGTRMSREQGRCWVVRKNEKIYPWNFTEIVNLEESAEKFITNMTAKCTYLVGEDVLPKESLLYSEFMVRNAINNITVDGERLPVDVLEKIFKQLFLAKTSKVTKKTLERFFRQENISFQNIGGIDDKINASMKSYNDFRRIFGEDYIQLHRDEIENIIRWITLFCDEKKMLVTKIKNTYPQISDDEIKAIKKLKYKDWGRLSATLLNSRAIGYEDKAVGEIITIISALRHTNKNLMELLSNYCPYDFIGKIKDFNGSRQSSNGKLTYKDVEELYVSPSVKRSIWQTLTILEEIKKIMGCEPKRIFIEMARSKEESKRTDSRLKKLQDLYKKCKEENIDFMPRKDEFNALKTQLSSKKEDDLRSDKLYLYYTQMGRCMYTGERIELASLYDNNLYDIDHIYPRSKTKDDSLSNRVLVKKQVNAAKTDTYPLDAAIRIKMHSFWKLLYDKGFIDERKYERLTRSTQLRDEELAGFISRQLVETRQSTKAVAAILKTAYQNSEVVYVKAGNVSDFRQQFKFVKCREVNDLHHAKDAYLNIVVGNCYHVKFTANPLNFITKNQDNRRYSLKPEIFYKFSIKRDGEIAWLGGEDGTMATVARTMHKNNILFTRQPLEGKGELFKQNPLKAKSGQLPLKAGLSVEKYGGYDSLTTAYFALVKSEGKKGSVQLSIEGIPLVYAKQGEKAVQDYLTEVVQLCKPEIKIPKIKKYSLFKINGFPMHISGRQGKQLIFYVAGQLCINEDSIAYLKKAFKYESDLAVNEEILADENGDEVRKQKARNRLAFYDNTWGISLEANMQLYDMLLAKSANNLYKNRPASQTSTLKEQREQFSILPLSKQIHVIKEILKLFKCASATADFKLLEKGSTCGKIQVSTNITKCKQCILINQSPTGVFEQEVDLMKL

SEQ ID NO: 6985 - protein, 1498 aa, unidentified
  REGION 1..1498: note = Description of Unknown: Cas Enzyme sequence
MKHILGLDLGTNSIGWAVIRAHQDADGHTTLQDILAAGSRIIPMDAATLTDFDKGNARSGTAERTSFRSMRRRRERQLLRRERLHRVLMLLGFLPQHYANSLTRYGEFADNRECKLPWVKDESDGKYHFLFQDAFHEMCEDFRQSAPQWVADGKKVPYDWTLYYLRCKALSRKISKEELAWILLSFNQKRGYYQARDEEDEVTTNKLEEYYAGKVVRVDDTGERKGKNVYYDITLENGWVYRYAARIYPDWVGQVKEFIVTTTLNPDGTPKTDKAGEVKRSFRMPKDDDWTLIKKKTERDIDRSQETIGQYIYHALLKDPSQKIRGKLIGTVERKYYKDELRRILDRQIQFHPELRDRELYYACLQELYPSNVAFRNTLVNRDFTYLFLDDILFYQRPLKSKKSQISDCPYEEHFYTDKETGERISVPVKCIAVSHPLYQEYRLWQFIQNLRIYCREARINGNLMIDWEVTDELLQTEEDKTALFDWLNDKESVKQPELVAFLLGGKANKKQIKAYRWNYMDDDTKGYPCNETRASLLKYLREAQTDPSFLTREREEALWHILYSISDKGELKSALGKFAVKHGLDERFVTVFSKFPPFKKDYGSYSAKALKKLLPLMRMGHHWQEASFIPSTRQRMEKFINGEYDDSIDKRTYGKLESLTEVSQYRGLPGWLACYVVYDRHSEGRDIERWTSPSDIDSYLAQFKQHSLHNPIVERVVLETLRTVRDIWKQVDHIDEIHIELGRNMKLPADKRRQMTEQAWKNEQTNLRIKALLLEFARPGYDIENVRPYSPYQQDQLRIYEEAVLGANECPDDISAILKKFNGLNPPTSAEVLSYKCWLEQKYRSPYTGRTIPLSKLFTPAYEIEHIIPKQRYFDDSFSNKVICESEVNKKKGAMLGYEFIKSYHGASITLNRGGTASIFSVEAYENFVKEHYAHNRGKMKKLLMDDVPDSFISRQLNDSRYISKLMKSILSNLVREEGEKEAISKNLIVCTGGITDRLKKDWGIHDVWNDIIFPRFKRLDEMDSSHTYITLNTHRHPIPSMPLEFQRGFSKKRIDHRHHAMDAIVIACATRNIVNYLNNESARHDAKTSRMDLQRLLCTANRKLIDKPWKTFTQDTCKVLEDMIVSFQRTLRIINKTKNYYLRFEDGKKRRVLQTKGDNWAIRKPLHKETFYGEINLRRIETLSLNKALERIPDIVERDLRKKLSELLSLGYNAKRIKGYFEEHKEEWSDVNLSKIKAYYFTKQKNKRYFAARTELDTSFNKDKIENKIADTAIQKILLQHLEAYGNDAEQAFSPEGIDTMNRNIRQLNGGRSHQPIYKVRVYEEATKFAVGRRGNKSTKFVEAAKGTNLFFAIYEISQVDGNGNRQTSRTFSSIPLNVAVERLKQGLPPVPEDEEGNAPKYVLSPNDLVYLPTERELKRREIAMPIDKSRIYKMVSCTGKDCFFIPANTAVPIVDRYEYSSMNKIGRALTGEMIKEICLPLKIDRLGQIIEISTF

SEQ ID NO: 6986 - protein, 1508 aa, unidentified
  REGION 1..1508: note = Description of Unknown: Cas Enzyme sequence
MKKILGLDLGTNSIGWAVINSLVDDEGKEKLTSISSCGSRIIPMDAATLGDFDKGNAKSSVAERTRLRGIRRLLERSLLRRERLHRVLSVMGFLPEHYASQLDRYGKFLPETEPKLAWYKDNTGSYRFLFQDSFNEMLEDFRLYHPELVAEGKKIPYDWTIYYLRKKALSQKIAKEELAWILLNFNQKRGYYQLRGEEEQEDNKKSVEYYALKVVAVEDSGERKGKDIWYNVKLENGWIDRRASSVPLDWTGKVKEFVVTTDLDDAGNPKKDKDGNVKRFFRAPKENDWGLLKTKTQTQIDESGQTVGAYIYDSLLRMPDQKIRGKLVRTIERKYYKDELRKILLKQTEFHAALQDHNLLLSCIEELYPNNEAHRRLLSSSSFTYFLLEDILFYQRPLKSQKGLIDDCPYESHVYRDKKDGSLHRTPLKCISKSHPLFQEFRLWHFLSFLRIYQRERMIDGSLKLDVDVTNEFLQNEDDYVKLFDWLNGRKEIDQKTILAYKPFGLKKNEQPKYRWNYVEDKSYPCNETRADMISRLSKAGVSEGVLTEEREEALWHILYSISDKKELTKALGTFAEKNGLNEAFVEQFSKMPPFESNYAAYSLKAIRKLLALMRMGKYWNEQDIDKQTRSRIEKILTGEYDETIRTRVREKAIHLTDISSFRGLPLWLACYVVYNRHSEAKELVKWETPADIDYFLSKFRQHSLRNPIVEQVLMETLRTVRDIWKQEGQIDEIHVELGREMKNPAKERARITAQALENENTNLRIKALLTEFMNPEFEIENVRPYSPGQQEILRIYEEGVLSGVAEKDLPEDIISILKKFRENDVKKRPTTSEVLRYKLWLEQRYRSPYTGRIIPLGKLFTPAYEIEHVIPQSRYFDDSISNKVICESAVNKLKDNCLGYEFIKKHSGEIVELGNGEKATVFTSEEYEHFVKESYLGNGKKMKKLLLEDIPDNFIERQLNDSRYISKVVKSLLSNIVCEEGEQEGMSKNVIVCTGGVTDRLKKDWGVQDVWNRIILPRFLRLNKMTDSTDFTSVSTNGHLLPALPLHLQKGFNKKRIDHRHHAMDAIVIACADRNIVNYLNNASARKGSEISRYDLQHLLCDKVKTDSNGNYKWMLRKPWDTFTQDVYTALTNIVVSFKQNLRVINRTTNYYQHYNESGEKKMIPQVKGDRWAIRKPMHKDTVYGEVNLRREKTLPLKDVLNNPSIVVDKSLKSKLHELLKAQYDLKAITKYFEAHQDVWADINLKKIKVYYFTKETNERFFATRKSLDSSFNQKKIQEEVTDTGIQRILLRHLQLNDNNPDIAFSPDGIERMNQNMNILNDGKGHQPIYKVRTYEKAEKFAVGEHGNKVKKFVEAAKGTNLFFAVYESIQEDEATGKQVRKRTFATIPLNEVIKRKKQGLSVAPEDSNGNLPIFVLSPNDLVYLPTEEERNSGKVTQPLDRERIYKMVSCTEGECHFIPSCVASPILQTIELGSNNKAQRAWSGEMIKDICVPIKIDRLGNVSINY

SEQ ID NO: 6987 - protein, 1502 aa, unidentified
  REGION 1..1502: note = Description of Unknown: Cas Enzyme sequence
MRKILGLDLGTNSIGWAVINSNIDSEGKEQLLGISACGSRIIPMDAATLGDFDRGNSKSPVAERTRLRGVRRLLERRLLRRERLHRVLSVMGFLPEHYASQIDRYGKFVTGTEPKLAWYRDVTGKYRFFFQDSFNEMLEDFRQHHPEFLDGGKKIPYDWTIYYLRKKSLTQKISKEELAWILLNFNQKRGYYQLRSEEEQDNDKRKVEYCILKVVSVEDSGERKGTGIWYNVLLENGWVYRKISSVPLDWVGKVKEFVVTTDLDDSGNPKIDKDGNVKRSLRLPKEDDWGLLKVKTQTMIDESGQTVGAYIYDSLLHMPNRKVRGKLVRVIEREYYKREICMILEKQKEFHPSLQDHDMLLSCIEELYPNNLEHRKMLSTSDFTNFFVNDILFYQRPLKSKKNLIDNCPYESRVYKRDGIFYNAPLKCVPKSHPLFQEFRLWQFLSNLRIYQREKEVDGSLKIDVDVTNDFLRTEKDYVELFDWLNEKKEITQSTLLAYKPFGLKKSEQSKYRWNYVEEKSYLCNETGAEFRIRLKKAGISDDFLSKEKEEALWHILYSISDKQELVKALGSFAVKNALNQNFVTEFSKMPPFENSYGAYSLKAVRKLLALMRMGKYWNREAIDEHTRERIEKILAGEFDENIGNRVREKAIHLETIDSFRGLPVWLACYIVYNRHSESKDTVKWQNPADIDSYLENFKQHSLRNPIVEQVVTETLRIVRDIWKQEGRIDEIHVEMGREMKNPAKERARISAQTLENENTNLRIKALLVEFMNPEFEIENVRPYSPSQYEILKIYEEGVLGEIAEKDMPADIVSILKKFKESDVDKRPSRSEILRYKLWLEQKYRSPYTGRGIPLGKLFTPAYEIEHIIPQSRYFDDSYSNKVICESAVNKLKDNCLGYEFIKKHSGEKVDLGRGETASIFSVEDYERFVKDHYSRNKKKMRNLLLEDLPDSFIERQLNDSRYISKFIKSLLSKVVYEENEQEALSKNVIVCTGGITDRLKKDWGVQDVWNQIVLPRFQRLNALTETSDFTAVNTNGHLMPVIPLYLQRGFNKKRIDHRHHAMDAIVIACAGRNIVNYLNNASARKNSEISRFDLQHLLCDKISGKVLRKPWNTFPQDVYAALMGIIVSFKQNLRIINRTTNHYQHYNEDGKIVTFVQDKGDRWAIRKPMHKDTVFGEINLRRKKVVPLKEAINSPVVIVDKSLKHKIIELINARYSVKEIMKYFETHQDIWADVNMKKIEVYYFTKETNEHFFATRKSLDESFNRKAIEEKIADTGVQKILLNHLSKNENDAKIAFSPDGIDWMNKNISDLNNGKWHQPIFKVRVYEKADKFAVGERGNKSSKFVEAAKGTNLFFAVYESETEDKKTGEMSRVRTFSTIPLNEVIDRMKQGLSIAPKDKNGNLPIFVLSPNDLVYLPTDEERRHGEISMPLDKGRIYKMVSSSGAQCFFIQQSVSGLIWDKYEFSAMNKMERAVTGEMIKEKCVPIKVDRLGNVTFMLDLL

SEQ ID NO: 6988 - protein, 1343 aa, unidentified
  REGION 1..1343: note = Description of Unknown: Cas Enzyme sequence
MATKKEYNIGLDIGTTSVGWSVVETDNQKVMRKGNKALWGVRLFEEATTAESRRMQRSTRRRYDRRRERIKLLQEEFSEEINKVDENFFQKLKESKYVENDKINKKIVLTKEEKQELKDYQNKYKTIYHLRDELINNPEKKDIRLVYLAIHHIIKYRGNFLYQNANFNIDNLDIKDKLNVLFSILSNNIQELEIPEDYINIIDFDELEADLLKDTKNDVKALLIDNLTELTNKSFATEFGKLMVGNKGNINKLLMLETDNKIEISFSGTDYDDKYEEYQEALGENIEILDILKQIYDCIFLKKIFKGNKNTSISSLMVKSFEQHKKDLNFLKELFKDNRELYNEIFRTKKDLCLYEKYITNKIDCDEFRKEINKLLESLFSDENIKQNLLDEYNLEVKERIENGTFLPRITTTDNGKYPYQLNKSELIKIIENQGKYYPFLLNKLNDNKTYKIVKLLEFRIPYYIGPLVSEKRSENSWLERKINNVKITPYNFDDVVDKEKTAEKFIKRMISHCTYLLDEYALANNSILYSEFKVMNELKQIRVNDRKLELKFQQQTLEDFFKKTSGTITERKFKNYLISTGEYSMEGSNFRITGYSADGKFANNMQSYVDFFGENGIFADTDYDFENAEEIIEWITIFEDKDILEKKVRDNYSKLNENQIKKVLAKKYSGWGSLSKKLLKTKYYKDKDTELYKSILDLMYETDKNFMQIINDDKYNFQEMIKKFNNKEENKKLNYSIVEELATSPATKRGIYQALKVVEELVDYIGYEPKNISIEMARSEEEKVRKDSRKDYINNLYKGCKDSIENYKKLKHELDSHEITSQRLFLYFIQEGKCLYTGTPLNIEDIENQSLYEIDHIIPRSLIKDDSIDNKALVLKECNQDKKASYVLPSKFRNSKQKTWWKHLKDNGLMAAKKFHNLIREKYNEEDINGFINRQLVETRQITKHVANILNNLYKDTNVIYLKADLSHNYREKYDLFKFRDINDYHHAHDAYLAAVLGEYKEKFMKRKINFDMVKELNSKIVEMDEGKRRNLRFGYVINSLDENLNDIVLKVSEKLVDNETGEVLFDAHEFNKRVEDTLYRNDILISRKTEIRTGRFYKETIYKKGKGTIPIKFGMPTDIYGGYSNTNARKLMLIEYNESKMKIIGLPMALAVRNNDAEINDYIKTQINLKKNSTFKIKKCSIPFETEIIYNNQNVFIKGYSIGHKNCEISNAIQLKIAKDKMKHWKYALQYLLNDKKQYIDFAEKYVNEIYDFLINLDLFPLFNKELDKIKNKVNFEDLALDQQKKITKELFKMLHCNSVNANLSEFGLGDRMGRLSGYNITDGIIISKSVTGIRESRYEF

SEQ ID NO: 6989 - protein, 1371 aa, unidentified
  REGION 1..1371: note = Description of Unknown: Cas Enzyme sequence
MNSDRKADYYVGLDMGTGSLGVAVTDPQYHLLKVKGKDFWFVREYETAHPQLERRTHRISKRRLQRHQVRIGLIRSYFADDVLEHDPLFYIRQDNSKYYREDKDSRLLTKDSLFAEPNYGDKEYYKEYPTVFHLRQALLKDEISSEERYSRLLYLAIINMFEYRGHFLLNTDSGDVNFEMVKDAGETVMNYLYDSMEESTAKISYTEVIEILADKGISRSTKKDKISSLLGIKKSNKEQTELVKCLCGMEADARVLFRIEAEEKIKIAFQQASFEDEKEEIEVAVGEDNYAIIEYMKQLYDYSQLQSVLKGFEYLSDARVEMYDKHKEDLILLKKVYKNNLSQEKYNIMFRSSEDGTYSAYCNSLNAENSLAATKKYRRNMKKRGKEDLYARIKKDLKGVEDAEAEKILKEIELEAFLPKQITGANGVIPNQVHRKELKKILENAENHLPFLKEKDSSGYTVSERILMLFSKNIPYYVGPVGKGSQNGWAEIREEGQILPWNMEQKLDMEKTSERFITNLVRECTYLSGEKVLPKQSLLYERYCVLNEINNLQINGKRIVPELKQDIYQDIFMGSRLGKKVTKKVLSSYLLNRGLISDESEISGIDREIHAYLGSYGKMYAVFGEKLREEAIRNAAEEMIYYGTIYGDSKSMFRKKLKQYISSGIITDVQAKRIAGYKFKDWARLSKNLLCLNGCDKHTGEIISLIRAMWEYNLNFMELINSEEFTFRDELEGRKRVLEKSLHEFQFEDLKDYYYSAPVKRMIWQTVLALQEITQIMRHNPKRIFIEMTRTEEEKGEPGRKASREKRLLKLYENIRESRDWTSEIKNAGASGSLNSKKLYLYYLQMGKDAYTGEEIDIEELFTDNRYDIDHIYPRSLTNDNNIDNNLVLVSKKINQDEKKNDYPLPEKVRSNPKVWELWSSLHKRGFMNDEKYNRLTASTPLTDEQLAGFIARQLVETAQGTKGIADLFKAMMPEAEIVYVKARNVSGFRKQSFLKSRLVNEHHHAKDAYLNIVVGNVYYTKFTRNPMNFIKNEVQRSSNKYNYNLSKMFENDVVRNGEIAWSVQKNHKPGTMQVVSEVMCKNTPLITRQAFEQKGELFNIQPVGKYSAKAGNYVPLKVKDTKLQNVEKYGGYTSLKPAYFTFIEHGSEKKRKRCFEVVQSYYASQIKKESDLIEFLEKNGYKNPRVIAGKIKKNSLIKYNGYLLYVIGMDARKNIEFSNATPMCLENKYIQYVSKLEKAYNEIILSERKKTEPRLSEKVTIENNLKLYRELTDKHVNSIYRNHPRSIGDILEKGEDKFESLDLVHQIKILYNLVLYTSFNRGTFSLTDIGGPKEVGRIRISGNMTEAKELKLIHYSVTGLYKKEIDLLNQ

SEQ ID NO: 6990 - protein, 1221 aa, unidentified
  REGION 1..1221: note = Description of Unknown: Cas Enzyme sequence
MKKVLGLDLGVGSVGWSLVNVDDNYKPTEILGIGSRIISLSPDESSEFTSGNAASKNQKRTQKRTARKGYDRYQMRRQALTEKLRELKMLPDERLIKLPVLELWTLRAKAATPGEKLTLPEIGRVLYHINQKRGYRHAKSDDSADKEQRDYVQTVNKRYQEIKDEGTTIGQHFAIKLKESEIVTDKGPFYNYRIKEQVFPRDAYIEEFDRIMDCQKTFYPEELSEDNIDEIRNKIIFYQRDLKSCKHLVSQCEFMTRSFLDADHKPILNSSGELVMSGPKVAPKSSPIFQACKIWEEINNLSIRNKENDELHISPEQKKDIFEYLDNNEKINATALYKILGIGKGDGWSVDKALSKGFTGNTTKVAIAKALGKEHNTKKSDLLRFDLRLKENGVNKDTGEIIYEIDPTCENEPLYRLWHVIYSINDKDALRHALTNQFGINDGESLRELTKIDFVKQGYGSRSAKFMRKLLPALMDGARYSEACDMIGINHSGSLTKSENEARELLHKIPQLQKNELRQPVVEKILNQMINVVNAVIDQFGSIDEIRVEMARELKLSKEGRAATAKNIRDREKMNNEMAEKIKELGITPSKNKILKYRLWQESGQKCFYCGQPVGAAEFLSGLDVEIEHIVPKALLFDDSFSNKVCACRKCNAEKSNTTAYDYMKSKGENEFNDYLRRVDAAFNEHRISFIKRSRLLTPADKLPKDFISRQLIQTQYISRKAMEILKQVCHNVYGSSGEVTSYLRRIWGYDEILHSLDLPRYREGGMTAEVSYDHRGQTHTEERIKDWSKRLDHRHHAIDALTIACTRQSIIQRLNNLSAMTAVAGESMSLDKWTLAQPHFSVQEVSDNVSRILVSFKAGKKVTTPGKRYVYRGGKRVLAQEGLLIPRGALCEESVYGRIHSLEKEVPVKKLFERVDDIVKPGIRAAVEERLRACDNDVKVACASLKKEPLYLDVEKTIPLEYGTCYKVEYVMRYALSALKPKDVEYIVDEHIRKVVSERLSEYGNDPKKAFAEPLYADKSKTIPIRAVRCYTGLAQVVPVKKDSKGNAIGFVKPGNNHHIAIYRDAEGTYHESIVTFWDSVERKKYGLPVIIRKPGEIWDILIDKNIPEELAAGLPAPDWQFVMSMQQNEMFVLGMEDDEFRDAMEVKDYKTLGAHLYRVQKLTSIYYVFRHQYETQLDDSKGAQIMKKFYRAQSFKALFALHPRKVSVSLLGEMALKDD

SEQ ID NO: 6991 - protein, 1329 aa, unidentified
  REGION 1..1329: note = Description of Unknown: Cas Enzyme sequence
  MOD_RES 566..579: note = Any amino acid
MKGEYYLGLDMGSGSVGWAVTNEKYEILRAHGKTLWGVRLFDSAQTAEERRGFRTAKRRLDRRNWRIELLQKIFAEEVEKIDDGFFRRMKESRYWPEDKRDRQGKCPELPYALFADDDYTDKEYHKQFPTIYHLRKWLMETDETPDIRLIYLALHHMMKHRGHFLLNGNIEQVREFQTTFEQFLEAVRAEELGFSSEIGVERSKEIEAILKDRTLTKSAKKTKAVKAMRAETSCEKEWLGLITGGTAKLGNLFGEKQMDTLERPKLCFADAGYEEYAGEIEAELGEKYVLIEHAKAVYDWAVLADILQNYSSLSEAKVALYEKHKKDLKDLKKLVRENLSREEYQRLFAKKDEKTNYYAYIKAPKQCSQEDFYGYLKKNILGKISDVTKASCMQKEMEMGTFLPKQTIKDNSVIPYQIHLYELNAILKNLEDKVPLLKENGEKIQKIFTFRIPYYVGPLNGIRKKGEKSNWAVRKEGKIYPWNFDEMVDLEASAEQFIRRMTNKCTYLPSEDVLPKYSLLYSKYEVLNELNNLRLDGEKISVEQKQKIYEEVFQKSRKVTQKKLKXXXXXXXXXXXXXXKEVEITGIDGDFKSSLTAYHDFKEKLTNLPLNQAEKECIILNVTLFGDDKAILKQRLKKLFPELTEKQRDSISKLPYRGWGRLSKVFLEETEAPAPETGEAWSIIRALWETNDNLMQLLSEKYLFASAIEEKNGNEQKKRDISYELVEELYVSPAVKRQIWQSLLIVKEICKVMGNPPKRVFIEMAREKTDQGRTSSRKKKLLELYKKCKAEEKDWIDEIEKRSDAEMRRDKLYLYYTQKGKCMYSGETIELEELWDNQKYDIDHIFPQSKVMDDSLDNRVLVKKKCNQMKEDKYPIDETVRKKMQPFWKSLVDAGLISEEKYKRLIRGNGFEPSELAGFISRQLVETRQSTKAAASILQQVIPDTQIVYVKAPIVSKFRKDFKFLKIREMNDYHHAKDAYLNIVVGNAYFVKFTSNPIHFIKENPGRSYNLKKMFEQERIERNGEIAWESGNGTIATVRKFMEKNNILVTRRSYEATGALFDQQIVKKGKGQVPIKSSDERLCDIQKYGGYNKEAGAYFVLAESEGKKRKKIRTIEYVPIRLKKEIQKSEENIIRYLEEERQLKNPRVLVPEIKIDTLFCVDGFYMWVSGRSGDQLLMQGANQLVLSQEETEILKKIVQYVERKKQNKELKIYDSDHLEEKKVVMLYETFLNKLTNTVYAKKLGAQAKTLTEKREKFKELCIEEKCIVLCEILHFFQCQSVTADLKLIGGSGRAGILYLNKNITDCSRIEMIHQSPTGIYEQAVDLNAL

SEQ ID NO: 6992 - protein, 1509 aa, unidentified
  REGION 1..1509: note = Description of Unknown: Cas Enzyme sequence
MKKILGLDLGTNSVGWAVINSVVNDEGKEQLVNISSCGSRIIPMDAATLGDFDKGNSKSPVAERTRLRGVRRLLERSLLRRERLHRVLSVMEFLPEHYASQLDRYGKFLPEREPKLAWYQDETGKYRFLFQDSFNEMLEDFRQHHPELVAEGKKIPYDWTIYYLRKKALSQKITKEELAWILLNFNQKRGYYQLRGEEEKEDNKKSVEYYALKVVAVEDSGDRKGKDIWYNVKLENGWVYRRASSIPLDWVGKVKEFIVTTDLDEKGNPKKDKDGNVKRSFRAPKEDDWGLLKTRTQAQIDESGQTVGTYIYESLLRMPDQKIRGKLVRTIERKYYKDELRKILVKQSEFHAALQDHNLLLACIEELYPNNEAHRRLLSTSDFIYFLVEDILFYQRPLKSQKGLIDDCPYESHVYRDKKNGSLQHVPLKCVSKSHPLFQEFRLWQFLASLRIYQREKQVDGSLKLDVDVTNEFLQSEDDYVRLFDWLNDRKDIDQKTILAYKPFGLKKNELPKYRWNYVEDKSYPCNETRADMISRLNKAGVSEEFLTREKEEALWHILYSISDKKELTKALGTFAEKNGLNETFVEIFSKMPPFESDYASYSLKAIRKLLALMRMGKYWDEQAIDEQTRSRIEKILTGEYDETIRTRVREKAMHLTDISSFRGLPLWLACYVVYDRHSEAKELVKWETPDDIDHFLHKFKQHSLRNPIVEQVIMETLRTVRDIWRQEGRIDEIHVELGREMKNPAKERARITAQVLENENTNLRIKALLTEFMNPEFEIENVRPYSPAQQEILRIYEEGVLSGVAEKDLPDDIASILKKFRENDVKKRPTTSEVLRYKLWLEQRYRSPYTGRIIPLGKLFTPAYEIEHVIPQSRYFDDSLSNKVICESAVNKLKDNCLGYEFIKKHSGEKVELGNGETATIFSVEEYERFVKDSYLGNSKKMKKLLLEDIPDNFIERQLNDSRYISKVVKSLLSNIVCEEGEQEGMSKNVIVCTGGVTDRLKKDWGVQDVWNRIILPRFLRLNKITDSTDFTSVSTNGHLLPAVPLHLQKGFNKKRIDHRHHAMDAIVIACADRNIVNYLNNASARKGSEISRYDLQYLLCDKVKTDANGNYKWILRKPWETFTQDVYVALTDIVVSFKQNLRVINRTTNHYQHYNEDGEKKMIPQTKGDRWAIRKPMHKDTVYGEVNLRKEKTLPLKDVLNNPSIVVDKSLKNKLYELLKSQYDLKAITKYFETHQDVWADVNLKKIKVYYFTKETNERFFATRKSLDSSFNQKKIEEEVTDTGIQKILLRHLQQNGNNPDIAFSPDGVERMNQNMTILNNGKWHQPIYKVRTYEKADKFAVGESGNKVKKFVEAAKGTNLFFAVYESIQEDEATGKQVRKRTFATIPLNEVIKRKKQGLPVAPEDSKGNLPIFVLSPNDLVYLPTEEECNTGKIIQPLARERIYKMVSCTEGECHCIPEYVASPILQTIELGSNNKAQRAWSGEMIKEICVPVKVDRLGNVSLVKI

SEQ ID NO: 6993 - protein, 1176 aa, unidentified
  REGION 1..1176: note = Description of Unknown: Cas Enzyme sequence
MEIKSVEQKKFYENIKESLNGKEYKLGIDLGVGSIGFAIVSLDDNKKADKIILAGSRIFKPSEGNKTRRLKRLQRNAHRHKRERLFKLWQLLSKKGLSLKAPDKLEKEDPLEGDTSIKRFPIEVLSKNVYELRYIAINEKVDLKELGYIIYHLANHRGTASLRTFEEFEESKKKENKEMQQKANNSFKLIKEKNYRTYGEMIYKEKIETYYEKIKNKKEGMPKIRNRKNSVDFIPTRDLIMKELDEILNKQKEYYSEILTEDYINQIKEIVNFEYEKLVPEPGRCPYFSNEFKLPKAHPIVEERRIWETINNSRVFEPIIDNNEIKTFKERKFTNEEKEKIFSYLMKNKNITPSKIIDLLNLPDKTEIILQGRDKKNQEIKGYRNLELEKMDFWKRFTDKQKDQFFYDWLLIPDDFSLKKKLKEEYKLSDEEIKLAIEKIEIPKGYSPLGKTASIIINEYIKKGLSFTEAIDKAVEDGKISLKEHKIYDLLPYYGEVLDDYTQPIICKALSEKFKDRNYKKPNINKDEERFGRIPNPVVHQTLNELRKLINEIIQATGKKPYEISMEVSRELKKSAEERKKLSNLQDQNENKRKEIYEKYLKGRNDVKNGYLKFQLFEEQSRICPYCGEQINADDIYNSRVDIDHIFPISESFDNSRNNLVLAHNKCNEEKGQRCPYDAFAGTERYNKILSYLDKTPGMKSKKWRFMEGTYEEFLKNLPIKKRFETDTSYISKAAQKYLSCLFESKTKVIPYKGGVTAQLRLAWDLNKVLIPYIKEGLYEKELEKFTSISSLDVKLRMDNRHHAIDAITLAYASIGHSNLINTLAAKGYPINFDKKNYLSSILKPPFEKFSDYVKEKVKDFVVSIKHDHNKNGELLKETFYRVYLLNNKYYLVTKKPVIDIGDNLEEIEEKLTKGKREIESSKNQELKNILQKNLRILENIKNNINRAKQILEEENKKAKEEGKKIPEISNKKIIRKALKMVKGVYYDISTNKEKGKFFILKEPQVNKAGCGYNTGDNLCLDLYHKSGKLCGEVIRKIDAVNKNFKPAYLEKGFKLFERIYVGDILELDKSEEKVALKSKTGNSPENRVFVKITTFTESPSYYKEKLDQIQIHFINITRDQNKSRDQNKSRDQNKSDDSFYISSMKKYKPRKVILTPIGAIKYRSKILGDLNVENN

SEQ ID NO: 6994 - protein, 968 aa, unidentified
  REGION 1..968: note = Description of Unknown: Cas Enzyme sequence
  MOD_RES 231..236: note = Any amino acid
MNSDKREDYYVGLDMGTGSLGGAVTDTQYHLLKVKGKDFWFVREYETAKSQLDRRTHRIAKRRLQRHKARIGLIRSYFAEDILKHDPLFYIRQDNSKYYQEDKDARLTTKDSLFADPGYGDKEYHDVKEYPTIFHLRQALLRDQIKDEERYSRFLYLAIINMFEHRGHFLLNTESSDLNAYMIKDVGELVMNAICGVSEYGSVTYKEIIEILEDKNISRTAKKDQIASKIXXXXXXIGESTDGTDQMPVRYGSRCQSMFEIEADEKIKIAFQQAAFEDEKEEIEVAIGEERYLIIENMKQLYDYSQLQSVLNGFDYLSDARVQMYEKHKEDLHLLKKVYRKNLDREMYNRMFRSGEEGSYCAYSNSTNSVDSLAEAKKYRRNMKKRSQKDLYDRIKKDLKEVHDADVDAIRKEMELERFLPKQITGANGIIPNQVHRKELKKILENAEHHLDFLKEKDESGYTVSERILMLFSSNIPYYVGPVGSGSKTGWAKIKESGQVLPWNMEQKIDIEQTSERFITNLIRECTYLSGEKVLPKQSLLYESYCVLNEINNLRIHGKRIVPELKQDIYKEVFQGSRLGKKVTKKNICTYLINRGLITEESEVSGIDKEINAYLPSYGKMYSVFGERLRKEAVQEIAEKIIYYGTIYGDAKAMFRKKLNQYVSDGWMTEYQVKRISGYKFKDWARLSRSMLCLSGCDKSTGEKISLIRAMWEYNLNFMELIYSEDFTFQKELEERRKALGKTLQEFQFEDLDEYYYSAPVKRMIWQAVQALKEITQIMGHNPKRIFIEMTRTEEEKGEQGRKNSREKRLLKLYESIRDERNWAAEIKNANASGKLNSKKLYLYYLQMGRDVYTGEPIDIEDLFDDSRYDIDHIYPRSLTNDNNIENNLVLVSKTINQNEKKNDYPVPEKVRTNKKIRDLWHTLHKMGFMNDEKYNRLTSTERLSEEQLAGFIARQLVETAQGAKGIA

SEQ ID NO: 6995 - protein, 1074 aa, unidentified
  REGION 1..1074: note = Description of Unknown: Cas Enzyme sequence
MKHPYGIGLDIGIASVGWAVVALNENAEPYGLIRCGSRIFDKAEQPKTGESLAAPRREARSTRRRLRRRSLRKADLYELMAQNGLPGRAKIEEAVQAGHLPDIYALRVQALDGPVTATDFARILLHLMQRRGFRSNRKADDAQKDGKLLQAIDANTRRMEENHYRTVGEMMYRDPVFAEHKRNKSENYLSTVRRDQIVEEAIQLFAAQRQYGAAWASPEMEAEYLTILTRQRSFAEGPGGDSPYRGMQKVGPCALEGKSERRAPKATFAFEYFTLLQKINHIRIAENGVNRILTAEERQELLSACYRTDKLDFARIRKLLALPVEARFNMVRYRENQTAEECEKKEKITVLPCYHKMRKVLNTLRKDHIRSISREQLDAAATALTNPENEEKLRAALEEAQFEPLEVDALMTLPSFSGFGHISVKACRKLIPYLEQGLNYSDACKEAGYDFQGNYRGEKSQFLPASTEEMEDITSPVVRRAVAQTIKVVNAIIREQGESPVNIHLELAREMSKNYKQRNELADAMEKNQAENARLMEELHDLFRGRTITGQTLVKYRLWKEQKEVCAYSLQMMKLDSVITDSSYAEVDHIVPYSRSFDDRRTNKVLVLTSENRKKGDRLPLEYLQGKRREDFIVYTKANVKNYRKRQNLLKEGLSKEESREFIQRNLQDTQYSASFMLNYIRNHLAFADCSAAGKQRVVAVNGAVTAFLRKRWGLSKVRADGDLHHAVDATVIACTTPSMVKRVTEFCKQEETNHVCNEYFPEPWPRFRDELMQRLSACPQENLMQINPVYYQNVDIASIRPVFVSRMPRHKATGKVHEDTIRSYVSEGITAVRTSITDLKLDEKGEIEGYFNKESDLLLYNALKRRLEEFGGNAKKAFAEPFYKPRADGTPGAQVRKVKIVDKTSNVICVRDGGGVSKSNNMVRIDVYYVPGEGYYWVPIYVADTVKSTLPNKAVLRNKGMDDWKEMNEKDFQFSLYNNDLVFIERDSPISFSLTNKKSTLPSKFSTEKTFAYYQKGDISNAAIKVETPDGAYVFKSLTLNTVRKIEKYQVDVLGNYTLVKKEKRQNFPAQRR

SEQ ID NO: 6996 - protein, 1428 aa, unidentified
  REGION 1..1428: note = Description of Unknown: Cas Enzyme sequence
MKACDLEEKTNHLQACVAIDLGARYTGTFSILHKSSHLPSKDDCRAATYVLPEDGGKMTYSQRNRTAVRHRIRGKKRFALARRMAMLIIREKLAAKSVTLTSSETRRLAEAVGSLLRRRGYNRLETETDNDLTVLENIEPEVFSEHEILGKYFYAGTDLAIQWETLSQDLSKISSLLAERLSEKDFKKYLTGLIPDDKNKIKHIISVFKMLIDEAESINMQCVLGHKHRTQYLSDIHADMHRDTRLSKAAEAFGGVDRLWRLLGNLSNLQLRAHRWYFNAPHLFDDQALEPARLQKTLVRAFKYLHCPQGVESRAQAELVKELEEADDIIDALCTIDPVRTIPPYENQQNRRPPFDQTLYLSPDLLDRQFGHTWKSWAVAFAKEEPLLEDGLEVILAQTDRRSRVKALNKNCRDALDYKFSYVLQRVLDRSKACDSFCLRALAAGAEGSRLTVARNELQRVLGTQHVNDFLRLAKLYYRETGEAKNGLWLQEHACVLERADIHPPMKSKIINQLLGAVFGLDADFGRLFKNKIWNRTVSGRSTVRSMCQNIEQTRKAHGGEFNLLFKQATAGAEGVAEDIAKTVAAVGKLREFFSTIPELDECTINRVANPYSLVQLYTLLEVDRSGFSSVSAAAHFENEWRMKTWKDETCSRCSRLPADAVRPFDGVLRRVLDRQTSELSRQIASDFFERISGESAQIDLAIVIEENKFAFSASLADLKKNRAAADKAKDALARQEKRWLSKSERIKIAARGLCAYTGEALSDAGEFDHIIPRSQTTAAMGTAFNSEANLLFVSQKGNQQKKDGRYFLTDLKDNYLNRIFGTSDRKQISEEIEKTVDELVQSGRIRHFELLNQKQQDCVRHALFLNDASEARQAVLRELSATNRSKVNGTQAWFVRSLVSKLTRITADWRNKHNHTLNIRSCRVNAQAASSIRMALGKLAPDLAKPDIQPVASHSIDAMCAYAAACASVDFCSFVGGNPSHSDPESFTNDNQSNLAALYPDACDVRWVKSSSQKDISAKAIFKEGILAENFLPILVKQDKVYVGFTLPSASGAGGNALPVTGKNPLHLLEVAGPYLDKTPASNSSQTQCCNIVKQKAFALFNKQAQDPDSLTREETEAAALLKHLHYITERIPLSKMLLNDTGNKLLDAAKLKKKIDAQTLSCTIKSKKSQFSVTGTLALPAQVEWARLASDPSLVPHLGESTKTFDLNVWIRSVTHLNAGSKCRHVSVKRIASLPVVSKASGGFRIRRTTATAQEVYQLYNIAGAKCAGFASRNGEVSDWKRPLLKKELVHDNLTPLDVAEYAADESVGLLDFRLVAEENDITVYIAPGTADRRYVRLELPFPTLRNWLTNAEAVAIPDSPLGLPSEIILKKSKAFAPTEPAKVAKLLGTPRSHLFVEQLGSRVRLWYIVESSNSDMSRAFNRAQS

SEQ ID NO: 6997 - protein, 1350 aa, unidentified
  REGION 1..1350: note = Description of Unknown: Cas Enzyme sequence
MKSRREQDYYLGLDIGTESVGYAVTDENYNILKFNGKNMWGSRLFDEAQTAAERRTFRSGRRRLQRRAWRIQLLQELFSEEISKVDHSFFVKMKESPLILTDKTNGQKYTLFNDDDYSDIDYYSEFPTIYHLRKALLMEDRKFDVRLLYLAVHHIVKHRGHFLFQGSVNNATSFHSVFDNLKICLRDEFEIELECHSEEKIAEILKDKKKSKRDKCNEIFNELDADKSNKQIKSIVTLISGMKAKMADIFADESLLEIDKPSISFSESSYETLRVELEDVLGERCGVIDIIKCVYDWAILADILADGEINGKSYLSVAKVNLYDKHKEDLKILKQLFKGNNKVYKEFFVDEGKSNYCAYVGFLNSNGCKKNIKRCNREDFIKNLKNHLEKIEKTVSNQSEYEFIEQEIQADTILPVQISKDNGVIPYQVQEMELKDILAKAEKYMPFLSEKDANGLSVSDKIVEIFKFRVPYYVGPLNGYNNTNSWMVRKSDGKITPWNFDNKVDKDASAEKFIRKMTNKCSYLVGEDVLPKHALLYEEFNVLNELNNIKIGANKMNVELKKDIIENLFKKKKKVTGKNLREYLKCEGLINDDEEITGFDINFKSSMSSYLDFKKILGDKIDNYSVKMMVEQIILWITVYGDEISILKRVIRKQYDDNQISDEEIKKVSRLKYQGWGRLSRKFLDAIEGTDKETGEIRTIIGALRDTQDNLMQLLGQKYTFLETIENINNKNMKEISTISYKDIVEDIAASPSIKRAVWQVILISEEIRKIMGKEPAKIFVEVARGTGEKKRTVSRKDRLISLYESCKDESKDWKQELEQRPEDDFQSIKLYLYYTQMGRCMYSGESIDLSRLSDANVYDRDHIYPQSKTKDDSLDNLVLVKRELNAKKSNGMISSDIQNKMHVFWKELLNKGFISQEKYYRLMRKDSLTDEELASFINRQLVEARQSSKIVIGLFNRMYPNSKVAYVKANLVSDFKNMDNVKITKVRSLNDYHHAKDAYLNIVVGNVYYEKFTNNPLQWLKKNRNAEYSLNQMFNYDLIKNDKVIWKRGNDGTLKVVLKNINKRDIQYTQQVITNKGGLFNQQLVSKDENASMPVKKGRDVNIYGGYKSITPAFFTLIESEDKKGNKQRSIESVPLFMKNQFLNDSNSCMEYFENVYGLKNPKVVISQIRKNAYLIIDDFPVLLRGSTGKQLKLQCAVQLIVSQEQERYLKKLEKYIQKNSQRKDKKQNLPITEYDALTKESNIRIYDMFIDKLTNTIYSKRPANPVDKLKTKKELFEQLSVEIQCVVLNEILHLFQCKPIVADLSIIKEASSTGSIQKNKIISSSNNVIMVNQSVTGLFRQEIDLLKI

SEQ ID NO: 6998 - protein, 1346 aa, unidentified
  REGION 1..1346: note = Description of Unknown: Cas Enzyme sequence
MENTYYLGLDMGSASLGWAVTDSEYHILKKHGESLWGVRLFDSASTAEERRTFRTSRRRLDRRNWRIQILQEIFAEEISKIDPGFFLRMKESKYYPEDKRDESGNCPELPYALFVDSGFTDKEFHREFPTIYHLRKWLMETEKIPDIRLLYLAFHHMMKHRGHFLLSGDISQIKKFDSTFLTLLQNLAEEELDWNLEIDSAQISDIENILKNRNLTRSAKKSQLVKLSGAKTACEKAIFTLISGGTAKLSDVFGNDDLNESERPKISFSDSGYDDYIETVALTLGEQFYIIESAKAVYDWSVLVDILGDCASISAAKVRVYEKHKKDLAYLKKIVRNNLPKEDYKNIFVNTDAKLNNYCAYMGMTKKNGRKVPLAGKCCSQIEFYDFLKKNVLSRIDDTAIKEYLENEINCENFLPKQVNKGNSVIPYQVHLFELKAILKNMEAKIPFIRENSDKIIQLFEFRIPYYVGPLCGESAGCRGKFSWAVRKSYDKIYPWNFNDVIDTESSAEVFIRRMTNKCTYLAGEDVLPKDSLVYSKFMVLNELNNVKLNGASISPELKQKIYTDVFCRCRKVTQKKLRNYLVCEGIADRTVDITGIDGDFKASLNSFHDFKEKLTGAELNQQEKEMIILNIVLFGEDKKLLKQRLKKLFPKLTEGQMKAICTLSYKGWGKLSKKFLEEVTVPDPETGEFINIITALWKTNDNLMQLLYGPLGFMKYVENYNSGSEKVSLDYESIENLYVSPAVKCQIWQTLKVVKEIRKCMGTDPKRIFVEMAREKQESKRTESRKKQLLDLYRNCKEEQSEIVSSLEQREDHELRRDKLYLYYTQKGRCMYSGRPIDFEKLWDNNMYDIDHIYPQSRTMDDSLDNRVLVERKENELKEDIYPINPEIQKARKTLWKSLLDGGFISKKKYERLVRTTKFDENELAGFIERQIVETRQGTKIVADILKEAFPNSTIVYVKARTVSNFRQDFDLMKVREMNDLHHAKDAYLNIVVGNSYYVKFTQNAAWYIRENPGRTYNLEEMFKSKKNGRIARDIVRNGEVAWKAGGKGTIITIKKVMQKNNVLVTRRSYETKGGLFDQMIMKKGKGQIPIKESDGRLLDINKYGGYNKATGAYFMLVKSKDKKGREIRSLEFVPLYLKSRIEQNEEAAIEYLEKNRELKEPKILLRKIRTDTLFDVDGFKMWLSGRTGSRLIFKCANQLILFPNDEKCLKKILKFIQRRKENKNLQIYNVDGILDEDLLHLYDTFLDKLQNTIYKKRLSAQAKTLTEKRNHFIKLKAEDKCIVLNEILHMFQCQSGSANLKLIGGPANAGILVMNSNITECKSISIINQSPSGIFEKKIDLLKI

SEQ ID NO: 6999 - protein, 1356 aa, unidentified
  REGION 1..1356: note = Description of Unknown: Cas Enzyme sequence
MKKFEEYYIGLDMGTGSVGWAVTDSAYNIIKRHGKALWGIRLFESAKTAEERRIFRTSRRRTERRKNRLHLLQEIFAEEISKKDMGFYQRMKESKYWHEDKKDINGNMPELPYALFADDGFTDKDYYKKYPTIFHLRYALATNTTDKPDIRLLYLALHHIIKHRGHFLFEGKKLSEVKEFSTAIEALVQQAEEQEIDLKSLTQEEVLTQLEHIMSDAQCTKSDKKTQVSKLIVGTDKQKQKQEKAIAALITGCTVKLSDIFADPELDKEEISKICFSDNGYEEKEVEIESVLADRFLLIAAAKGVYDWTVLHDILGDARFLSEAKVKTYEKHRDDLRKVKQLLRMDKGVYEAVFGVSEKNEANYSAYIGMAKKNGKKQPIEKKCSQEDFYKFLKKQLDRLSVDEMGQEIIDELKAEMDLGTLFPKQMIRDNGVIPYQLHENELNAILDNAQKFYPFLLEKDQDGYTPVEKIQKIFRFRIPYYVGPLNTAHQDKGGHSWSVRKKEGKIYPWNFSEMIDEEESATKFIERMTNKCTYLIGEDVLPKESLLYAKFNVLNELNNLRIDGELIAPELKQDIYNNVFKKYQRVTGKKVKDYLRINGVISKEQELSGFDQNFKSSLKAYHDFKQIVGTGALSESEQEDIVRDITLFADSQKMLKQRIHRKYPMLSDKQIAQLANKKYAGWGRLSRTFLENIESVNKETGEVMNIITALWETNENLMKLLSGKYDYTKQIEQWNAGQMKKGEIEYQDIEELYVSPAVKRPIWQTIKIVREITNIMGGAPKRIFVEVAREPGEKGVRKVSRRNQLLDLYKACKKEAPELYDRLANKESDNALRSDKLFLYYSQMGRCMYSGDAIDLDELFTNRYDIDHIYPQSKVMDDSIDNRVLVKRDLNSKKTDTFPVPEEYRKAGKALWSTLLKKGLISKEKYKRLTRTEPFGEDELAGFIARQLVETRQSTKAVAHLLEEAYPDAEIVYAKARAVSEFRHKFDMIKVREVNDFHHAKDAYLNIVVGNTYYVKFTKDAAWFVRNNPGRTYNLKKMFENETVKRGNETAWIPGDNGTICTVKKWMRKNNVLFTRRAYEVKGGLFDQNILKKGKGQIPIKGGADERLRSRDKYGAYNKASGAYFMLVESDGKKGERKRTIEFVPVYLAKSLEESVELRRRYCEEELGLVNPDVRLSKIRKNALIDVDGFKMHLVGRTENRLLLIGATQLVLSEDDQQLIKKIGKYCLDHRENKDAVLSEKYELTMDLFEKLYDIFVFKLEQTVYAVKLSKQAKDLKEVKEEFLALDDEQKCLLLMEILHLFQCSPQLANLTNIGGGKSAGSLKILSDITKQQSVLLINQSITGFYEQVIDLKTI

SEQ ID NO: 7000 - protein, 1104 aa, unidentified
  REGION 1..1104: note = Description of Unknown: Cas Enzyme sequence
MSRYVLGLDIGITSVGYGVIDIDNNLFVDYGVRLFKEGTAAENETRRTKRGSRRLKRRKSNRLNDMKNLLKENDLYFEDYRNYNPYEIRAKGLKEKLLPEELCTAIMHITKSRGTTLEALADESQDDEGTKATLSKNAKELNDGKYICEVQLDRLNKDHKVRGTENNFKTEDYVKELKEILKHQDLNEELCDQIIEMVSRRRRYDQGPGSEKSPTPYGSYRMVDGVLKHVNLIDEMRGRCSVYPDEFRAPKQSYTAELFNLLNDLNNLTIKGEKITVEEKEKVVAFVNEKGSITVKQLLKLLDAQEDEVTGFRIDKNDKPLITEFKGYSKVLKVFKKYNQQELLEDKLIVDQVIDICTKSKGIDERKKDIKELYPEFDNELIEELASVKGVSAYHSLSFKAMHIINKEMLTTEMNQIQVLHEIEMFDKNRKSLKGKKNIEPDEEAILSPVAKRAHRETFKVINALRKQYGEFDSIVIEMTRDKNSKEQVKRINDSQKRFKSENDRVDGIIKNSGIDPERVNGKTKTKIRLYLQQDCKTAYTQQDIDLHTLIFDDKAYEIDHIIPISVSLDDSLTNKVLASRLENQQKGNLTPMMAYLKGKFTDGNLERYKLFVNSNKNFNHKKRSNLLDEQDITKEDVARKFINRNLVDTSYACRTVLNTLQHYFKDNEIDTKVHTIRGQSTNIFRKRINLQKDREQDYFHHAIDALIVASLKKMNIVNSYLMHYDYSDLYDEETGEVFDVLPDKQFIDQRYISFISDLKNIYQESNQYNLGYITQEQMHYPLIKVSHKIDTKPNRQIADETIYSTRNIEGQDMLVEKIKNIYDPKEKKAIELVNNIINDDTDKYIMKHKDPQTFEKIKEVILNHFNDYKDSKEYYVIDKKGKYSLKEESPLTSYYNENGAITKYSKKNNGPAITSMKFYSEKLGNHLAITGNYNTNNKKVILKQISPYRTDFYVSPEGKYKFVTVRYKDVFYKETIHKFVIDENWYNEEKVKKGIDSDWKFVCSMHRDELIGVIKKEGQKCVYDASINDGQTQYHDGKHYEILKFTATNNDESGRFEVKPINTNCSKRLMPSVGPFIKIQKFATDVLGNIYEVKDNRLKLEFD

SEQ ID NO: 7001 - protein, 1355 aa, unidentified
  REGION 1..1355: note = Description of Unknown: Cas Enzyme sequence
MNNKYVLGLDIGITSIGWSIIDEVKGKLLDMGVHMFEQATPAQEARLNRSARRTLRRRNWRKKQLKNAFIEFGLISKGEMNQRDYLSYTANSDTFTRPEEDTVYHLRLKALNDKVSLRELLLCLYNICGTRGHFLMENINFASSEPITFEFFVEQFYEFTHAYVNFTEDTKEFEQTILKPIFEKGKVKSNELKSLLKDEYTVEAEDNDALLEILKLICGFKCDLKKISESVVLVQEDKTKESVKLDELLKMDNLNEFLNNAVELHDVIAVSQILKDHNYICEVAVEKLNEVLKVQKLKYSDPDQYKEEKKIIQSKMSKAIGERLRVVKNMENKYPNGLYVKEASDILHKQQEFYPDLITDNFIEACISTIKARIPYYIGPLSSQAKNSWIDRKDGTFKYGYDYCKDALVNEEESIQNWKLNMISHCTYLPEEYALPKGSFITETFSLLNELNILTAVDKDENVYYLTREDKIKVFDELFLKRSDYVSHKEVTELLGLKSFGPKDSHKTGKFKNRYTLYQNIVSVFPQFKLHSILDLFNENEKEKVDKIEDIILNLNLFDEEQSKINYFTKKLNLDEKDAKKLARCKSNGFYAFSKQFIMETKMNVDGETLLEEMLRDNSENQKNEQMALITEATDLDGNRINFDSNKYMTLLKDTKKLSIDLLIQDGKPFIPIARPVIRALNECFKLYEEVVNTYGVPDRVVIETARDLKDSAHDGDEPAKHFDQMKNLYDYLTKQMKEQKDNAKISKHYLEDWDVIEPYLEKNKCKVELYIRQNGRDMVTGDEIDIQKLEDYEMDHILPRGFGDNSMDNLMLIKKEINGKKADRLPLEYIEAETVTNQAGKRIISSDFKRRCYELNGMKLISDKKLKRLLLASTDEAMGFINRNLVDTRYIIRELMAILRAYNTVNNYDTHIVSLRSSFTTVYRNAFNMKKNRDIGDQHHAHDASIVAIADMVLSTYYPNYDERGNNKYYQEFLKRMMESQGPDSDKSENQKLYNFIRYAYNKRFGNFPNDNDSLVSQVKDTVPLYSIKAEKNYKGAFFDATIYPQMDKKKNILREKGVLGLLGVNNDKRIYSSINCVAVDFFKYRKKNGKKAYVGIQIPKLIVNNNGEINKELYIKLIRDYYKVPELLDENGNVKEYYFRMRVYKNDLFYETESNTVLKFGIGTITRKILEPSHVYCFSYNDIYKEVYFLRKEMAIRFDFKEYIVNPSGHRKFNDYAIDELLEFCLNNYLDLDDLEKQTKLVINKFMEMMNKQKSKVGKIDYQWFLETIVYLNLIVNRKCSPLDRYRPGTDIVKKNNNEDAQYIKIKSSILGIRYTYNENGKLLISGPRKAPGKYSKIKKEKFSWKICSDVLQ

SEQ ID NO: 7002 - protein, 1318 aa, unidentified
  REGION 1..1318: note = Description of Unknown: Cas Enzyme sequence
YKEDTYVQNGFLGITVSSEQVGWAVTNPKYELERASRKDLWGVRLFDKAETAEDRRMFRTNRRLNQRKKNRIHYLRDIFHEEVNQKDPNFFQQLDESNFCEDDRTVEFNFDTNLYKNQFPTVYHLRKYLMETKDKPDIRLVYLAFSKFMKNRGHFLYKGNLGEVMDFENSMKGFCESLEKFNIDFPTLSDEQVKEVRDILCDHKIAKTVKKKNIITITKVKSKTAKAWIGLFCGCSVPVKVLFQDIDEEIVTDPEKISFEDASYDDYIANIEKGVGIYYEAIVSAKMLFDWSILNEILGDHQLLSDAMIAEYNKHHDDLKRLQKIIKGTGSRELYQDIFINDVSGNYVCYVGHAKTMSSADQKQFYTFLKNRLKNVNGISSEDAEWIDTEIKNGTLLPKQTKRDNSVIPHQLQLREFELILDNMQEMYPFLKENREKLLKIFNFVIPYYVGPLKGVVRKGESTNWMVPKKDGVIHPWNFDEMVDKEASAECFISRMTGNCSYLFNEKVLPKNSLLYETFEVLNELNPLKINGEPISVELKQRIYEQLFLTGKKVTKKSLTKYLIKNGYDKDIELSGIDNEFHSNLKSHIDFEDYDNLSDEEVEQIILRITVFEDKQLLKDYLNREFVKLSEDERKQICSLSYKGWGNLSEMLLNGITVTDSNGVEVSVMDMLWNTNLNLMQILSKKYGYKAEIEHYNKEHEKTIYNREDLMDYLNIPPAQRRKVNQLITIVKSLKKTYGVPNKIFFKISREHQDDPKRTSSRKEQLKYLYKSLKSEDEKHLMKELDELNDHELSNDKVYLYFLQKGRCIYSGKKLNLSRLRKSNYQNDIDYIYPLSAVNDRSMNNKVLTGIQENRADKYTYFPVDSEIQKKMKGFWMELVLQGFMTKEKYFRLSRENDFSKSELVSFIEREISDNQQSGRMIASVLQYYFPESKIVFVKEKLISSFKRDFHLISSYGHNHLQAAKDAYITIVVGNVYHTKFTMDPAIYFKNHKRKDYDLNRLFLENISRDGQIAWESGPYGSIQTVRKEYAQNHIAVTKRVVEVKGGLFKQMPLKKGHGEYPLKTNDPRFGNIAQYGGYTNVTGSYFVLVESMEKGKKRISLEYVPVYLHERLEDDPGHKLLKEYLVDHRKLNHPKILLAKVRKNSLLKIDGFYYRLNGRSGNALILTNAVELIMDDWQTKTANKISGYMKRRAIDKKARVYQNEFHIQELEQLYDFYLDKLKNGVYKNRKNNQAELIHNEKEQFMELKTEDQCVLLTEIKKLFVCSPMQADLTLIGGSKHTGMIAMSSNVTKADFAVIAEDPLGLRNKVIYSHKGEK

SEQ ID NO: 7003 - protein, 1369 aa, unidentified
  REGION 1..1369: note = Description of Unknown: Cas Enzyme sequence
LQGGTTIMGNKNYYLGLDMGTSSVGWAVTDQNYQLLRKKGKDMWGIREFDEANSAADRRSHRIDRRRRQRQTARIGLLKEYFADAIMAVDENFFIRLENSKYFLEDKDQKLHSKNGIFDDDNYKDVDYYREYPTIFHLRKALLDLKGEGTVYDVRLVYLALLNMFKHRGHFLLSTENEELNTEQIDIAYQELIELVNRDYELGLECKPLEGVISIISDKETGRKRKHEAMVELFGIAKSNKKANEFLKCMCGLSVNANVILNPDAEEKVPLCFHDFSYTDKIPELMEQLGDTSYAVVEQMKIIYDYAILAGTLKGYDYLSLARVDAYEKHSQDLKCLKELYRKYKTPQEYDEMFRSNKDGTYSAYVNSLNSSDSTAESKKYRRNMKGRKAEDLYKTIQKAFKDNTEDSQVQYVFKQIEEEQFLPKQLTGANGIIPNQVHKKEMERILKNAENYLPFLKETDESELTVSERILRLFSFQIPYYVGPLGKHSKTGWAVRSEEGSILPWNIEEKLDMKATSEKFIEHLIRSCTYISGEKVMPKASLAYERYCVLNEINNIRIDGERIETELKQRLYKECFCKGKRITRKQLCKFLEAQGAIQSAEQVTGIDITINNSLSSYGKMYAIFGEKLKEDKYRDIAEDIIYWGTIFADSRERFQSHLAKYVEQDILTESDVKRISGYKFKDWGRFSKALLELQGCDKSTGELISISQAMWENSLNFMELVNSDAFTFKEALEEKKKRAVSSLADFKYEDLEDYYFSSPVKRMVWQTILVVREIEQVMGCTPRRVFVEMTRNDEEKGDRGRKASRGNQLLEAYKNIKNTEIHNWKEEISAADSSGKLRSKKLYLYYMQMGRDMYTGEEIDLARLFDDNLYDIDHIYPRHYVKDDSIINNLVLVNKAANEHLKKDLYPIPQQIVANPKVHELWSVLHRSKLISDEKYSRLMSRTPFTEKQMGDFIARQLVETSQGTKGVAELLKQLMSGMGTEVVYAKASNVSDFRNKNGFIKSRLVNDFHHAHDAYLNIVVGNVYYTKFTKNPWNFIQKDYARDKKKNHYNLDKMFTWDVVRGDETAWIAKTDKTEGTIAIVRKVLSKNTPLMTRMNFEQHGEIANATLYSAKKAKSENYFALKTSDERMADVTKYGGYTSASIAYYFIVRHREGKKQNISIEGLPLYQKRAVEKTADGLEQYCSSKLGYENVEILCRKLKIQSLLEMNGYRMHLSGKTGNQLIMRNAMNLCISQDWVKYIKKLEKKAETDIQDKLISETANLELYGLLTEKHQSTVFARKPNPFGEKLKNGRTKFEELEVSKQCEVLHQILQLTQIGTTVANLTAIGESPNSGKILISKNMKETDNVKIICQSVTGLYEKEIQVYSL

SEQ ID NO: 7004 - protein, 1340 aa, unidentified
  REGION 1..1340: note = Description of Unknown: Cas Enzyme sequence
MEKDYFLGLDMGSGSVGWAVTDDQYRVLRAHGKAMWGTRLFESANTAEDRRINRTARRRLDRRNQRIEWLQEIFAEEINKKDSGFFRRMKESRYYPEDKRDENGNCPELPYALFIDEDFTDKEYHEKFPTIYHLRKYLMQTQETPDVRLVYLALHHMMKHRGHFLLKGNIEQIREFRTTFDQFLKVIRDEEIGFAKTIDEEIYEKIEETLKDVSLTKSAKKTKLIKILQVTCPEEKELLALISGGTVKLSNIFNDKSLDECERPKLSFADAGFDDYAGEIQTSLNEKYLIIESAKAVYDWAVLADILGNYSCISDAKVQLYKKHRKDLHRLKAFVRDNLSKEVYREIFSDVSGKHKNYCSYVGIAKINGKKKNIEGKKCTKEDFYGYLKKSVIARIDDLEKTEWLKQELEAGNFLPKQTTGENSVVPYQVHLYELNAMISNLEDKIPLFKKDGEKIRKIFTFRIPYYVGPLNGISVNGKTTNWAERKAGKIYPWNFSDMINEEISAERFIRRMTNKCTYLDHEDVLPKYSLLYSKFDVLNELNNVRVNGEVLSVEWKQRIYVDVFQRYRKVTQKKLKDYLRKEGLISENAVITGIDGDFKGSLTAYHDFKEKLTGVILNEKEKEEIILNITLFGDARSLLKKRLEKICPQLTDRQKESLSNLSYRGWGRLSEKFLSGITSPALAGEEWTIIRALWETQDNLSQLLGSKYLFRKAVEKENGELEKQEITYQSVKELCISPAVKRQVWQTLLIVKEICKIKGNPPKRVFLEVAREKTNSGRTESRKKRLQEFYKYCRTHEKELYDEKIQGELENSSDADLRSDKLFLYYTQMGRCMYTEERIDINELWDNQKYDIDHIYPQSKTMDDSIDNRVLVKRTANQEKTDIYPIQAKIRESRRAFWKQLQLAGLISLEKYKRLTRATEFEPGELADFISRQLVENRQTTKVVADILKQALPETEIVYVKARTVSDFRRRFEFVKIREMNDLHHAKDAYLNVVVGNTYLIKFTKSPVNFIESHSNRSYNLKKLFTDGKVERNGEIAWVSGKNGTIGTVRAVMKKNNILVTRRVHEATGGLFDQQLMKKGKGQIPIKGSDNRLQNIAKYGGYNKEAGAYFVLVESDDKKGQKKRTIEYIPIRLKKQVEESKEKLCRYLIEEKELINPVVLLDKIRFDSLFQIDGFFMCVTARQAKQLVLKGAIQLVLSPQNEVVLKKVIKFINRRKENKEVKVYKSDNLDSTMLNALYDEFAYKLNNTVYSNRLGGLGKKILAKKDKFNSLEIEEKCQVLYEILHIFQCNRISADLKLIDEKAGGVLTMSKNISSYENVCIVNQSPTGIYEQVIDLQNL

SEQ ID NO: 7005 - protein, 1593 aa, unidentified
  REGION 1..1593: note = Description of Unknown: Cas Enzyme sequence
MAAVFCAERRNVSAIYLFSACFWSVLLFLLNEKPPLKDEGHLMFSQRNNPYCELLQISNAKKRILFDIRDVSPVFFITLRQYKCIFMEKHILGLDIGTNSIGWSVVGTEKAETEDFLLPNARLLLAGSRIIPMDADTLGKFCKGNTQSQTKERTRLRGVRRLIERFRLRRERLNRVLTLMGFLPEHYAGSLDRHGKFPEGEEPRIAWVKGSDGKWQFLFKEAFEEMIAEFRQVYPQMSAVPYDWTLYYLRRKALTQPVGKAELAWILHSFNQKRGYCQVRGEETEKEQAAGKEEKYYALRVESVEDSGNRTKGKTWYDIRLENGFVYHYLAERKPEWEGKIREFIVTTAFDSNGMPKLKKNGEVDRSFRMPNDDDWMLQKVRTEELIDQSCKTLGSYIYEILLANPSQKVLGQLVRTVERRFYREELQKILLKQQEYHAELRDRGLYETCICSLYPNNEGRRRDLANRDFVHLLVEDILLYQRPLKSKKSLIADCPYEYHIYKDKETGEECRAPLKCIARSHPLFQEFRLRQFISNLRIFRREAMENGQMVFNKDVTADFFSDDVAYEELYKWLSVQEKVTQKALLKHIKAKECDFRWNYVEDKSYPAGETRFLLYKYLKKAGLGTEVLTTALEERLWHLLYSVSDCRQLYKGLHKLAVMQGWPDAETFAKVFVKFPPFPSAYGSYSVKAIRKLLSLMRRGESWKEENIPAEIRQRISRLLTGEWDEGISSRVREKTMCFTEVRHFQGLPVWLACYVVYDRHSEAGETPKWTSPADIDAYLRNFRQHSLRNPIVEQVLTETLRTVRDIWLSVGHIDEIHVEMGREMKRTAKEREQDSKRMLENENTNQRIKALLLEFLNPQYEVEGVRPYSPSQQDKLRIYEGQAIENASRDELEEYGPIIRRLSEADVEKRPTASEVMRYKLWLEQKYCSPYTGQNIPLAKLFTSAYQIEHVIPQSRFFDDSQSNKVICEAEVNKLKDNLLGMEFIKSHGGEIVTCTGGRQVRIFSSAEYDEFVKEHYGKNQTKRRKLLMENIPEAFSSRQLNDTRYVSRAVLAPLSHIVRQQEKNGVYEQTLVSKNVVVCNGQVTECLKRDWGLGDVWNRMIAPRFRRLNEQDKSERFGREEIMEGKRFFRIALPLELQKGFSRKRIDHRHHAMDAIVIACATRNVVNYLNNQSGSDDERFTRQDLKHRLCRKTRIDADGNYRWLVKKPWSTFTEDTYATLRDIVVSFKQNLRIINRCTNRFCCFDSAKGRMDTKMQTRGDRLAIRKPLHKDTVFGLVNLRSVDTVSLSNALDRPLRIVDKRIKAKIFELRRMRYDKKLIEKYFRENHDTLYGDINLKKIEVYSFSSDTEQKRMVATRKTLDTSFDKKKIMSVTDTGIQKILLCHLEKCGGRPENAFSPEGIEDMNASIRQLNGGRSHQPIRRVRVSETEGSKFIVGIRGNRSAKYVEAAKGTNLFFAVYRKQDGSRAFATIPLNEVVERLKQGLGVAPEKDSAGNQLLFVISPNDLVYLPTEEERELPIDVERMDKERIYKMVSSSGTQCCFIPYYVSKPIVDKYEYGSLNKMERAVTGEMVKEYCVPLLVDRIGRVRLK

SEQ ID NO: 7006 - protein, 1024 aa, unidentified
  REGION 1..1024: note = Description of Unknown: Cas Enzyme sequence
MKKYCDSETYRAFFNDYNSKTNYVNYIGSVEKNGKKYSAKRCSTEDFYKELKNLLKDRNVDVADKNIYDTLIEEIENQSLLPLQRSKDNSVIPNQVHKAELEIILENAKGYLPFLSVPDENGRTVAEKIISLFSFRIPYYVGPLSDRHINQGANVWIKRKKDGRIYPWNFEEMVDEEASNEKFIERMTNKCTYLFGEDVVPKNSLIYSKYMVLNELNNLKIRGNKIPVELKQELYRELFEKHTRVTGKMLLGYMKQHDESIVPEDLSGFDKDFKASLNSYLDFSKKVFGDAVYEDKVKSMIEDIIRWKTIYGDDNRMFKTVVRKKYADAIDDEKLKQICKFRYSGWGNFSEKFLKGIMGADKETGETFSIIEALWETNDNLMQLLSDRYTFKEEIDKYNAEASGIITEISYETLFKDIYTSPMNKRTIWQTVQIAEEVKEVMGCAPAKIFIEMARENESEEQKQKNKGKRNPRKEKLLELYAGCKKDSRDWTKEISDKEDREFNSIKLFLYYTQKGRCMYTGEPIDLDELMSSGSRWDRDHIYPQSKIKDDSLDNLVLVNRVDNAKKDNGIISPEIQKKMGGWWKELLNDGFISKKKYDRLTKTGEFSQEELGGFISRQLVETRQSTKVVADLFKKLYTDSYIVYVKANLVSQFRHDNLKMLKSRRLNDYHHAKDAYLNIVVGNVYDAKFTNNPMRWLKENYKTNYSINRVFDFDVKSRDKTVWEAPDKKSRTGGTIEKIRETMRKNNILYTEYTYCGKGKLFEETLHSKNSGSVIRLKKDLPTEKYGGYKKSLTAYFSLIEAEKGNKKIKNIIGVPIYIANILGHNPNAFIEYCENIKGLKNVRVLREKIKKNSLIIVDGFPMRIRDDDGVNNIGLKGNVQLIVNENIAEYIRLMEKYIDKNSEYEPDEKFYNLDDIKLNSVYDALCDKLCNSIYRNRPANKGKDLIKAKEAFLDLNLKDKVVVCNQILNMLRCDIATTADLRLIGEGIKAGNIAVNKNTLCKGEIVLVNQSVTGIFENKIKL

SEQ ID NO: 7007 - protein, 266 aa, unidentified
  REGION 1..266: note = Description of Unknown: Cas Enzyme sequence
  MOD_RES 258..263: note = Any amino acid
MKENYLYYLGLDLGSNSVGWAVTDEEYNIVRRKGKALWGIRLFEQADTAAERRIKRALRRRLERRKQRIDILQELFAEEMAKVDSTFYIRLNESRLHAEDKSENAGEKFLLFNDSDFTDKEYHMQYPTIFHLRKELIHSEEAQDIRLVYLAVHHIIKNRGHFLIDGNINNARSFKTTFEKLRQTVSDELDIEIRGELEEEFERILRNKRLAKSVKAKELTKLLEEDLKNYDKEEYKIKKSAAEQICKLVVGNSGDMKXXXXXXKQF

SEQ ID NO: 7008 - protein, 1214 aa, unidentified
  REGION 1..1214: note = Description of Unknown: Cas Enzyme sequence
  MOD_RES 261..271: note = Any amino acid
MSRILGLDVGTNSLGWAILDPFQKMFIDTGVVVFQQGIPEEKGREAECSPAAERRKFRAARRLKYRRRLRKYHTLKVLIENQMCPLTIPELQNWIRNGKFPIENREFIAWLSSTKEDNPYYFRAKAAERKLPPLELGRAFYHLAIRRGFRSSRKETSGSNEKELTSFKQEINRLTEILQRKQCTLGQYFYELFQKSEKIRKVNRCGRKEHYEPEFDKICEVQELPEPFVSEMRKAIFLQRPLRSQKYLAGHCSLEKKRVRXXXXXXXXXXXRYRMLSFINSIRKNGVPLNERERQKAQAAFLVSKPSFEFEKLVRKLYPGYPKNEWSEWNYPPDKSIASSPVTNQLQKILGTEDLFAWHHEYIGRDNKPKSMDYQTLFDALTFFDDDGMLKNFAIERAGLTVDQAEKFVKIRIPTGYANFSLYAIRKILPFLEAGHIQTRAVFLAKLPDVLGKDVFQKNGEKIIADMEQLEADWRMERESASESGERAAFLSLTERIKHYLEDEFHVTPGRFELLYRYNSRSDYQDHTRSGILPEVNLGMIYNPMVYRSLNVLRRLVNHLRKTGKINADTEIHVELARSVNDKNTRMAVADDQKKQENLRKQYKEAIEAEGFEATEERILRYVLWMEQNKHCLYTGKAIGLADLMSENDLVELEHTVPRSRGGDSSRENLTLCFTDYNRYTKKNGLPTACPNYDVKWKEYNSIRENIKVAGWEEKRENLRSRLEKLRSAARGNPQKRVEMLECRREFEYWCAKLAAFEITDEELRRKGFSRRQLADTGIIARHAVFLLKSVYGNTYSRNGRVTEWVRKAWGVQGIYEKKDRCDHRHHAIDAMCIAALTEDFFQKISAAYRADEEKAMAYARYNSTLPDAYPWRSFPEDVFEKSEEILVTHFIRHNETKQAKKQVHLVTPYKTADGGLRRVVTAGGDTVRGQLHKESYFGRIRDPESGEKKSVLRKELNSQNFKTESALAAIVDPAIREAVSAQLRLRMSSGKSFKEAMDEGGFRMRSGDDVFQGPPIRKVRSFVRTAEPLKIRRHAYASEAEYKNYIYADTAKGGNFKAALFRAPRGKLCYCLQSLWNWANAHKRPDYVPPEKQPGVGEFLGFIAPGTMVLVYENTPDELKKLSRRELNKRLYKIIVIEKDIQRLSLRYHCEARAKSEVQEEMKKTLGVEEASTISFQEPAKLLKITSGEFSNHLIFEGIDFVMSIDGEIRFLK

SEQ ID NO: 7009 - protein, 1142 aa, unidentified
  REGION 1..1142: note = Description of Unknown: Cas Enzyme sequence
MDKILGLDLGTHSLGWAIVEETESGYTLIDKGVDIFQEGVLRDKNNEKPAVQDRTQARASRRHYFRRRLRKIELLKVLVEHDLCPSLTEEQLTLWRKEKRYPLDEEFLLWQRTDDNLDRNPYHDRYRVLTEKLDLAVRQQRHLLGRAIYHLAQRRGFLSNRKDAGDEKEEGKVKSSIKNLSDEMAAAGCRYLGEYFYRLYQNKERIRGKYTSRNEHYLAEFHAICERQQLPETWRKELHRAIFFQRDLKSQKGLVGKCTFEPKKSRCPVSHPHFEEYRMLCFMNNIRIQGPQDNAPRPLTQEEIKVITPLFLRKSKPYFDFEEIARKIAGKGRYACKDDRNEAPYRFNFSRSTTVSGCPVTASLIALFGDNWLPEMCSLYRLGEGKTEDQILNDVWHALISFKDEDCLQAWACEKLQLSEDQAKKFTSIKIPSDYAALSLKAINKILPYLRRGYRYDEAVFLANLKAALPQEVFADSSRRLQIEQDIASLLLDFQTNPLNRHKTKEACIADYFDEHGLDTSRLDRLYHPSKTETYRDAQPNAEGILQLGSPRTSSIRNPMAMRALFRMRALVNQLLREGRIDRDTKINIEFARKLNDANRRKAIEQYQREREAENRKYAEEIRKHYASETGKEIEPSEDDILKYRLWEEQNHTCPYTGQPICISAFIGSAPVYDIEHTMPVARGGDDSQMNKTLCEKYFNREIKQNKLPSELSNHTDVLEQIESFGWRERIESLKKQIAIQVRKSKSATTKEQKDAAIQQRHYLQMHLDYWRGKYERFTMTEVPEGFSNRQGVDIGIIGKYARFYLKTVFNRIYTVKGSTTDAFRKMWGLQEEYTKKERTNHVHHCIDAITIACIGRKEYDRWARYTVAEEQFRFGKGPKPHFEKPWPTFTEDVKSVANELLVAHHTADNMPKQTRKKLRIRGKVKLNDAGQPIYMQGDTARALLHKDTFYGAIKRDDEIRYVVRKPLEQLQPTDVDKIVDEAVKARIKEAIDEVGFKTAMNTSEYTIWMNREKRVPIRKVRIFTPTVTQPISLKKQRDPSDKEYKQDYHVVNDSNYCMAIYEGVDKKGKTKRSFEIVSNLEAAQYFKASADRDDRPDLVPIADANGYPLKCILKTGTMVLFYEHTPAELYECTRAELVKRL

SEQ ID NO: 7010 - protein, 1373 aa, unidentified
  REGION 1..1373: note = Description of Unknown: Cas Enzyme sequence
MKKILGLDLGVSSIGWALVNEAEKPEESSSIIKLGVRVNPLTTDEQADFEKGKSITTNADRTLKRGMRRNLQRYKLRRENLIEVLKEQGFIDDDTILAENGNFTTFETLRLRAKAADEQISLEELARVLLNINKKRGYKSNRKCKSAEEEGQVVDSIDVARELYENNLTPGQYVYLNIFGIGKKSVPSFYRSDLEAEFERIWQKQSEFHPELTPELKESLTGKNKSQTWAIIAKPFGLVGKKRDVKGIELKKDNYRLRNEALMGRLDPEDLAIALQEVNDDIRNAGGYLGSISDRSKCLVFNNMTVGQYMMSELEKNPNYSLKNQVFYRSDYMDEFDRIWRVQSAYHPELTDELKHTIRDIVIFYQRPLRSQKGLVSFCEFEPQRKVCPKSSPIYQEFRTWQELNNLTIGGLPLSLDEKNVLAKELQVRESLSGSDIYSLLNKPKNQRLNFKQIDGNRTQSALFKSYFKIIEESGNGEYDLKKLSCDKTQEIVSDVFSALGAKVDFLVAGSLEDSKFFALWHLLYSYEGDNSKSGQESLVVKISDLTGLPSEYSKIIAGVNFEPDYGNLSAKAIKKILPFMKDGDEYSVACEKAGYRHSGKSLTKEEIESKVCKDHLESLPKNSLRNPVVEKILNQMVNVVNAIIDEYGKPDEIRIELARELKKSASERDEMTKANNDAKKNREIIEAELKSDFDISSPTRNDIIRYRLWQELGSNGYKTLYSNTYIPKEKLFSKEFDIEHIIPQSRLFDDSFSNKTLESRSINIEKGNSTARDYVLSKYGETGLSSYKANLDRMLNAKEISRTKYNHLLMKESDIPSDFINRDLRDSQYIAKKAKEMLEDVVKYVVSTTGSVTARLREDWQLVDVMKELNWDKYDKLGLTSYGDGKDGQKVRKIEGWTKRNDHRHHAMDALTIAFTKRSYIQYLNNLNARLEKVSDDSSYIDLSDYELDDLDRSDVARVVRAIQDKELHRDADKKLRFNPPMPLDEFRSEAKRQLEDVLVSIKAKNKVVTKNVNYTKSKRDDHKSQNTLTPRGALHKESVYGKISRYATNEENVGSGFDAEKISTVANATYRQALLNRLSEYGGDPKKAFCGANSLEKKPLYLNEMHTDCVPNRVKIVHMETLYTIRKPIDESLKIEKVIDKGIRDILKARLAEYDDSAKAAFSNLDENPIWLNREKGIAIKRVTIDAGVSVVEPLHYKKDHKGNVVYDSRGERIPADYVTYGNNHHIAIYEDTSGHLQEQVVTFYEATSRASMGQPVVDKDYRKSEGWKFLFSMKQNEYFVFPNPQTGFDPSEIDLMDPKNYAVVSENMFRVQKMSSKDYSFRHHLETSVEDNSLKTKDVVWKRITAIDKLKGVVKVRVNHIGQIVHVGEY

SEQ ID NO: 7011 - protein, 1038 aa, unidentified
  REGION 1..1038: note = Description of Unknown: Cas Enzyme sequence
MVEYSDPRDFGFRPETVMTALMPYEQYSSKTRRLILGIDMGIASVGVCLIDIRNHEIILMASHIFKAPVEGKQKDISARQSGASIRRGYRSVRRTTKRRKNRKKAVREIEKKYSLIPDDADGQWFAIRKGEPDVLHLRGKALLYKLNARELARILYAFAGRRGYIDHGKGTTDDDSGKVKKALSENRKILDENGYETIAQYLLKQPTSRNREGDYRYMVDIEMVTDEVHTIFRHQRDLGSDIATEELEGEYLSALRWLTDTSARDEKIYGRVGYCTYLGTPEKRAASSLISFEMVRAYEKLSNIKIEHQGREATYISPEKRNEIVASLFAVSKNPKPLKWSQLREKLDMQSSDSFDSRLPTDEKGDCIKIPAWNALCTGLFMSNRALLDRFHDDTDAADAVCSALTYASSGESLRNALKNLSLDLSEQDIDSLLDLPYASKLFSGYCSTGVRALQMLRDAFKDPQIEKLYNAEKATGLYEARQALAAARNESRDGLLCPYLEFDPTCTNPVVLRATAQVRRMINSIIRHYGLPDIIRVEVAKDLKRSKHEKAIIAATNKANKDSNEQAKKDLVAFYGLPNDAHVSSADFEKMWLYREQFGQDPYTGKGINLERMLNDRDYVEIDHILPFSRSCDDSKSNKVLCLTKSNRDKANRTPYEWMTSGEPSAPDFGDFCRRMDAWAGKGKSAHYTKSKLSKLKNSTFGKEEQKFIDRNLNDTRYMSRQLAMWVRECLPFPDDKRQHVFCVAGAATSLMRRIWGIGIVDEKGKKDRSDDRHHAVDAAVIACCSPEIVKGIARVNSGRSNIKERERLRYESMPYPEFKDQVEAWIPCIVPTRTVSRTATGSLLKDTVYPYVGVDDRGKDLYRRNGKIEPASTLWKDGSGGCKLYDGVYGLMAVFDEGMKKFGSWRFDPIYYIDVPNVRQDFIREFTKDLSIDYWTKVQLKGDEPRIFLKQGDVLLQDGCVMRYYKYNVSNGVISSYSKIGEKSVPLQKTGPLSEEKFPKQSKWDSSLTVMQEDCLGLCWLRFLSNRAGKFESFPV

SEQ ID NO: 7012 - protein, 1462 aa, unidentified
  REGION 1..1462: note = Description of Unknown: Cas Enzyme sequence
MSKYYLGLDIGTDSVGFCVTDENYNIIKKHKTVIDGDKTKYYGNHLWGARLFDEASDASGRRLAREARRRYQRRKARIVLLQDLFKDERNKVDSCFFDRLNNSAIHLEDRDELLRQKHLLFNEKGYTDKEFYEKYPTIYHLRLARIEHPEQKFDIREIYLALAHRIKYRGNFLTEGERKSIGSDPDIIINTFNEIDNILISRNENDENVTPSIFHCTIEMAEALIGIFKTITKKGDLYDARITALKLPNSKSDPRCKMIALIAGSNKKLSEVFSDFNWEDLEETAAIKADFSDEDFTEKTLPGLASAIGDERTQILVKLKDLYSLRILANLLKGESSVSKAMVGIYERHQKQLEILKNRIRRYNPNKYSEFFRKSMDLSNPKKPKPLINYVNYIGFTDVKGKKIRSAHSVSEDDLYAAIKGILPLDAATSEGFIEKQPGDKDKLIQIKKEIEDKTYLPRQNSKENGVLPYQLNLNERRIILKNQSAYYPFLGELDTDFNNPDKKCYKIESILKYKIPYFVGPLSEKATNHWIVKKSDERITPWNFHNVIDEEETANKFIENLKNYCTYLINEPTLPKESLIYQRYVLLNERNKWKINGAPIQVEDKAYLIKEVYFKKKKVSKKDVEEALSRHYKTDISISSSGTLASGEKGVTSDDFHASLSSWIAFLDDRAFGIALLHDKKKQELAEKIIYDITIFEDKELRKKRLTKYSLSPNQIKYISSLRFSDWAKFSNKLLTGLTTERVNTDTGEVFNYSIRDLRWETDRNFRQILTTKEGKNYKFDFRNQIEKDNDAENETLDEIIGSLYASPRRKRALHQTIKVVLELKKKLKIDSFDAYFVESTRSEQEKKRTKSRKEKILEYYKDAVKKVQDEHELASWKKELDKKDENELKGKKLFLYFRQGCKSVYTGEPIDINSLNTDYDIDHIIPQAKVKDDSFLNTVLVEKTVNNTKQDQYPIPKSILTDKGIAWIKYLSAISPDRMPKEKKNRILRSVNKPLTDQEISGFVQRQLVSTNQSVKAVCEVLKKIDKKAKIVYSRANYVSDFRKVFDLTKSREANDFHHAHDAYLNIVVGNTYDKLFSTGDPEVIKHKREYREALNRKPEYVFKHDARRLQTDTLIWKAKRYDEDGNEMADSIGTIDKVRKFLSYQDPLVTQRVFENVGEHGFFNHIHLHTAKDGNATFPLKAKGPFAKEGFETKYGGYSDLTNPYASLVRSEAGKGKHIYSLEFIPTIARKTLGKDKKALEKYLSEKNGLKNPEILIEKLLRRTIIQIPYKAQNGKEGSVRLGISGKSDSSICCINLSEPHIPSQYRKTIKKISKLLGLNDQAGQKTDTKVYEKYGNEDIPGKITRQEMLELFDYIIKDLYCRPEFEGLPGLKPTILKVKSYNLEFQQLSTLNQMTCLAAMLKIISCKSASGTSFEMIDSKTNNVGKLRASKNLSKGTKIIQTSVTGLTERVLFTVPED

SEQ ID NO: 7013 - protein, 1530 aa, unidentified
  REGION 1..1530: note = Description of Unknown: Cas Enzyme sequence
MKRILGLDLGTNSIGWALVNEKENDNETVNDNMIIASGSRIIPMDASIQGNFEKGNSVSQTADRTTARGIRRLLERHKLRRERLNRVLDVMGFLPEHYSAAITRYGKFKDDDGCKIAWKKDENGKLTFVYNDSFNEMLNDFTSHQPEWLAGGKKVPYDWTIYYLRKKALTQALTKQELAWLLLNFNQKRGYYQLRGEEDEQSNEKNKLVEYYALKVTGVEDTGEKKGKDTWFNITLENGMVYRRTASEAPDWIGKTKEFIVTTDLENDGTPKKDKDGNVKRSFRMPKEDDWTLIKKKTENDIDKSGKTVGEYIYDALLANPTQKIRGKLVRTIERKYYKDELEKILESQTRFIPELNDEKLYYKCIDELYHSNDAYRQSLDSYEFTYLFVDNIIFYQRPLKSKKSLIDNCPYEEHTYTDKETGEVKTAPIKCVAKSNPLFQEFRLWQFVYNIKIFERKKMVNGSLKTDVDVTDEFISDEDSLVRLFNFLNDRKDITQNVLLNTFFKIKKPKGKDSEYPYRWNYVEDKTYPCNETRAQILKGLKDAGVKEDFLTKDKEYRLWHILYSVEDKQEIRKAMNKFAEKNGLGEKFGEVFSAMPPFKKDYGSYSEKAIKKLLPLMRTGKYWSEDAIDKNTLERIGKIINGEYDESIRTRVREKAINLTDVSHFRGLPLWLACYIVYDRHSEAKDIIRWNSPADIDLYLSHFKQHSLRNPIVEQVITETLRTVRDIWKQYGKIDEIHIEMGRDMKNPAEVRAKISKRMTENENANMRVKALLTEFMNPEYGIANVRPYSPSQQEILRIYEEGALQSVEEVPDYVSEIISKFNQTDIKKRPTHSEIMKYKLWLEQNYQSPYTGRTISLSRLFTDDYQIEHVIPQSRYFDDSMSNKVICEAEVNQLKDRMLGYEFIKAHHGEKVNISMGEPVTILSVEEYEKLVQKNFRKNPVKMKKLLMDDIPDKFIERQMNDSRYISKKIKSLLSNMVREEGEQEEISKNVITCNGTITDRLKHDWGVNDVWNNIILPRFERLNEITGSQQFTTTSRNGHTIPDMPLNLQKGFSKKRIDHRHHAMDAIVIACTTRNHVNLLNNEAAMSKNNANRYQLSHKLRRYEDTVVTRNGEQRTVSVAREFLKPWPTFNADVEKALRNIVVSFKQNLRVINKTTNKYQHIEKGKKKTIAQTKGDSWAIRKPMHKDTVFGEVNLRRTKEVSLKEAMAKPKAIVDKDLKKKIMAMKELGYNLKQMTKYFEDNKDAWQDVNLKKINIYYFTKETNDRYFATRFGNDLVSLFSKTIKAEDAEKLIDKITDTGIQKILLRHLKANGGDCQKAFSADGIEEMNRNIKQLNNGKNHQPIYKVRIYEKADKFAIGTKGNKAHKFVEAAKGTNLFFAVYQKEITDSKTGETTKKRIFDTIPLRTVIDRQKKGLSAAPEEKDGARLLFVLSPNDLVYLPTEAEVNSGTIKQPLDKSRIYKMVSCTGAESYYIPFTVASTIVDKVEFFSLNKIGRAITGEMIKETCIPIKVDRLGNITEINNEKI

SEQ ID NO: 7014 - protein, 1104 aa, unidentified
  REGION 1..1104: note = Description of Unknown: Cas Enzyme sequence
  MOD_RES 560..565: note = Any amino acid
MSGYVLGLDIGITSVGYGVIDIDNNLFVDYGVRLFKEGTAAENETRRTKRGSRRLKRRKSNRLNDMKNLLKENELYFEDYRNYNPYEVRVKGLKEKLLPEELCTAIMHITKSRGTTLEALADESQDDEGTKATLSKNAKELSNGKYVCEVQLDRLNNNHRIRGAENNFKTEDYVKELKEILKHQDLNEELCDQIIEMVSRRRRYDQGPGSEKSPTPYGSYRMVDGVLKHVNLIDEMRGRCSVYPNEFRAPKQSYTAELFNLLNDLNNLTIKGEKITVEEKEKVVAFVNEKGNITVKQLLKLLDAQEDEVTGFRIDKNDKPLITEFKGYSKVLKVFKKYNQQEVLEDKSIVDQIIDICTKAKGIDERKKDIKELYPQFDDDLIEGLASIKGVSAYHSLSFKAMHMINKEMLTTEMNQMQVLYEIDQYDKNRKSLKGKKNIEPDEKAILSPVAKRAHRETFKVINALRKKYGEFDSIVIEMTRDKNSKEQVKRINDNQKRFKNENDQVDEIIKNVGIDPERVNGKTKMKVRLYLQQDCKTAYTQQDIDLHTLIFDDKAYEIXXXXXXSVSLDDSLSNKVLASRLENQQKGNLTPMMAYLKGKFTDGNLEKYKLFVNSNKNFNHKKRSNLLDEQDITKEDVARKFINRNLVDTSYACRTVLNTLQHYFKDNEIDTKVHTIRGQSTNIFRKRINLQKDREQDYFHHAIDALIVASLKKMNIVNSYLMHYDYSDLYDEETGEVFDVLPDKQFIDQRYISFISDLKNIYQESNQYNLGYITQEQMHYPLIKVSHKIDTKPNRQIADETIYSTRNIEGQDMLVEKIKNIYDPKEKKAIELVNNIINDDTDKYIMKHKDPQTFEKIKEVVLNHFNDYKDSKEYYVIDKNGKYSLKEESPLTSYYNENGAITKYSKKNNGPAITSMKFYSEKLGNHLAITSNYNTNNKKVILKQISPYRTDFYVSPEGKYKFVTVRYKDVFYKETIHKFVIDKNWYHEEKNKKGILEDWKFVCSMHRDELIGLIKPEGKKFVYDASINGGQTQYHDGKHYEILKFTATNNDESGRFEVKPINTNCSKRLMPSVGPFIKIQKFATDVLGNIYEVKDNRLKLEFD

SEQ ID NO: 7015 - protein, 1043 aa, unidentified
  REGION 1..1043: note = Description of Unknown: Cas Enzyme sequence
MEKRLGIDMGTNSLGWALVEMTEEGCVLLDRGVDIFQEGVAHGKSGERPAVQDRTDARALRRHYFRRRLRKIALLRVLVQHDFCPPLSQEQLDAWRKQGVYPVTDEFIRWQRTDDAADKNPYRDRFRALTEELDLTRREDRHALGRALYHLCQRRGFLSNRKDAGNETEDGTVKTDIKALSADMEAAGCTWLGEYFYRLYQRKEKIRSKHYTARNEHYLAEFRAICRKQRLGEELQQALERAIFYQRPLKSQKGQVGRCRFEKKKSRCPVSHPRFEEFRMLQFLNNVRVTGPGDAESRPLSQQELEAVRPLFLRKSKPHFDFEDIAKKIAGRNNYACKGDRTEAAWRFNFARGATVTGCPMSALLEAVFGNEWRRELCRLYTLGAGKSEERIIDDVWHALFAFEHEERLRQWLQEKLQISADDAKTLAAFRLPQGYASLSLNVINKILPYLRRGYRYDEAVFFANLGKVLPAEVYADPARRREVEQGISAQMDDLGDGEKTRKEERIRDYLRRYWGVEEKRLERLYHPSMIEAYPSASPNGQGLLQLGSPRIPAVRNPMAMRALFRLRVLLNELLREGKIDRGTKINIELARELNDANKRKAIERYQREREAENRKYAEEIRQQYVEATGHSIEPSEEDILKYRLWVEQGHCSLYTGKTIGISEFLGDGRRYDIEHTVPRSRGGEDAQYNKTLCEEEFNRDIKRDKLPSELANHTAILACVESCGWFERIEGLEHRVWGADRRAKSATTKSAKDFAIQDRHYWRMHLDYWRRKCEAFTMTEVPEGFSNRQGVDVGIIGRYARLYLQTVFDRVYTVKGATTAAFRRMWGLQEEYAAKERVNHVHHCIDAITIACIGSREYALWAQYVRQDELYRRGEADKPRCGKPWPTFTEDVRATADELLISHHTPDNMPKQSRKRLRVRGKVQRNDRGEVKYMQGDTARGALHQQTFYGAIERDGEIRYVVRKSLDQLLPADVEKIVDEAVRQKVREAVEAYGFKEATDPTKHTVWMNEEKQIPIRKVRILTGVKNPILLKPHRDVSVKEY

SEQ ID NO: 7016 - protein, 1219 aa, unidentified
  REGION 1..1219: note = Description of Unknown: Cas Enzyme sequence
MKKILGLDLGVGSIGWSLINADKDNKPIAILGLGSRIISLSPDESSEFTSGNAASKNQKRTQKRTARKGYDRYQMRRQALTDKLRKLKMLPDEHLIKLPVLDLWTLRARAATPGEKLTLPEIGRVLYHINQKRGYRHSRSDDSADKEQREYVQAINKRFQEIREEGVTIGQHFVKKLKESEVVTDKGAFYNYRIKEQVFPRDAYVAEFDRVMDCQKVFYPEELSEANINEFRNEIIFYQRNLKSCKHLVSRCEFMTRSFLDEGHRPVLDASGKLVISGPKVAPKSSPIFQVCKIWEEINNLSIRNKENDELHISPEQKKEIFEYLDNNEKITSAALYKILGIGKGDGWSVDKALSKGFTGNTTKVAISKALGKANDAKKRDLLRFDLRLKENGVNKDTGEIICEIDPECENEPLYKLWHVIYSINDKDAQSHALTSQFGINDEASLAELSKIDFVKQGYGSRSVKFMRKLLPSLMDGAKYSEACDVIGVNHSGSLTKSENEARELLQRIPQLQKNELRQPVVEKILNQMINVVNAVIEKFGGVDEIRVEMARELKLSKEGRAATAKNIRDREKENKEIAEKIIELGVTPSKNKILKYRLWQEAGQKCFYCGQPVGATEFLNGLDVEIEHVVPKALLFDDSFSNKVCACRKCNAEKRDSTAYDYMKSKGENAFNDYLRRVDTAFSEHKISFTKRSRLLTPADKIPKDFISRQLVQTQYISRKAMEILKQVCHNVYGSSGEVTSYLRRIWGYDEILHSLDLPRYREGGMTAEVSYEHRGQTHTEERIKDWSKRLDHRHHAIDALTIACTRQSVIQRLNNLSSMTAVAGEAMSLDKWTLAQPHFSVQEVSDKVGGILVSFKAGKKVTTPGKRYTYRGGKRILAQDGLLIPRGALSEESVYGRISALEKNVPVKKLFERVEDIVKPGIRAVVEDRLKACDNDVNAACASLKKEPLYLDAEKTIPLEYGTCYKAEYVMKYALSALKPKDVEYIVDEHIRKVVSERLSEYGNDPKKAFAEPLYADKSKTIPIRAARCYTDLRQVAPVKKDANGNNIGFVKPGNNHHIAFYIDSDGMYHKSTLTFWKAVERKKYGLPVIIRKPGELWDTIIDKNIPEELAAGLPAPDWKFVMSMQQNEMFVLGMEDDEFRDAMEGKDYKTLGAHLYRVQKLEHLNFRIQYDTILDDSKAAKDMKKFYEIRSFKAFWALHPRKVSVSLLGEMALKDD

SEQ ID NO: 7017 - protein, 1510 aa, unidentified
  REGION 1..1510: note = Description of Unknown: Cas Enzyme sequence
  MOD_RES 687..696: note = Any amino acid
  MOD_RES 1112..1116: note = Any amino acid
MKKILGLDLGTNSIGWAVINASQKEDNTDSLQNISSCGSRIIPMDAAILGDFDKGNSKSQTAERTRLRGVRRLLERSLLRRERLHRVLSLMGFLPKHYARQIDRYGKFIPDSEPKLPWIKTENGKYQFIFQDSFLEMLTDFQLRHPELIANGKKVPYDWTIYYLRKKALTQKISKEELAWLILNFNQKRGYYQLRGEEEEEDSKKRVEYYALRVVSVENTGEKKGKDTWYNVHLENGWIYRRSSNLPLDWNGKIKEFVVTTELDEAGNPKVDKDGNVKRSFRAPKEDDWNLLKKKSESIIDQSKLTVGTYIYESLLNVPNQKIRGKLIRTIERKYYKDELKAILDAQKNFHPELNDRDLYYACVNELYPSNESHREMLSTHDFTYLLIEDMLFYQRPLKSKVSLIADCPYEARIYKDKEGNKCSVALKCIAKSHPLFQEFRLWQFISNLRIYQREKKIGTSLKTDVDVTSEFLRNEDDYVALFDWLYEQKDISQKKLLGYKPFQLKKNEQINYRWNYVEDKLYPCNETRWVITSRLEKIGIPSSFLTKEMEESLWHILYSITDKQEIEKALQTFADKHQLDTAFVSAFAKMPPFEKEYGAYSQKAIKKLLSLMRMGKYWSEKNIDLKTQERIEKILSGVCDETIRMRVRDLAFHLQEITSFKGLPLWLACYVVYDRHSESKNNNKWXXXXXXXXXXLNAFKQHSLRNPIVEQVITETLRTVRDIWKQEGKLDEIHIELGREMKNPADKRAKMTAQALENENTNLRIKALLTEFMNPEFEIENVRPYSLSQQEILRIYEDFALSNESNIPDDVALILKKFRESDVHKRPTRSEVLRYKLWLEQKYRSPYTGEIIPLGKLFTPAFEIEHIIPQSRYFDDSLTNKVICESAVNKLKDNSLGYEFIQKHHGEKVALGNGKQATIFSVEDYEAFVKQHYAANRAKMEKLLLEDIPEKFIERQLNDSRYISKVVKSLLSNIVREENEQEAISKNVIVCTGSITDRLKRDWGIMDIWNKIILPRFQRLNKLQGTNDFTTISAQGHEIPAMPLYLQKGFNKKRIDHRHHAMDAIIIACANRNIVNYLNNGSALKGSTITRYDLQHILCEKTKINATGNYXXXXXRKPWETFPQDVYQALKGIVVSFKQNLRVINRTTNHYLHYDATGKKVLVKQTKGDSWAIRQPMHKDTVFGEVNLRMKKTVSLNEALKQITSIVDKDLKHKLQELIKDQYDVKQIKKYFEDQADVWQDINLKKIEVYYYTQETKDRYFATRKPLDTSFDRKKIKESVTDTGIQKILLNHLERNQGKAEIAFSPDGIDQMNQDIISLNDGKSHQPIYKVRYYEKADKFAIGKASNKSRKFVEAAKGTNLFFAVYETTEEDKKTGNLVKKRSYASIPLNVVISRQKRGLPSAPENENGDSPVFVLSPNDLVYVPKQEELNTGDIQFPIDRNRIYKMVSCTGNEAHFIPVYIANPIIQTVELGSNNKAQKSWTEEMIKEVCIPLRVDRLGNISLLNQTE

SEQ ID NO: 7018 - protein, 1389 aa, unidentified
  REGION 1..1389: note = Description of Unknown: Cas Enzyme sequence
  MOD_RES 1305..1311: note = Any amino acid
MKKEKKMKEVSVALNIGTGSVGYAVINLPIAGAYDIVKYKGNDAWGSILYDEGELCADRRGYRSSRRNLNRKKWRVDLLQEIFADEISKIDKRFFIRLEESCRWRDEVSDKNICFDEENYTDKNYYQEYPTIHHLIYDLMRNKRPHDIRLVYLACSWLLTHRGHFNSPLDINRLEEITGINQAYNEFMAYFVENGYDKPWNEVDSSTFGQVFRKKLGVKDKFTELKNLLLDGKKPSQVCTESFPYSQEGILKLLSGGKYEIKKLFGKEEYDEIKSVSLGMDDESNDKIAEMIGDDMDLITILNKLYDWYLLVDILEDTSGNTCSCISEAKISIYEQHKDDLKTLKYIIKKYTPEKYNEIFREIHADNYIAYSHHIDKNMSQEKYKYTNIELFSDYISKTISKIQPDQSDMERFCDMNKRLALHTFMPKQKTTDNRVIPHQLYEYELQKILKNASCYLPFLNDIEDGLSNAEKIMELFLFKIPYFVGPLNNHSPFAWVKKRSNEKITPWNFKDVIDEDESEKAFIRRMTNHCAYIHGASVLPKHSLYYQKFTVLNEINSIRIHGKKISVSAKQGLFNDVFKKKKNIKKSDIETFLIKNGYMNSGEENAITGVDTQIHSMLSSYLHFKNFLESETLSVEDVEKIIERSAYAEDKSRLLKWLKKNYAELSEDDMKYICKCKIEDFGKLSGEFLYGIEGVDKKTGEITTILQTMWDKNLTMMEILYNSRYTFAEEINKMNAEYFNGKELTIEDVLDEYHASNTTRRAVYRVNAVLKDIEKNIGKPSKIFIGSTKGMSTTTVKTKSRYEQLVELYNNISKNYKAIDISIVKKELESFGDDANNRLQSDAIFLYFMQLGICAYTGEKITLNVLSGRKKKGDIEEYNIDHIYPQSVVKDDSIANNKVLVLSKINGRKDNDYPIEQGIRKKMLPMWEQWKSIGIINDEKYNRLTRNEPFSIDERKEFTSRQLTLTSQLTKITSEVLKNRYRNMDIKIIPVSYRLLSDFRKEFDLPKSRTYNDLHNATDAYLEAVVGDVYYNKFFKKPFDFKSKYSIKLKAIFQNQQKEDDEIIWNGKSDLIKVQKIAQKTSAHIVKYSSFSTGKLFDVQLVSRKPGLVEFKKGMPTERYGGYNKPKIMFFIPVKYSIKKVENIIILPVELLYGKQFLEDKNFAIEYSHRRLEKILGKTIDNFSFPLGMRPLKMNTMLSLDGFRVCITGSSSRGKCLIVQPMMQFVSDPSWIQYLKYLENFARKIQKDPKRKYCEKYDKITKEKNAMLYDLYIEKMQYSIYTKRQNIEKTLQTLLNGKSLFEQXXXXXXXDINEQCLVLLNIHSVFGRMTNGCDLTLIGGKKSAAATSSFSAIMSNWKKKYSDVRIIDQSPAGLIEKVSNNLLKLIDD

SEQ ID NO: 7019 - protein, 1016 aa, unidentified
  REGION 1..1016: note = Description of Unknown: Cas Enzyme sequence
MNYRIGLYLDNDKIGWAAIRENEEGHAEHIERVGVRFFPIAENSFNGSTPGSERRMYRLARRRYTRQKYRFAKLRELFSEVGLPPMNTLVHKPVDYLWQLRTDGLDRQLSAEEWVRVLYHIAHHRGFQPGTGEQLSETFSNNAKIRKAIHKNQQRMDEQNYRTVGELFYRDSRFRPNGLFSPFKTGIPYITSVSRDMIREEVVLLFYTQRILGNPFATEVFEQKYTEILCRQRFILSGPGPNSPYAGHKRRFGGIYCPLEPRRERCPDATPLAERFRFLCMVNAPYSIPPHTQPIAKTEEQKRQIRAAATKNPAQLYAATNNVLNLDPKTPLTLYLDGIPYSAASMNNWIIPHGRRLLSALSKKFPDEQGILHKHWEDLLLLFVSTPEKYWKQRLKEFHFSKELCDLLAKAHLVQRARYSRKALGRIVPLMEKGMSMEEARDKCYPDSPVSNTSTKLNFKNFYHVARPATDRTLSQAIVLIKALLREYGMPTHIRISTSYEMGKPLSLRKKHKKIQENRDKKLAPLFQTASGFLQRSLTSDECTRIILWSLQNHACMYTGTMLTFAQALSSTDTAVDHIIPYSDCYDHSYNNLVLVLRSASNHRNHLPGVTFGRDIRYRNRASERSNRKCRINLLASQWTEQDSINQRQRSLSNPSPLLTGFALFLQRTLSAQDNILSSVTPVNTGTIGLRLSRVFEQVPPAMDSAGQAILTALSEPHTCEQLSDFFANDYEGTLFQPWPSFHEEFSALCSPESSCFSHMAQHKVRGAAHRDTLMRRRGDEIVAKRALIQLKLDANNEIADYFQPERDRLLYSALRNQLIAHNGNAAEAFAEPFYKPKANGDIGPLVKSVPIIQHPRAFVSVRGGIGTHGDMIRIDVFRTSNNEYYYVPIYVKDTLQPTLSLRAVTKNPNRMLLMSESDFIFSLYSNDVIYIELPDTITLKSVSSNDTINVNHGYFLRGNVKIKSGTFEVSTLDKQYIRTSIPFYSLRSLYKCEVDPLGKIRKITSPEKRMTFHLK

SEQ ID NO: 7020 - protein, 1331 aa, unidentified
  REGION 1..1331: note = Description of Unknown: Cas Enzyme sequence
MKKKYGDYYLGLDIGTNSVGWAVTDEKYNILKSHGKAMWGIRLFEEGKTAEERRLHRAARRRQDRKVQRTKLLQELFAEKIAEIDPEFYLRLEESKFWSDDKTVNQRNTLFNDKNYKDRDFYREYPTIYHLRKALIEGKKEFDVRLVYLGIHHILKKRGHFLFEGETTDAIADFEEIFADLKRYCKEENISSMECEDIEILKNVLKDTSTTITSKKSQLNKLLDAETKQEKALFALLAGATVKLSELYNDDELNSENVTKICFKNGAYDEKQEEVESILGERAELIQKAKIIYDWAILEETRKGERFLSMAKVKSYEEHKKDLYLLKQVIKEYCPEKYKLILSDSSQKNNYAAYVGNSNGEKIKRCTQEDLCKFLEKIFKDYHLDESYNNMIFKIKNRTFLPKQITGDNSVIPYQLNKQELHVILENASKYLTFLNEIDDTGFSVSEKIEKILEFRIPYYVGPLNDQHKDSGNCWIKKKQGMENEKILPWNFEKIVDQSGSAERFIRKMTNKCTYLIGADVLPKNSLLYSRFMLLNELNNIKINKEPIKTEIKNRAIDELFKKHKKVTIKNFKKWLYTEVGCYKDVEVTGIDGDFKASLASYIDFQKIIGKTMDDEMVEELILWIALFGDDKKILKQRIIEKYSDYLTEKEIQRICKLKYSGWGRLSRELLTEIYIPDKETGEKINIITMMQNYSLNMMQLLSRKYGFVDGIEEYNQNQVSEKQEISIDMLDDLYVSPAIKRSVWQTLQIVKEIEKVTGHEPKRIFIEMARGGEVNKTRKSSRKSKLLELYENHEEDRDWIAEIGSRDESDYRSDRRYLYYTQMGRCMYSGEKIPLKDLYDKNIYDIDHIYPRSKVKDDSLDNRVLVKRQLNKDKGDDYPISPDIQKERHNLWKTLLMKNFISKKKYERLTRKTEFSDDELADFISRQVVETRQSTKAVANILKRQFEDSEIVYVKAGNVADFRHDKKMIKVREVNDYHHAKDAYLNIVVGNVYFIKFTKDPRNFLNEPSGKNYSMKRIYDFDVIRNGEVAWKRGKTGTIATVRKVMQKNNILFTRYATENKGGFFDQMPVKAGKGQMPLKTTDERLKNIERYGGYNKISGAYFSLIEHEDKKGKRIRTIEYVPVYMAEQFRCDKGVQKEYCTKNLGLKNPKILIPKIKINTLFEVDGFRMHLTGRTGAQLIFQGAMQLVLGEELETYLKKVCKIHKQNPGFKISEWDGITKEQNLLLYDTLLSKLENTKYKVRLSAQIDNLKQAREKFIKLTLEKQSEVLYQELFLFACNVVTADLSLIGGSKYSGKTLISNKMTNYTEAKIIHQSITGLFENEVDLLKL

SEQ ID NO: 7021 - protein, 1044 aa, unidentified
  REGION 1..1044: note = Description of Unknown: Cas Enzyme sequence
LLIYWQAYPKRLKRQEANMAAYEDPREHGFNPDLVKTALMSREQFSSKPRKLTLGIDMGIAGIGICLMDELNHEIVLMATHLFDCPWNPKNKTSLASARRQARSQRRNIARRAARKRHIRKILMAHGLIPEGATAEWFSIRKGDQDNIQLRVKGLGEVLGSRELARVLYGFAGRRGYIDHGKADNDKDAGKVKKALKANAEIMEANGYETFAQYLITQPRIRNRQDDYTHTIDIDMVVDEVHAIFRHQRELGNNLATESLEGEYLAALRWLTDTTMRDRIIYSKVGYCTYLGEPIKRGPKSSISSEMVRAYQTLANVKIEHIGSAATQISPLVRNQIVHDLFKVSKNPKPLKWSQLRKRLGLADTDTFAGIRQSDEAKDICVKVPAWNELCSTLHDLNPALLNRLHDDIDLADAVCAAVTFASSSESFATRIAEQTDGFAKEDMEALLELPYGSKLFTGYGSTSLKALQMLRDAFEDTNINRLYDAEVATGLYDAREALAAKRNVTDDGLLMPYSRYSPICTNPVVLRSCAQLRRVVNSIIRHYGLPDRIRVEVANDLKRTEHEKKLITSGNIYNRRTNEKAKADIVEFLGLPDAAQVKGRDLEKVRLYDEQSGKDPYTGQGIDFGRMLTERDYVEIDHVLPFSRSCDNSKTNKVLVLTKSNRDKANRTPYEWMTSSEPTAPNWDEFCIRMDVWAKGKEPKHYYSAKLAKLMEDSFTDNVEDFISRNLNDTRYMSKDVAKWLADCLPFPDDGRRHVFCVSGAATAFMRGIWRIGILDDNGKKNREDDRHYAVDAAVIAACTSSIVKGIALISEEHATNRDADRLLNGSLPYPEYRDQVKAWIPCIVPTYSPTRTATGALFKENSFSFKGIDGKGKDLIKKKKGAWGPCTTAWKDGKGTARAYDEQYSLLAVYEESAARWLFDPLYYIDVQKRKTEEPFIRKFSKDLSIDYWKKIPLTGNEPSLLLKRGVVLIQDGMVGRYYGYDIAHNNVKLSSSGKVSFQKTGPLAAEKFQTPTKWTDELRVMQEDCLGLCWLEFLTERANRC

SEQ ID NO: 7022 - protein, 1219 aa, unidentified
  REGION 1..1219: note = Description of Unknown: Cas Enzyme sequence
MAKILGLDLGTSSIGWAIVEQHDNGYSLLEKGVDIFQEGVARVKNNEKPAVQDRTDARALRRHYFRRRLRKIELLRVLVRHDLCPPLTDAQLDAWRSRKIYPLTEEFLRWQRTDDNTDRNPYRDRYRALTETLDLTARSDRHALGRALYHLAQRRGFLSNRKQAGEEEEGTVKEGIRDLTADMADAGCTYLGEYFYRLYRQKDKIRKHYTSRNAHYLAEFRAICEKQHLPEEWQQALHRAIFFQRPLKSQKGSVGRCTFEKGKSRCPVSHPHFEEFRMLSFVNNIRVQTPADSEPRSLTQSEAEAIRPLFLRKSKPHFDFEEIARKIAGKGKYACKDDRNEAPCRFNFSAATNVSGCPVTAALLFVFGGDLRTIRSRYTLAGDKSDEQVVNDIWHVLFAFDDDELLFDWGREKLGLSPEDARSFAAIRLPQGYASLSLNAIDKMLPHLRAGYRYDEAVFLANLKAVLPAAVWNDRGRREHIEQGIAEVVRNYERNPYDKSDTKERRIAEWLRDQGIDTARCDRFYHPSMIEAYTQARPDKKGLLQLGSPRTAAVRNPMAMRTLFRLRDLLNQLLREGKIDRTTKINIEFARGLNDANRRRAIEQYQREREAENRAFAEEIRKEFAAATDGRFEPTDDDILKYRLWKEQNNICLYTKKQIGLSDFIGSDTRYDIEHTAPRSRGGDDSQMNKTLCEKQFNRDIKRTKLPTELANHQEIMARIEALGWPEKIAGLQRQIEGQRRRSKNATTKAERDSAIQRRHYLQMHLDYWRGKYERFTMTEVPEDFSNRQGVDIGIIGRYARLYLKTVFERIYTVKGATTSAFRKMWGLQEEYTAKKRVNHVHHCIDAITIACIGRNEYERWAQFAGDEERYLRGEAARPRFEKPWPTFTRDVMAVADELLVAHHTPDNLPRQSRKKLRVRGKIQYGNDGKALYMQGDTARGPLHQQTFYGAIKCDDQIRYVVRKPLDQLQPSDIEKIVDEAVKARMREAIAAYGFKEAMDPMKHTVWMNEAKGIPIRKVRIYMPSVTSPIHLKKHRDLSVRKYKQDYHVANDSNYCMAIYEGTDARGKTKRSFRLVNNLEAARYFKASTDRTACPDLVPSSDKNGYPLKCILKTGTMVLFYVNSPEELHECTPNELVKRLYKVTGMSMLALQQKYYFGSLIFKHHQEARPAGELKIKSGVWKIGEDYRPVISILHTQFNACVEHDDFDLTVTGEIKFKR

SEQ ID NO: 7023 - protein, 963 aa, unidentified
  REGION 1..963: note = Description of Unknown: Cas Enzyme sequence
VEKFLDCARRYYREADDAKVGLWFDNAEGLLERSDLHPPMKKKILPLLVANILQTDETTGQKFLDEIWRKQIKGRETVASRCARIETVRKSFGGGFNIAYNTAQYREVNKLPRNAQDKELLIIRDRVAETADFIAANLGLSDEQKRKFANPFSLAQFYTLIETEVSGFSATTLAVHLENAWRMTIKDAVINGETVRAAQCSRLPAETARPFDGLVRRLVDRQAWEIAKRASTDIQSKVDFSNGIVDVSIFVEENKFEFSASVADLKKNKRVKDKMLSEAEKLETRWLNKNERIKKASRETCPYTGDRLAEGGEIDHILPRSLIKDARGIVFNAEPNLIYASSRGNQLKKNQRYSLSKLDPDYLNKVFKTSNIAAITAEIEDVVTKLQQTHRLKFFDLLNEHEQDCVRHALFLDDGSEARNAVLELLATQRRTRVNGTQIWMIKSLANKIREELQDWCRTTNNRLHFQAAATDVSTAKNLRLKLAQNQPNFEKPDIQPIASHSIDALCSFAVGSADAERDQDGFDYLDGKAVLGLYPQSCEVIRLQAKPQEEKSHFDSVAIFKEGIYAEQFLPIFTLNGRIWIGYETLDSKGERCGAIEVSGKKPEELLSMLAPFFNKPVGDLSAHATYRIQKKPAYEFLAKAALQPLSAEEKRLAALLDALRYCTSRKSLKSFFMAANGKSLKKREDLLKPKLFQLKVELKGEKAFKLNGSLTLPMKQDWLRICNSPELADAFGNPCSADELTSKLAQIWKRPVMRDLAHAPVRREFSLPVIDNPSGGFRIRRTNLFGNELYQVHAINAKKYRGFASADSNVDWANGILFNELQHENLTECCGRFITSADVTPMSEWRKVVTEDNLRIWIAPGTEGRRYVRVETTFIQASHWFEQSVENWAITSPLSLPASFKVDKPAEFQKAVGTELSELLGQPRSEIFIESVGNAKHIRFWYIVVSSNKKMNESYNNASKS

SEQ ID NO: 7024 - protein, 1461 aa, unidentified
  REGION 1..1461: note = Description of Unknown: Cas Enzyme sequence
MNKENTEKEYKAKEECVTMAYDVGISSIGVSEVHEFKDRKPEVKLGVRTFKAGESAKARGENRRSGRNITRKNGRKETMKFIFDEQGLIPLEESSKENYLRIESSKKNPVTIWDIRNKGLEEELTNKELLQCMTHMAKSRGNFLYEHINFESSNGGITKEGLIEAISCMFKPFVKFKENSDIIDSFKKDVIVDEIFKENNDENKDKLKKADFKKYLADEKDKESLDNIHSIFKFFTNCKANLSFIDGWNFESEDGKAVTKNAVELAEVADELEAGSSLAQLMNLYNEVYIYLIIKDYGYVCRVAKAKMEKHAEILKENTQWKRENESKSNCKAFEDYEKNVKGLMSSTRLKNHANSLKPVRNMLNNYPNGLILKEARAILRKQQEYNTRITDEFIAKVIAVLEGRIPFYVGPLGENSPYAWCEKNGNFKYSYLTSEKCVNEAETMKNFKQCMQSKCNYLPEEYALPKGSLVLETQIILNELNVLTALKDEEPYYLTFEDKVNIIDNLFMKKNEVTYKNVKKLLDLDYFGTQGGDDGKKFNAKYSVYPKVADILGKDFKLESIADILTETEKVDRIESVILSLNMLSERKIKKQYFEEMNLGNSKKESSAIAESLSKLSVKGFGKLSKKFILDTPLNKSGDSLLCIMFASNTKDDCHEINQILFQAEDEHGNVLDFKEGKWEKLLKENPDISFAELMNRKDVASSMPISRTVVRALNEAINQYKRDISRLGHAPDRVIIETARDLTGKPSNKKQNKSRIQRLEDIFVSMKKKYTQEAGKKNDIEKVSEESRWWNKNMPDTWSDFVSMFAFIRNEGTRLQIMELYLSQGGYDLVTGQKVDIHNCERDHILYRGFGDNSMDNMCLENKMTNDKKGNHVPIEYIYDNADNIEEARKKVQAYHKRVNYCKKLGLISDKKVERLLLESSKDVFEFINKNLVDTNWIIKEFVGFLKAYNKLKGYNVKVVCMPSSFTALGRSIFGFNKDRNLGNQHHAYDAAVLCIMDGCLREFYPGYETGHGNQARYQEFYKMVVRNEEKQADKKENAKLYSFIRKAYNLHFNDRYTVDNPDSFIMDIKRTIPYRSQKSLKKRTGQLFNATLEPPRPENASEHELLDLLGINNKICSHSSLHSFALDVYEYTVFEKKGEKKHLAKKQAFIFLPRCIVDSKGHINKDKYLLIANWFSMPDKKSREIFYKEFVKQNRVIGDFNNTDKYSVHGELLDMHTGQIRKNVRFNRFYNGDMVYDTGSNMISYISGGGPKKGDAFLYSMNTFSLAEIEKRAARFKKAVTDTVKDLEDKQVLESTLRNERLNSIREKIAKLSEKDQGKALELFESHLPKKAPETIYDIPYEDIADYVIENVIHIQTKNVYTRQTSDKDRHNAYIAVCSAVQDKIYSWSKVQGYKYSFFKGYRGLFETLAYCSLLMEQSNIIQSLGLKRTLKSSSVDSNKNIVKIIPLNKKGRVESCH

SEQ ID NO: 7025 - protein, 1093 aa, unidentified
  REGION 1..1093: note = Description of Unknown: Cas Enzyme sequence
RNIMKSNGNQKRISDYYIGLDVGTDSVGWAVTDPEYNVPRFRGNAMWGVRLFESANTAAERRQYRTARRLNARKRQRLGLLELLFAEAISKTDPAFFIRMKESSLFGEDKTEISEYPLFNDENYNDRDYFKAYPTAYHLRNELISSDKPHDVRLVYLAIHHILKSRGHFLFDMELSDEYRTVGDLLDDFTERLLDEYGAEAEFKDKAAFVSVITDRNTGITEKKKRIKGLASVKSETEQLDQLDPMKAFDMLTGAAVKLSDLFCDEGLKSAKSLTLDSDINEAADDLTETLGESRFDLIMQLKQIFDAAKLAQMLGSHQYICEAKVEQFNTNKSDLRRLKVFVKENAPDEYNEIFCQKKDKLNNYAAYSGRTRRSGEYSCKREEFCKYLLKKLPGLEIADGYGDIFRKIKNNDFLPKLKGSENSVIPNQLHLKELRKILDNAEHYLEFLSAKDSEGISVKEKIISVFGFRIPYYVGPLNTKSPNSWVVRTDEKIYPWNFENNVDTEKSAEEFIKKLINKCPYTGDDVLPRESLLYSEFCVLNEINPLAVNGKPLPIEQKNEIFDELFLKSHSKVTKKSIGKFLLRKGYIKEGDEISGIDDTVKSKLKSYHDFSRIMDVRENREMIEKIIKAVTVFGDDRKMLKRWLKKNCGDLEKSQVDSICRLSYSDWGNLSETLLAGIYTPDENGEARSVIQMLHETNDNLMQLLSNKYYFGENAEKYRNDKYAPSGSLSDMMDGIYLSPTVKRSLLQSIKIVDEIVDAEKSAPRKIFIEVARDRENDNAKERTVSRKAKLTELYKSCGKEYIELYNELLSRDESELRKDALYLYYTQLGICLYSGEKIELEKLSTDYDIDHIFPQSRIKDDSLDILRRKLNSAIGSHDVKRTFGMAHKLSADSFGESFLLSFTLVGIFYTFGNRFRKHFRVFADFFESASEARQYLQIITIAEKAARLAVKDNSSDIRFIRKCLTKRSVPFISVAVRFESALIAHLIADFLSIIVKCGLTVRVVLIAQQSNRQTETESSVVVCNHIERCVGVVEIFYLLFGIHIIVFLSTSHTIHSHDFVLGFFPDKFRCRHCFAQKVRLSVIVKRDISV

SEQ ID NO: 7026 - protein, 1004 aa, unidentified
  REGION 1..1004: note = Description of Unknown: Cas Enzyme sequence
MQMKKYYIGLDIGTNSVGYAVTDIEYNIIKIHGKSAWGVTAFDEASGCVERTSFRTGRRRRDRIKFRVQLLQELFALEIAKVDEKFYERLQKSHLYREEVGESYTLFCDASYTDVEYYRQYPTIHHLITDLMENSEPHDVRLVYLACSWLITHRGHFLSNVNRENVGEIRDFETVFHKLNTFLTENGYQIPWSTENFMEISKVLKKKDTVTSKFKSLVATMLQGKKPSKEPLEEFPYSLEAVIKLLAGGTCKLKDLFAKEDYEDAGSICLGMDEEKYAEVMTAIGEDYELINALRAIYDWAILSDVLGDEYSISAAKKSVYHQHEKDLAFLKHIFRKYNPDNYDKMFRNSGKESNYASYVYHTNEQKTKDFKKCKSKEEFCKYVLKIVKSIQPDEDDKERFEDMLKRLELQTFMPKQKDTDNRVIPYQLYWYELDQILTKAEVYLPFLAEKDENNFSVSDKIRSIFLFRVPYFVGPLNEHSSYAWLKRKHGKIYPWNFEQMVDLDESEERFIKRMTNTCTYLPGEKVLPKDSLCYHKFMVLNEINNITINGLRIPVDLKQKIYEELFMQKKKITRKKLVDYLISNGVIEKGQEDLISGIDTDIHSNLSPQIAFRRLLKEGILSEKDVEKIIERSSYAEDKHRLDNWLIKNYPILSEEDRKYICGIKLKEFGRLSKRFLCGIEGVDRETEKGYTILSALWNTQNNLTELLSSRFTFRQAIDDYVEEYYIENPRTLEQRLDEMHVSNAARRPIYRTLDLLKDVTKALGAPEKIFIEMTRGAATQKDKAGRTTSRKQQILKLYEECDDKDVNLLRQQLEAMGDTANNRLQRDQLFLYYMQFGKCMYSGEPIDLSQLGTKLYDIEHIYPQSVVKDDSILNNKVLVRTELNGDKNNTYPISSSIRQKMTPFWHALKEKGMITEEKFKRLTRSTPFTVDERWGFINRQLVETSQSTKALATILKEKYPQTEIVYAKAKLASEFRQEFGLPKSRIYNDLHHAVDAYLNIVV

SEQ ID NO: 7027 - protein, 1311 aa, unidentified
  REGION 1..1311: note = Description of Unknown: Cas Enzyme sequence
MNLRNVEEYNIGLDIGTGSVGWAVTDSDGEICHFKGKPTWGSRLFPSALPASEASVHRGQRRRYTRRKWRLSLLQELFASEIEAVDPDFFIRMNQSHLLPEDRQESHRDYLYTLFNGSSFDERAYFEKFPTIYHLRKWLMETDEKADPRLIYLAFHNIVKHRGNFLQQDNPGLNSENANVKGSVEEFCEQLQEYCDNLDIPCTVQDHVDEIDMVMRDTHSTKSRIQERIQPLLGIGACDLVDKPAIKKMTKALSAALVGLSAEMADIFFLTDEKPEEGKTKIYLSKDEDVETFGEICPDEAHALFESMNKVYSAFVLQEILSSCPGESLSANKVKDYEQYGEDLKLLKKLVKEHAPGKYDEFFRGEFYEPSELHPQKYVYNKAKAKGYTKYNEVRGSAYDDFKKEVEKLFKGTAAVEDSRYLDMIERFKEEKFLRRLKTSDNGAIPFQLHLEEMDRIIKNQARFYPFLEEKKKELDSLVTFRIPYYVGPLTQKNARKDRKGKKRFSWSKRIEGKEHEVIKPWNWEEIIDKDRSATEFILRMTGTCSYLQGEPVLPRCSLLYEEYCVLNELNGAHFTQDGDKERRFDYKDRSDMVKELFRRGRVTYKKVSEWMRQRGNSNVRVSGGQGENGFESKLSSYIFFAKYVFGVDEIPERDLPMIEDIILWNTIFEDRDILKDKIKRNFGDRLSDEQIKKIVKKRFTGWGRLSKKLLCDIKVDTDSDLRSIMDILREGNPNNTGLSKAMVFMEIVRDSDLGFDKKIDAINKEAMIGSTGLAIEDLPGSPALRRGVNQALGIVEEIVHIAGHAPSNIFIEVTREEDGRKKGQRTKKRYQALEEAMKKLHEEAPEFWDAATSSQLAERAKEPADLDEKLTLYFMQGGKSLYSGASLDIGQLSSYQVDHIIPQSYIKDDSFENKALVLASENQNKSDQMLLPAEMRRKMRPYWDALLSAGLIGKKKHANLLRDHIGEKQMKGFIARQLVETSQIMKVVQSFLEERYSETNILPVKAGLSHELRERVGLVKCREVNDFHHAHDALLAAEIGRFIQKRHPGMYANPIGYTHVMKQFVKNESNAVRKGHEPGTSPFVIASFLTPGFDEETGELFKDDWSASYEIAKLKSYFNYRQCFISRMPEETSGAFWNQNPLSPRDASNKSKTLSLKKGLDPNKYGNYSAEQYAYFFIYKALKKGKEVLEFVPVPVSVAAEVSQDSDALRVFADKLAEGAGLEFVEIVRPKIYKYQLIEMDDSRLYLTGKKEVRNAVQFALDLRETEIAKAVFEDRCDDVDALDELFLVVIKSLGKHSPKQFSALKIDEW

SEQ ID NO: 7028 - protein, 1504 aa, unidentified
  REGION 1..1504: note = Description of Unknown: Cas Enzyme sequence
MKNIVGLDLGTNSIGWAVVNGIINEEGSEQLVKIQASGSRIIPMDAAMIGDFNKGNSISQTADRTKLRASRRLCERYLLRRERLHRILDILGFLPSHFAQDLDRYGKIVKGKEPKLAWRKNESGQFEFIFQKSFKEMLEDFKLNHPDLITDDKKVPYDWTIYYLRKKGLTSKISKEELAWILLNFNQKRGYHQLRGEEEEENNNKLVEFYALKVIAVEDSGEKKGKDTWYNVHLENGWIYRRTSNMPLDWVGKTKEFIVTTDLEKDGTPKKDKEGNIKRSFRAPKEDDWLLLKKKTEVDIDQTHKTVGTYIYDTLLENPNQKVRGRLVRTIERKYYKDELKLILEKQKEFHSELQDRTLYTACIEELYSINEAHRNNISNQDFIYLFLEDILFYQRPLKSKKTLINNCPYEENHCLDKETGEIKSFPIKCIAKSHPLFQEFRLWQFIINLRIYRKDLAQDADVTNELLKAEEDYVALFDWLNGKKEIDQKNFLKYPAFGLKKEVENYRWNYVQDKPYPCNETHSSMLARLEKCDISIEVLTKENEEALWHILYSVENKNEIAKALQKFADKHDLNASFVDVFQKFPPFKKEYGSYSAKAIKKLLPLMRMGKYWSENSIDKGTRERIDKIITGECDEKIENRVREKAIHLADVADFKGLPLWLVCYIVYGRHSEAKEITKWESPADIDSYLESFKQHSLRNPIVEQIIIETLRVVRDIWKQVGNIDEIHVELGREMKNPADKRAKMTQQISENENANLRIKYLLTEFLNPEYEIENVRPYSPSQQDILRIYEDGVLNSVADLPEEIADILKKFTETDLKKRPSKSEVLRYKLWLEQRYRSPYTGEVIPLGKLFTPAYEIEHVIPQSRYFDDSFSNKVICEAEVNKQKDNLLGHEFIVKHHGEIVELPFGKKVKIFSVDEYEQFIKDNYSRTRGKMKKLLMDDIPDEFVARQLNDSRYISKVVKSLLSNIVREKGEEEVISKNVIPCTGGITDRLKKDWGINDVWNKIILPRFQRLNELTDTNKFTTKSAGNHEIPTMPLELQKGFNKKRIDHRHHAMDAIVIACANRNIINYLNNESATAKAKLSRYDLQKLLCDKAKTDDKGNYKWVIRKPWGSFTQDVHGILEDIIVSFKQNLRVINKATNHFLHYNEEGKKIFVRQEKGDNWAIRKSMHKDTVFGEVNLHRIKTVTLNEAMKNPQSIVVKDFKRKLLELLNLGFDEKRIKKYFEDNREAWSDVNLSKIEVYYFSKDTKDRFFATRKPLDTSFDRKRIESSITDTGIQKILLRHLEQKDNNPDIAFSPDGIDEMNRNIVQLNKGKYHQPIVKVRVYEKADKFAVGKLGNKSSKFVEAAKGTNLFFAVYESNVLGDKTNAVIKKRSYATIPLNVAIERQKQGLPVAPKDENDNESIFVLSPNDLVYLPTTDDLVNGIIVQPLDRGRIYKMVSCTGNEGHFIPARIANPILQTIELGSNNKAQKAWTNEMIKEICIPIKVDRLGNVLESISLHKK

SEQ ID NO: 7029 - protein, 1077 aa, unidentified
  REGION 1..1077: note = Description of Unknown: Cas Enzyme sequence
MNTAYGIGLDIGIASVGWAVVALNEDAEPYGLIRCGSRVFDKAEQPKTGDSLAASRREARSTRRRLRRRSLRKADLYALMEKSGLPGRAAVEEAVLAGHLPDIYALRAQALDGPVTAMDFARILLHLMQRRGFRSNRKADDAQKDGKLLQAIDANTQRMKDNHYRTVGEMMYRDPAFATHKRNKTENYLSTVRRDQIASEAAQLFAAQRQYGAAWASPETEAEYLTILTRQRSFDEGPGGNSPYGGNMIEKMVGTCTLEGTAEPRAAKATWSFEYFTLLQKLNHIRIEEGGNSHPLTHAQRQELLTLCYQTDKLDFARIRKVLDLPPQARFNMVRYRADQPADACEKKEKITALPCYHKMRKALNTLRKDYILTVGHDRLDAAATALTLYKSEDLLREKLQQADFEPLEINALLTLPSFSKFGHISVKACRKLIPYLEQGENYNDACRDAGYDFQGSGHGEKSILLPAEAEEFSDITSPVVRRAVAQTIKVVNAIIREQGESPVSIHLELAREMSKSFQERADLENAMKENNADNERLMRDLHELFPGRNISGQDLVKYRLWKEQDGRCAYSLQPLELQSVITVSGYAEVDHIVPYSISFDDRRTNKVLVLASENRQKGNRLPLQYLQGTRRDNFIVYTKNNVKNYRKRQNLLKENLSAEDSSGFMQRNLQDTQYIASFMLNYIRGHLAFAAHPMAGKKRVVAVNGAVTSFLRKRWGIAKVRADGDLHHAVDAAVIACTTDGMIQRVSRFYQRTELSHARGERFPEPWPRFRDELMQRLSSCPQENLLTINPVYYTTADIAGIKPVFVSRMPRHKATGPAHKETIKGRLDDTYVTQRRSITDLKLNKDGEIDGYFNPSSDTLLYNALKDRLVAFGGNGKKAFAEPFFKPRADGTPGAQVRKVKLYSKVTSTVPVHGGNGVADNDTMVRVDVYYIPGDGYYWVPIYVADTVKPILPNCAFVRCKNSIIKKEMSEENFLFSLCKNDLVCIESKRPIKLKAANKDSTLEKELTVQRVLAYFEGGNISTGAVSVTTHDNAYIAESLGFKTLQKVEKYQVDVLGNYTRVKKEKRQLFPAQRR

SEQ ID NO: 7030 - protein, 1015 aa, unidentified
  REGION 1..1015: note = Description of Unknown: Cas Enzyme sequence
MKYRIGLHLDNDKIGWAVISENEQGEACHLERMGVRFFSVAENPFNGAVPGIERRRYRLTRRRYARIRYRFSKLRELFEQVGLPPIEKLVHKSVDYLWQLRTEGLERQLTPEEWVHVLYHIAHHRGFQYEGELESSMVLCDDAKMRKSIRENQQQMEKYKYRTVGELFYRDARFRPNGVFAPFKTGQPYITCVTRDMIRDEVVLLFYTQLSLGNPFATEAFEQKYTEILCRQRHITNGPGPNSPYARHKRRVSGIYCPLEPQHECCPTVTPLAERFHFLCMVNAPYSIVHNTQIIEKTDEQKQKIRAACTKNPSGVLAATRKVLHLESATPLTLHLNGHAYSASAVKDFVTPLGRQLRTALSKQFPDEQGILHKHWEKLLIMFVSTPNDQWKKQLKAYGFSKELCEALINAHLIKRDFYSRKAIGQMLPFLEKGMSADEARDKAYPNNPFAYNGPLNFQKFHHIARPVTERVLSQSIVLIKALIREYGMPTTIQFSTSYSMGAPRAIRKKYQKTMAAYEKSIQPFLVYASKTLQRNLTNDERNRILLWHRQDHQCIYTGTPLTLNQVLSPSETSVDHIIPYADSFDHSPQNLVLVLRSASDKRTALPGALFGMNEDFRQRACKSNHRKTRTNLLTTKWNEQDSIDQKQRSLYNSSSLLSSFAVFLHRTLSASSNTDVTVSSLKTRITGLRTERVFDNVPIEMEPAANAILTAIIDTHTCEQLSNFFMGNYENTLFRPWNSLQEEFTSLCASNKQCFSHMSQHRVRGAAHRDTILRSRGDQIVAKVPLTKLKLNNDREIADYFQPERDRLLYTALRKRLIAFGGNASEAFAEPFYKPKSNGLRGPLVKSVPIIQRPRSFVRVRGGIGINGDMIRIDVFRTADQAYYFVPIYVKDTLQDALPLRAATKNPDRMLLMNEHDFIFSLYQNDVIYIELPEAIILKSTTSSDSIEVDHGYFLRGKVRSKSGTFEISTLDKQYMRTSIPFFSLSKLYKCEVDPLGTIRKITKPEKRLEFHLK

SEQ ID NO: 7031 - protein, 1330 aa, unidentified
  REGION 1..1330: note = Description of Unknown: Cas Enzyme sequence
MAKILGLDLGTNSIGWAVVEKQDGEFSLLDKGVRIFQEGVKIEKGIESSKAAERTEHRSARRLKFRRKLRKVKTLKMLSEYGYCPQLTNEELDLWHYKKVYPQSISFRNWWHTDEKLEKHPYYFRNLAITRKLNLNKEEDRHKLGRAFYHMAQRRGFLSNRLESTPENETGKVIGSIKELQKKKGDRTLGQYFYEDCYLKGEKIRDQYTHREDDYLDEFKRICAFQHIPEEIQQKLHRAIFYQRPLKSQKGLIGKCVFEPNKPRCAVSRPEFEEYRMLCFINNIKIKTPDDEKLRPLNTEERKKIIPQFFRKSKDHFDFEDLAKQLAPKKQYKYYRDRNKNPEDYLLNYSMKTTVSGCPVSARFKDLFGADFIDDDFSFVKDSNNRTPKLITDAWHVLYTFDSDKKLKEFALNRLNFTDEQCTTFLKIRLKQDFASLSLKAINKILPYLREGLIYSHAVFLANMEETVPVHIWKNEENRKVIRTAIKEIIENHSDNTTIVNMVNGFITNARRENEVWSEEAKQLYFNDLDRKIKTTFGAKRFENFSEYKKTNLINTAQQLITEFMPKNLGKGEHVKVDRLDEAVLSFLADNFGKENLNAKKLYHPSAIETYKPAKRGKDGRLYLGSPITSSVRNPMAMRALHQLRLVINELIKNGLIDTNTKINVEMSRGLLNANERTGLKRWQDDREKKRKEYVDRIKEHFSPDYQPSEDEVLKYQLWEEQRRICLYTGKPISIEDFLGADPKFDIEHTIPRSQSYDNSQENKTLCENEFNRKVKRNRIPYELTNHAEIIVRIEHWKEEIEKLEKEIQKAVRQAKGAVDKDQKDKAIQKRHQLSYERNYWQNKYKRFTMEEVPEGFKNSQMVDIGIITKYSRLYLKTVFSKVYTVKGNTVADFRKMWGLQDIYTKKARVNHVHHCIDAVTIACMDKSNYETLAKFYHDWEELYVAGVDQLPPVNKPWPTFTEDVKGVEKEILVSHHTPDVLPKQSKKKLRKRGKIQYNKNGEPIYQQGDSVRGSLHKETFYGAIEREILNKKGETEKQIKYVVRKPLDGLEDSAIKNIVDDRVREIVSHARKEEKEIQKQIDVLLKQRRKAEENEEAEIDNKIAELKQQIVELYSLPNKNGAPVPIKKVRVYQTPKGILEIKKHRDCIKKHKANYLTETDDNYIMGIYEYSQNGKIKRKFKAYNNFTASNYLRSDIKKSLSPQGIGAISAMLPNNFINEKGIELKLKAALKIGTLVIMHMPDENLNDLTNWDDLQKRLYKVYGFRGDDGRIKLRFHNEARPDKEQEKPSSSFSLDIIHSKLIISLGNFHALIEGIDFKIDPLGNIKRIN

SEQ ID NO: 7032 - protein, 1079 aa, unidentified
  REGION 1..1079: note = Description of Unknown: Cas Enzyme sequence
MKYSIGLDIGIASVGWSVINKDKERIEDMGVRIFQKAENPKDGSSLASSRREKRGSRRRNRRKKHRLDRIKNILCESGLVKKNEIEKIYKNAYLKSPWELRAKSLEAKISNKEIAQILLHIAKRRGFKSFRKTDRNADDTGKLLSGIQENKKIMEEKGYLTIGDMVAKDPKFNTHVRNKAGSYLFSFSRKLLEDEVRKIQAKQKELGNTHFTDDVLEKYIEVFNSQRNFDEGPSKPSPYYSEIGQIAKMIGNCTFESSEKRTAKNTWSGERFVFLQKLNNFRIVGLSGKRPLTEEERDIVEKEVYLKKEVRYEKLRKILYLKEEERFGDLNYSKDEKQDKKTEKTKFISLIGNYTIKKLNLSEKLKSEIEEDKSKLDKIIEILTFNKSDKTIESNLKKLELSREDIEILLSEEFSGTLNLSLKAIKKILPYLEKGLSYNEACEKADYDYKNNGIKFKRGELLPVVDKDLIANPVVLRAISQTRKVVNAIIRKYGTPHTIHVEVARDLAKSYDDRQTIIKENKKRELENEKTKKFISEEFGIKNVKGKLLLKYRLYQEQEGRCAYSRKELSLSEVILDESMTDIDHIIPYSRSMDDSYSNKVLVLSGENRKKSNLLPKEYFDRQGRDWDTFVLNVKAMKIHPRKKSNLLKEKFTREDNKDWKSRALNDTRYISRFVANYLENALEYRDDSPKKRVFMIPGQLTAQLRARWRLNKVRENGDLHHALDAAVVAVTDQKAINNISNISRYKELKNCKDVIPSIEYHADEETGEVYFEEVKETRFPMPWSGFDLELQKRLESENPREEFYNLLSDKRYLGWFNYEEGFIEKLRPVFVSRMPNRGVKGQAHQETIRSSKKISNQIAVSKKPLNSIKLKDLEKMQGRDTDRKLYEALKNRLEEYDDKPEKAFAEPFYKPTNSGKRGPLVRGIKVEEKQNVGVYVNGGQASNGSMVRIDVFRKNGKFYTVPIYVHQTLLKELPNRAINGKPYKDWDLIDGSFEFLYSFYPNDLIEIEFGKSKSIKNDNKLTKTEIPEVNLSEVLGYYRGMDTSTGAATIDTQDGKIQMRIGIKTVKNIKKYQVDVLG

SEQ ID NO: 7033 - protein, 1353 aa, unidentified
  REGION 1..1353: note = Description of Unknown: Cas Enzyme sequence
MAAFKYYLGLDMGTNSVGWAVTDPNYNLFKAKGKDLWGIREFNEASTAVERRTHRISRRRRQREQVRIGLLKDYFHDTIGEVDPDFFQRLANSKYHLEDKDTEVRYKNNVFNDDDYTDKDYFDQYPTIYHLRKELIESTDKHDVRLVFLALLNMFKHRGHFLNSGLGENSGENNINNAYLELTNLLSEFTQYNLNETIDGKKIEDLLSRRDMSRTRKAEGLAEILGVDYKNKPYKELIRGLCGLKFNACAIFPEIQSDEVPKLDICLSEASFDEKSDEIANILGEDYFEIIMAMKDIYDIGSLAGIMKGHNYLSQARVASYEKHKEDLKLLKNVIRKYCSKEDYDNFFNSEADGSYASYVGSYNSKTKQRRVGNKRSSEELYKAIKKLLKNVPAEDADVQRILMSIENETFLPKQLTASNGVIPNQVHAKEMKKILSNAERYLPFLREKDETGLSVSEKIMKLFSFQIPYYVGPTTEKSNKDGGNGWVVRKEEGQVLPWNIDEKIDMKATSEAFISRMVRRCTYISGEPVLPKSSLEYQSFCVLNEINNIKIDGERISVQLKQDIYKEVFQKGKRVTKKQLCKYLHTRGIIEAEEQVTGIDVTINNALTTYGKFKAILGDDISKDSVQKMVEDIVFWCTVYGDSKKFLKDRIEEKYGEKLTKEQIKRIVGFKFKDWGNLSKNFLELNGADVSTGESVSIIRALWNNNLNLMELINSRLYNYKERLAEYQNTMMKTLSDIEAEDLDEYYFFAPVKRMIWQTILIIKELVKVLGCEPDRIFVEMTRRPDERKMRTESRRKKFEELYKKVKDEDVDWMKVIAHADETGSIRSKKMYLYLTQKGRCMYTGKHIELSDLFNNNLYDIDHVYPRHFVKDDNIDNNLVLVCKEKNAHKSDIYPLEDEILASQKNMWSELRRSGFITEEKYNRLIGRNSFTDEQKAGFIARQLVETSQGTKGVANILQQLLPESKMVYAKASNVSEFRNTRDIPKSRLINEFHHAHDAYLNIVVGNVYYVKFTQNPLNFIKNDYDRDKTKNNYNLSKMFDWDVERNGEVAWIAQKKDGEAGTIATVKKVLGRNTPLMTRYSFEGKGGLTNETLYSVKKAKEEGYIPFKSSDEKMKDVTKYGGFTSVTGAYFFLVEHTEKKKRSRTIESVPLYLAQKIEQNPHELEKYCEQVLGLIDFDIRVRKIKIGSLVKRNGYFFYITGKNGKQLIVRNAVNMYLKREWVKYISKLEKAVDKNIVEEVIAKDKNELLYSELINKFKTGIFANRPNPVGDKLDKAKEKFLSLDIEQQCTVLCQILQLSSILGSASDMTLLGESAHCGKMQISKKIGDEDIYLINQSVTGLYEKKINLRIV

SEQ ID NO: 7034 - protein, 1387 aa, unidentified
  REGION 1..1387: note = Description of Unknown: Cas Enzyme sequence
  MOD_RES 269..276: note = Any amino acid
MTKPYSIGLDIGTNSVGWAVITDDYKVPSKKMKVLGNTSKKYIKKNLLGALLFDSGITAEGRRLKRTARRRYTRRRNRILYLQEIFSTEMATLDDAFFQRLDDSFLVPDDKRDSKYPIFGNLVEEKAYHDEFPTIYHLRKYLADSTKKADLRLVYLALAHMIKYRGHFLIEGDFNSKNNDIQKNFQDFLDTYNTIFESDLSLENSKQLEEIVKDKISKSAKKDRILKLFPGEKNSGIFSEFLKLIVGNQADFRKYFNLDEKTSLQFSKXXXXXXXXLETLLGHIGDDYSDVFLKAKKLYDAILLSGILTVTDNETEAPLSSAMIMRYKEHEEDLALLKAYIRNISLETYNEVFKDDTKNGYAGYIDGKTSQEDFYVYLKKLLAGLEGADYFLEKIDREDFLRKQRTFDNGSIPYQIHLQEMRAILNKQAKFYLFLAKNKDRIEKILTFRIPYYVGPLARGNSDFAWSIRKRNEKITPWNFEDVIDKESSAEAFINRMTSFDLYLPEEKVLPKHSLLYETFTVYNELTKVRFIAEGMRDYQFLDSKQKKDIVRLYFKGKRKVTDKDIIEYLHAIDGYDGIELKGIEKQFNSSLSTYHDLLNIINDKEFLDDSSNEMIIEEIIHTLTIFEDREMIKQRLSKFENIFDKSVLKKLSRRHYTGWGKLSAKLINGIRDEKSGNTILDYLIDDGVSNRNFMQLIHDDALSFKKKIKKAQIIGDKDNIKQVVKSLPGSPAIKKGILQSIKIVDELVKVMGRRPESIVVEMARENQYTNQGKSNSQQRLKRLEESLKGLGSKILKENVPTRLSKIDNNALQNDRLYLYYLQNGKDMYTGEELDIDRLSNYDIDHIIPQAFLKDNSIDNKVLVSSASNRGKSDDVPSLEVVKQRKTLWYQLLKSKLISQRKFDNLTKAERGGLSQEEKAGFIQRQLVETRQITKHVARLLDERFNNKKDEDNKTIRTVKIITLKSSLVSQFRKDFELYKVREINDFHHAHDAYLNAVVASALLKKYPKLEPEFVYGDYPKYNSFRERKSATEKVYFYSNIMNIFKKSISLADGTVIERPLIEVNEETGESVWNKVADLNTVRKVLSYSQVNIVKKVEEQNHGLDRGKPKGLFNANLSSKPKPNSKENLVGAKEYLDPKKYGGYAGISNSFAVLVKGTIEKGAKKKITNILEFQGISILDRIKYRKDKLNFLLEKGYKDIELFIELPKYSLFELSDGSRRMLASILSTNNKRGEIHKGNQIFIPQKFVKLLYHAKRISSTFNENHRKYVENHKKEFEELFYYILEFNENYVGAKKNGELLKSAFQSWQNHSIDELCSSFIGPTGSERKGLFELTSRGGAADFEFLGVKIPRYRDYTPSSLLKDATLIHQSVTGLYETRIDLGKLGED

SEQ ID NO: 7035 - protein, 1545 aa, unidentified
  REGION 1..1545: note = Description of Unknown: Cas Enzyme sequence
MKTILGLDLGSNSIGWALIQLDSEQREGKILGMNSRIIPLDAAKLGDFEKGNPVSATAITRSFRSTRRLYERDTLRRERLHRVLNILGFLPEHYTEEIDFEYKLGQFKKDKEPKLPYKKISPYKYDFIFKDSFEEMVADFKVNQPQLFYIKSNGKETKIPYDWTIYYLRKKALNQKISKEELAWILLNFNQKRGYYQLRGEDIEVDDNKDTSFEVLKVEKVVDSGDKIKKTGQPLYDIYFQNGWKYDKQITRPDDWTVKTKEYIVTTSKLASGEIKRTYKSVDSEKDWIAIKQKAEQDIATSGKMVGEYIYDTLLQKPYQKIRGKLIRTIERKFYKKELERILETQIEFHPELRDCNLYTSCIEGLYPNNEPHRNNIANRDFLYLFVDDIIFYQRPLKSKKYLIDECPLEFREYTAEDGTIKKKGIKCITKSNPLFQEFRLLQWIKNLRIYRKDERQEVDVTEELLPTIADRELLFEWLNEKPNIDQKAFLKYKPFELEEKIKKMLGNEGYSIFKKDKERGLHTYYRWNYVEDKSYQLNETRGGILSYLKKAEIDPDFLDSETEMHLWHILYSVEDSEEITKALIKFANKHSLPESFIESFKKYPRIKKEYGSYSVKAIKKLLPLMRFGKWWNWDTIDSDTRTRIDKLLTGEYDEKIRYRVREKAINLQKEEDFQDLPLWLTSYIIYDRHSESSTLNYWKEANDITLLKQHSLRNPIVEMVVNETLQTVKDIWKYYGEGKENFFDEIHVELGREMKNPKEQREKISKRIAENEKTNIRMKSLLVELFNDGETENVRPYSPIQQEMLKIYEEGIYLNPDSVYSTVSEAEIDSIRKKNTPTPSDLKRYKLWLEQGYKSPYTGEIIPLSKLFTPAYEIEHIIPQTRFFDDSFSNKVICEAEVNSLKGNQLAYEFITNNKELKIELNYGKSVTLLHPEVYERNVKRYFGNNKTKMNKLLLEEIPDKFIERQMNDTRYISKTITSLLSNIVREESEQESISKNVIPTSGKVTSSLKRDWGLNDVWNELITPRFVRLNHMAGFEKYGSWENKEGKRVFQINTMEPELYQLEKKRIDHRHHALDALVVACSTRDHINYLNNINANGKDKDKPLRYDLREKLRRTEEIEVKKAVNGEVVRKKMRVAKEFYKPWNTFTKEAKEHLNKMVVSFKKNNRVINKTVNHYQKWVEQSDGTMKKMFVKQVKGDHWAIRKPLHKETISALVNLQDKKQVSLRAALSNVDNITNRSLRKKVRELADMGYNTNKIISFFNNLNFEWQGENIEKVDIFFYTNDQESTKVAASRVDLDDSFTENIIEKITDSGIRKILLAHIESYKYIVDEQGKPVSAEKLAFSPEGIEKLNCNIVELNGGKKHTPIYKVRTFEKFGNKFNVGNEGNNKFKYVEAAKGTNLFFAIYEDDKRVRSYETIPLNIVIERQKQGLPSCPENNEQGNRLLFSLSPNDLVYVPTPEEQDNPKTVDFSDLSKEQVKRVYKFVSCTGNRAYFINSTVATTIVNKYEFSALNKIEKCDDDVQIKSTCWKLEIDRLGNIKRVTT

SEQ ID NO: 7036 - protein, 1489 aa, unidentified
  REGION 1..1489: note = Description of Unknown: Cas Enzyme sequence
MEQQQEKGNEKFFIGLDIGTESVGFSATDGNYNLLKVGGKPIMGVRLFEEAKTSAERRIFRANKVRKDRQKQRTMLLQSLFNDEISKIDPLFFIRLEASSFWEEDKNKRNKTDKKLSDLNSLFADKKFTDATYFKKFKTIYHLREHLMTEKNWTGKTKPDIRLLYLACHHILKSRGHFLWSAEEINYSVQGQSSFKKLNDCLETALSSEDEINPIQLTIPSNFNSLLVVFQAKLGLKSKQEELKKILFADANKKNNKIINAMLKAITGGNFNLNDIFDAELEKEESIYSFDNDWDEIASKITNALNNDDQFAVVESLKDVYDFGQLNLLLQGHASISSAMISKFNEHKEDLEILKKFVRKVIPHEYNKIFRSNKEYEKTTKSKLGNYANYIGSNLVDGKTIVKKVEKAGFYEFLLNVFADNKLIERGKEWTITTTNLTEQQYETLDKILKKINQSSYMLKSRTKYNAIIPYQLHKYELETMLSNAENHYEFLKKVDNDKHSTCKTVKDKILSLISFRVPYYVGRLNNHSEVRKGMHAWVEKKLKGVKITPWTFDAVVDKNTSAEKFIERMLSKCTYLPTEPVLPKYSLVYSEFCVLNELNKLKIRGNDVTVEIKQGIFNNLFKQQRNITPTKLLNYLKITDNTLTKEDLSGFDKEGKGFNSSLCSLIDTSPIIDALQKSPYNKSLTTAQKIIEKVIQWHALFEDKKILESKMGEEYPFLKGDIAKQLKSLNYSGFGNLSKEFLTSEKVICKDTGELISILRLLWETNENLNEIIWNKNYNIQEWLAKENNTSDKEFSYADIAESYGSPSVKRSVWEAMKIVDEIISFNNNLVPDKIFIEVTRREDEKQRSITRKKYIEGCWKNAKTLSAQVINELKSELESKTDAQLRSEKLFLYFMQCGRCAYSGEKIMISDLANNNLYDIDHIIPQSLVKDDSIKNKVLAKKYLNGKKDKNYPLYKTNEIWSRKDSLLPMWRSWQKAGLISPEKFNRLTRTNDITEREMEGFIARQLVFTGQSATLTASLFKKKFNSYDKQPEIVYSKADNVSEFRNKVDMEKCREVNDLHHAHDAYLNIVVGNVYNERFNHNKNFYKSQTNKFQEYNTNRMFEYNVKNAWDIDLNTKPKRNEFSDEDKESYQKAVISWLKNQEIVKKIKNVISKNYYPVTKKLLENKGAFYDQTLYGVEIKQKEIKRGKVLLKIKDTSLPLKGNENNPLSNIQRYGYFTSENPAYFIIVEHTVSKGTGKNKKENRVRQFVTLPLIKQKQWEREFSLVKSKIDKENFFNEKLTNYLIAENGFKDLTIVLPKVYKYTLFEESGTPMRISGLKDRQNAVQWYVDDKTISYVRVIYKYAELVKKGVLKEDDYKNQSTIIVSAKKNGLPLSITLDKNKDLFVIIKSQLEKDIYKGNSALYKKLDQDNEQKFNKLDIVNQVKILTELIRALACNAQRGDIKSIGGHSAFGRLVNSDKIENDLVLIEESITGLKTKHTRIYPF

SEQ ID NO: 7037 - protein, 1388 aa, unidentified
  REGION 1..1388: note = Description of Unknown: Cas Enzyme sequence
MKKVLGLDLGTTSIGWALVNEAENTNEKSSIVKLGVRVNPLSVDEISNFEKGKSITTNAERTLKRGMRRNLQRYKLRRESLIETLKSNGFISDATTLSENGNHTTFETYNLRAKAATEMISLEQLARVLLMINKKRGYKSSRKVKEVDEGSLIDGMEVAKKLYNENLTPGQFCLQLLQAGKKYLPDFYRSDLQSEFDKVFDKQLSFYPNFLSVELKNELQGKKRDAVWAICAKEFKEKGFELVGTKRQGNASQQKFENYEWRAKALSEKLDLEQLVIVLQQINIQLNNSSGYLGAISDRSKELYFNQQTVGQYLMEKLDADPHYSLRNKVFYRQDYLDEFEKIWQTQSIYHKELTPDLKSEIRDIIIFYQRRLKSQKGLISFCEFESREIELVVNGKTIRKTTGLRVSPKSSPVFQEFKIWQNLNNTKVTDKKNSASRFLDQDEMNTLARELFIKKELSSSEALKILFKNHKDLELNFKKIEGNRTISEFFKAYQSIIELSGHGKHEFSKMSADEIISLVQDIFSALGYNTNILLFDALTEGHDIQQQALFKLWHLLYSYEGDNSKTGTESLIEKISAITGFPKEYAAIVASISLQDDYGSLSTKAMRKILPHLKEGFAYGGRKERQEEPSACEFAGYRHSASSLTKEEIKNKTYKNRLENLPKNSLRNPVVEKILNQLVNVVNGVIDAYGKPDEIRIELARELKKSADEREEMTTAINKTTTENEQIRKLLKSEFGLDHVSRNDLIRYKLYRELETRGCKTLYSNTYIPKEKLFTNDFDIEHIIPQSRLFDDSFSNKTLERRDINIEKGNETAYDYISNKYGAEMLSEYTQIVDDLLKAGKISLTKCRKLKMKGKDIPDDFIERDLRDSQYIARAAKGMLEKIANDVVTTTGSITDRLREDWQLVDVMQELNWEKYDKLGLTEIIEGREGQRIKRIKDWTKRNDHRHHAMDALTIAFTKRSHIQYLNNLNARSDKSGSIYGIETNELFRDDRGKLRFKPPMPIGQFRALAKKHLDNTLVSIKAKNKVVTKNINITKKKNGTNKKIQLTPRGQLHNETIYGSNKVYTTKEVKIGASFDETLIAKVSKKIYREALLKRLHEFGNDPKKAFTGRNSMSNNPVYVDAARTIVVPEKVKIVDIETIYTIRKDVGPDLRIDKVVDKKVRQKLEERLREYDNNPKQAFSNLDEYPIWLNHQKGIALKRVTITGIANAQALRDKKDKDGNLILDENGKTIPADFVNTGNNHHVAVYRDKEGNLQENVVSFFEATTRASLRLPIIDKDYRKDEGWEFLFSMKQNEYFVFPNEKTGFKPNEIDLLNPENYALISPNLFRVQKIATKDYFFRHHLETTVENNNNLKGITWLRCGLNSIEGIVKIRINHIGLIIAIGEE

SEQ ID NO: 7038 - protein, 1309 aa, unidentified
  REGION 1..1309: note = Description of Unknown: Cas Enzyme sequence
  MOD_RES 258..261: note = Any amino acid
VGEEKNVEFSLAASRTQRRSVRRHYFRRKMRKYRTLKVLLENEMCPLSNEELNNWAHYKKGEDFKYPQSKNFIEWLSLEPYELRAKAADPNNNLSKYEIGRALYHICQRRGYYSNRKDQKQDERTNTDKAIKELKNKIGDLTLGQYFSTLDPHQQRIRTTITGRKLLQDEFEQICKAQNLSEDLSKKIYREVFFQRPLKSQKHNIGKCPFEKNKYRCHISHPLFELFRMYSFINTIKYKVANDTEGEFEHLQGEIRDXXXXFFRKKPHFDFLDIIKEIEKNHNPKWKEKDYPRYYTYNYIPKTNVAGCPTIAEFKALFGDNWLNFKIDREDFKVDIFEIWNVLNNYEDDDKLYEYAINRLDFDEEKANKFTKINLKEGYGSLSLKAIKKILPYLEKGLLYSHSVFLANMPEVIGKAKWEKLKEQISDEIEFIIESHTDQKKKVLIVNTVLNRIRNSEKHININYCLKNKDKEALITATENEYGRKRYASMIENDREKLLIDLEHSLMEQIAKKPNGEYLQNKRIDEMVIEYLSEAQYNIPKENFDKLYHPSEIEIFPKAKPTNINGKNYYLLGSPSTPSVRNPMAMRALYELKSLINELILSDRLDPQNDTVIIETTRDLNNANERKAIQKYQNELEKRRQKYKTEISELYFEEYKKEYIPNDRDILKFQLWIEQNKKCIYTGQTIPLHSFLGENPDFDIEHTLPRSQSFDNSQENITLANNYYNRFIKKNLLPVNLPNYNEEVTISLGGKSIICPPIVETIKIWLEKAIEFENRKEIANGRSKMATTKDQKDDAIIDRHYNLIHRNYWKGKFNRFMMNEIKEGFKNSQLIDTGIITKYSIHYLKTVFDKVIAVKGNITADLRKLWGLQNIIEQDTDTEDDALSTINPTGKDRSEHSHHAIDAIVISLMDRRNTIDNKTIYETLAKYFREKEDEFINNSLRPYFPRPWKNFVEDVLKIKENILISYSFRDSTLKQTKRKLKINNNIQYTDQLDENGKKIPKYEKGLGIRASLNKETFYGVIKRNQVNTKSGEIEEVIKYTKTIPVQNLKESDIKFIVDDKIRNMFENQVLSKIKENGIFLEPNLKKNPEGKPVPIKNIKVFANKLSPVIFKPHTHLSKKDYKNNYIVENDGNYAIAIYKGLDSKNENITECKLISNLELSNQLRSGSVQNLFPTEITITDKKNNIITLPFFCRLKAGDLVVMYNESPDELPYYQALINNEQINIRELPEEIRKELKLRIFRLIKFFIPNNLILGRHFYSNINADKDTSVKDVTKIDGKVKRCNSNTFKGIPIVLDVTGTFIKISKYYND

SEQ ID NO: 7039 - protein, 1264 aa, unidentified
  REGION 1..1264: note = Description of Unknown: Cas Enzyme sequence
ELTLVELSRVLLMINKKRGYKSSRKAKSQEEGQLIDGMTIAKQLYEENLTPGQLCLRLLQSGNKFLPDFYRSDLQTEFNSIWNYQKKYYPEILTDELKEKLINKNEKATWAICEKPLNLVGLKRVSKARDLRLENFKWRSDALCMKLDLEQIAVVLQKINGQISNSSGYLGSISDRSKELYFKNQTVGQYLMAQLKSNPNISLRNQVFYRKDYLDEYNTIWEKQAQYHCELTEDIKREIRDVVIFYQRRLKSQKGLISFCEFESKQVEIESSGKKRVITIGSRVIPRSSPLFQEFKIWQNLNNLEVFPKGYLSRRKASARVINGQAEGGERRSLDQEEKEILFKELSVREELSKSQALALLFDNDKELDLNFNKIDGNRTFAAFYKTINEIIEISGHDKIDFSRHNADEISATVKSIIYVLGCNPDIFSFDSEKGLDQQSSYRLWHLLYSYEGDNSNTGIEGLIEKISNLTGLQSDYARIFTNITFQDDYGSLSAKAIRKILPYLKSGNKYDLACRYAGYRHSKSSLTGEEIAGKVLKDRLDILPKNSLKNPVVEKILNQMTNVVNAIIDEYGKPDEIRVELARELKKNAEERDKLSKMINEATRVHEEIKKILQDEFGLSHVSRNDIIRYKLYKELETNCFKTLYSNTFVPREKIFSKEFDIEHIIPQARLFDDSFSNKTLEKKDINLEKGDRTAFDFVKEKYGESALQDFLTRIESIYNLKGISKAKFNKLKMSEKDIPDDFIDRDLRNTQYISRKALGMLGEIVRSVVPTTGSITDQLREDWQLVDVMKELNWEKYKALGLVEYFEDKDGRQIGRIKDWTKRNDHRHHAMDALTIAFTKHVFIQYFNNVNSRYDKDSNAYAIEQKYLYDRKVKPPIPVDEFRAEAKKHLESVLVSIKTKNKVVTRNINASKNDGGIHRKIQLTPRGQLHLETVFGSHRVPVVKEVRVGGTLNEEVIQLVTRPQYRDALLQRLAENNNDPRKAFTGRNSLEKQPLYLDELHTKKVPEKVKVLTFEPVYTIRKQVAPDLNVDKVIDPKIRKLLQDRIAEYGDAKKAFSNLEKDPVWLNREKGISIKRVAVSGINNAQALHEKRDKEGRLISDSEGKNIPVDFVNTGNNHHVAIYRDANGELQENVVSFYEAVTRANLGQPVIDKEYRSSEGWKFLFTMKQNEYFVFPNFNTGFNPIDINLLDTGNYHMISPNLFRVQKTTTKDYFFRHHLETNVDNNGNLKGVTWLRGGLGLLNGAIKVRVNHIGQIVSLGEY

SEQ ID NO: 7040 - protein, 911 aa, unidentified
  REGION 1..911: note = Description of Unknown: Cas Enzyme sequence
  MOD_RES 467..469: note = Any amino acid
MKKILGLDLGTNSIGWAVVNANEDGTPTTIEGMGSRIIPMGADKISYEKGAGITKNADRRAKRTARKGNKRYKQRRDKLLFVLNELGMLPEQFIVRHKVRDEKGKLTDEYADGFPDSNHLQDLVLEPIKKNSLQLTSKTYYEKRVNAIHNKVDNLSDLGKILYQFNQLRGYAGGNRNDEKNKKAENVEDEENKKYEVFTAKCLITDIEKSDYIFKVKGGINKGQELPKYIVTLISDDKEYRGETELQTLEKDKDEELEIRIKRTKKGETITFALPQKTNWRKQMEKTEETLNERNKYKHYYIGELLLDDLKENQWTKIRNRVILRKRYQEEFDAIWETQSQYFDVLKLCSKESLQRITNYLYPGNGENQIKLRNEAIEKGLYHIIRNQIIYYQRPLKPQTDLIANCQFEKDEKVTPESNPIFQEFRCWQQINNLYVTSKQKVFDERKKKEVYKYKDRYLTDEQREAXXXALYDKLQIQKQLGFGEVAKIVQLKDDKTEYLNGLNVKAKLKGCDTNISIRKILGAYAEELENKNTNIISEIWNILYYKTGNEYDVDSDNVKSLINTLCQYVDKQIATELSLNLAQKISFTKKYKSLSVKAINNILPLMKSGKYYSNEKLSAASIDKYNKIVNTINTGEIDDSTELYMVDYLYNNSDLIEKGGMMYAFATSLVYGSHSNTKIKPSITNYHDIVYTERNLRNPIVEQITNETMQIIKAIWKQYKFNPQELEIRVELARELKNSAVERERIYKSQIKNKKINDSIKQRLIELNQEASSTNIDKYKLWSKQSTEDYPKFKDIKSPTQDEIQRLRIWEEQKCVSPYTNKPIPLSKLFDTREYDIDHIIPKARFFDDSMANKVICESNINEEKSNRTAWEYITQQTSKHKIFDVEAYIKHVNDNFFGQKKKNLLLEKI

SEQ ID NO: 7041 - protein, 1264 aa, unidentified
  REGION 1..1264: note = Description of Unknown: Cas Enzyme sequence
GLDMGTGSVGFAVTDTNYEILKSHGKAQWGVRLFDTAKTAADRRFSRVNRRRLERRRQRILLLQEIFSNEIVKIDPGFFSRLNDSFFFPEDKSENQRNTLFNDPGYSDKNYHEQYPTIYHLRYDLMKNSQPHDIRLVYLALAHILKTRGHFLYSDTGNFKLGDQFKVVFNDFVNIVGEVLDIYIPEAVAERWHQILTDRATRNSEKQSLLVESIQNNEKVTKTLTRVLTGYEIKFKDLFGDQYNDVTPAKVKLSNIEDETLDQIKLALSEDHFALFEIASTFYNLVRLETLLQGADSLSQTKINTYEKHGDDLKKLKRIFKNHLTKDDYNRFFSQSEKGLYNYPAYSGHLTINKIKQPVLQKCDQEKFLDHLKKVMRLLPEKAQNSPEVAEVLTEIENGTFMPKITDRDNSLIPHQLHHAELLKILENASTYLTFLNEDGSDGYTKKQMIELLSDFRIPYYVGPLNPAHSIDRDAKSSSHHAWVSRLSDEPVRPWNFNRVIDVEQSASDFIANLTNKCTYLIGEDVLPKESPTYAKYSILNILNTVNIKGERLPVPLKQELFQHFFIDPKRKGKPTKRNITEFIQSKTGLSIAESDIGGMDLEIPGDMKAEKAIERIAPGKLTLAEKENIVRLVTVFPDSVKMLSTRIDRELGEKLTSAEISQLARLKFTGWGRLSAMLLNGIEAPNKKAEFKSIIDMMWEENLNLMEIMSDRFLFHSIVQRINDDLLGSNRSFSYQVVDNFPVSPPVKRMVWQALRIIKELIKVNHGQPPAKIFLEVAREEGEKVRTRSRKSQLLELYKDLRKQESDLVSNIESRSEAELRSKKLFLYFTQMGRCMYTGESISVESLDNKGADGHDIYDIDHIYPRSLTKDDSLLTNLVLVKSKANRDKGDKYPIVEATRKARIGLWAQLRESGLITEEKFRRLIRQSPLSDEELAGFINRQLVETRQAAKAAADLIRQFLPETQLVYVKAGHVSDFRYNQGEFKFPKVRGMNDLHHAKDAYLNIVVGNVFHSKFTQNPMNFIRGNEGRRYNLARMYDFPITSPSGEIAWLPGSNGSLIMVSKMMKRNNILVTYQTHHQHSGRNGGIFNQTILPKGQGQFPIKTADPRLNSQAGIDKYGAYTDETGATFFIVEHKAKKKTCKSIFSLGLGWLLTHPLNEETLLKYCERDLGLIEPHILVKNVPYNTILSMDGYPLRILAKTGSSIKMANVVQPVFSAEQEQTIKQVFVYLAKEGNDEDGEILENVTLQAEFLSLYDGFTRKLS

SEQ ID NO: 7042 - protein, 1083 aa, unidentified
  REGION 1..1083: note = Description of Unknown: Cas Enzyme sequence
MISKNRNLGPLTFGLDIGIASVGWAVLGENRIIDLGVRCFDKAETDKEGAPLNLARRTARLLRRRLRRRAWRLTKLARLLKREGLIADTGILKQPPAKGFKTPNLWRLRVEALDRKLDAEEWARVLYHLCKHRGFHWMSKAEEKKADEDKEGGAVKKGLAGTKRLMQEKNYRTAAEMVIHEFPDAHRNKRGDYSKALSRLLLADELATLFARQRALGNPHALPELEDKLLDRKTGLFWAQKPALSGDDLLMMLGKCTFEKSEYRAPKASFTVERHVWLTRLNNLRIVADGKMRPLSDAERCVALPLPYQQASDLSYKQLGNALVKAGLLQKEGFKFAGLSYPSDRQKAEEKAKDPEDEKLVKLPGWQAIRKTLKDAGLEDGWQKISVTALNGKPQLLDEIARVLSVYKEDGEVEQELGKLDLPEPRMVEALLTLRFDKFSNLSLKALYAILPHMELGTRYDEACDKAGYHHSQIFKVGEGEHKYLPPFYVGRDKAGRLKFNEELDIPRNPVVLRALNQARKVVNALIKTYGSPHSVHIEVARDLSKPFDERRDIKKAQEEFRERNEKDRAAFNAEYNASGELKGCDFEKWQLYREQHGKCAYSLEPLDINRLFEMGYVEIDHALPYSRSFDDSKNNRVLVLTRENRDKGNMTPFEYLGGKENSERWRQFAAFVDSNKSYRQAKRNRLLKRGFGEAEAKDFRDRNLNDTRYICRFFKNYVERYLKLHEDSEAKRCVVLSGQLTSFLRARWGLVKIRSDSDRHHALDAAVVAACSHGMVKRLSDYSRRKELEKAREGLIDMETGEIVNPAMLERLEQHFPAPWPHFRDELVARLSIDDRQVLRAEMERLGSYPPEALEELRPLFVSRAPQRRNGGAAHKDTIYAQPERLKQTGSVTQKVSVADLKPGDVDKLIDPHRNEKLYTALRDWAGKREGREKRAREIEKAAKEAKRELTAEEKADIERLRALPRKPDKQGNPTGPIVRTVTMVIDKLSGIPIRHGIAKNDTMLRVDVFTKAGKFHLVPVYVHHRVTGLPNRAIVAFKDEEEWTLVDDSFQFCFSLYLRFPRFFVFQEVGFMLPVFRHAER

SEQ ID NO: 7043 - protein, 1340 aa, unidentified
  REGION 1..1340: note = Description of Unknown: Cas Enzyme sequence
MEKEYYLGLDIGTDSIGWAVTDTNYKILKFNGNSMWGIRLFDESQTAEDRRTYRTSRRRIQRRRERLALLEMLFNEEISKVDPAFFIRLKESNLLIEDREDINKTGKYTVFNDKDYNDKDFHKKFPTVYHLRKELIKNKEPHDIRLVFVALHHIIKKRGHFLFDTDVSDIPRFEEVYKDLTDYLSDNYEIDFPCDKLNECQEILKSKKESKTAKFNALSAELGIDKKEKQKSAVLSLMCGLTTKICDIFDDELLKDPELEKITLNNSFDEKASDYEALLGERYELIEKIKAVYDWSVLADVLNGEKYISYAKVKIYEEHKEYLRQLKTYVRKYFPEKYKDIFRKSKDKLNNYVAYSGHVKTNGKTGVVEGRCNEEDFCAFLRKELGEIKDESYADMWSRIKNNVFMPKQSSANNGVIPMQVNRIELKAILDNAKEYLPFLNNKDENGISVYDKILSLFDFRIPYYVGPLNTHSKRAWLCRKEGEKIYPWNFEKIVDVDSSAQKFIENLTSKCTYLPDKDVIPKNSLLYTKYMVLNELNNLKIDSQKIDVQLKQDIFNDLFKKHYKVTNKRLRDYLTSKGLEFDSDSISGIDGDFKSSLKSFIDFEKSEFSSLSDGDKEDIIHSITIFGDDKKLLKKRLKEKYKNIDEKTVSKISKLKYSGWSGLSREFLKEIECINKETGELTNIISALWDTNDNLNQILYSDNYSPTFIEKINEMNSFDNEKTLKEIVDDLYVSPKVKRPIYQSLQIIKEIEKIEKCPPKKIFVEVPRYTGEKKRTNSRKAQLLKLYKKIKSEYGELYDQLDGTDEEKLRSDKLYLYFTQLGECIYTGEKIDLDDLMGNNSLYDIDHIFPQSKIKDDSILNNRVLSLKKFNGAVKGDHYPLPSKTREGRRAFWKKLLENNLITKTKYERLIRNTELTDEELTGFISRQIVETGQSTKAVAKLLEMMYPNTETVYVKAGIVSDFRDRDYNKDKMSKSRDVNDLHHAKDAYLNIVVGNVYNEKFTHDRANFIKGLKADGKDSKSLNKIFDYDIKGAWVAKNNESLNQVINTMNKNNILYTRYSYKQQGELFKANILKKGKGQIPIKSGKRSDISKYGGYDKAKSAYFALVEYDDKKNRVRKFVPIDIVKEKSYLLDPVKFMENEMNLKNPKIVLPCIKYNSCISLNGFRMHLSGKNSGGRQIQFRPGVQLVLSPEQGRYIKRISKFCERQSFCERQSKKTDIKVDKEHDKISKEENIEIFDVLIHKMTNTIFKEKFKDFGSKLSLKRDIFVELECEKQCKVIREMLKILHNDARLGDLTLIGESTNFGTILTNSKISGLGSVKLINQSVTGLFESETDLLK

SEQ ID NO: 7044 - protein, 1510 aa, unidentified
  REGION 1..1510: note = Description of Unknown: Cas Enzyme sequence
MRNHSSSVKIAKKNAPYGAPQRAVCGFEAVFRLTHTVNQAVIHHDQYSTAGEHGTRELKVSEEIFGSNFLNGRESSITTGIFWYCGIMTLQKRKPYTAYVWERKYAMKKLKQMSGPYSIGFELSSTAHGFVATDPNGNVLYHGKQPVMGTRVFKEGQHAAEARMPRTSRRGIQRRRGREHEMERVFAPVISSIDPDFFIRRRMSYKLGKIRFESDPIGFSYSRLFHSFPTLAHLDVALMEADSAMDPRLIFEAVANHVVRRGHFLLENQNVSSTNSDIDTQVANYAEVLVSYFEDTLDERIELSLEALDINGNVTARELQKQFASAMCVSGDDIQKKTEKAQIKVIADLVAGYKADLTVLVPDAEKLPKVSISDGDALEEFLADSCPDSLVPVLMAAQALYTSWKLQGMLSYAPGKSLSHNQVAQHDVYGKQLRMLKDLALKYVAKQDANGNVDEDGFKDYVRFFGGPKREDGYRYDKVQVKKQDSPKNNMGYTAYNLNVLGYEEFAKRVELLFKDTDAVDDSQYKTMMEAFANHAFLRRIHTVDNAAIPYQLHAEVVNRIIDNQGRFYPWLIDAREHILKVLTSRIPYYVGPLDSTDHGKAGENGTRFAWVKRLAGHEDAFVSPWNYEDHIDIDTTAELFIRRMTGECSYLDGEDVLAKNSLLYEKYCFFNELASLSFTEDGDSWMPFDAGMRRAIYDAASDGKTMTVKRIESVLQRDFFIAHPHVRGTSNPKAMSSKRSNYAYFCRLFDVKALSASDMSMAEDLVLWNTVFEDRDILRRKILKTYGDLLTEKAVDDFCHKRLSGWGKLSERLLTGIWADTASGDMCVMDVLEQGRPYGRYRGSSMNLMQILNDDVLGFKMEIKRLNDSHMQTAEGFDLNALPGSPALRRGVSQAMKVLDDIVSVAGKAPDRIYLKVTRTASNSRKGKRTAKRCDKIKQALKALDADAAADLGAAKLLRELGMFDEKEINERIYLYFHQAGKCLYTGKPIDITRIASNDYYVDHVVPLAYRKDESLDNKVLVYAEASRYKSETLLVSPAVQRKMLPFWRMLRNAGLMSERKLNALNRTEVSEGMLKSIIGRQFTENSWEAKLFTAAIAAKYPGTVVIPVKAGVIGAVRSRIGIPKSLKANQFYHAHDALLAAEVGRYMELAKPALVHNRVKYEQYMRKIKLVDEENKKAPKSQLDFFAGGFFFDRVDKDTGEVYWNKDEEVERIYRACGWKNLRVTYAAFEDGGAFWKQTIYSPREKSKLIATKSDRPSEIYGGYSSQTFANFFVYEVMKKKVKQLRFGVVPAAIASKSDPDTYNAMLEMYARGLAKTAKEKFVRIVRARVLKNTMIELYGERFRIAGEKQVYPVRQMPLAIDEVYLLKGVKTIAAAGNAGASAKIDFEKAAESLVGFWDLLLEKLPVNYPKLTVQLKLGSLKHPKDILAATSESEFPAIVYKIAEAEIQVMEQASGLRNMSDTKILGGNTFGGSLVFTFNKVLNDPKSKACFIDTTPAGLYEVKTKIW

SEQ ID NO: 7045 - protein, 1362 aa, unidentified
  REGION 1..1362: note = Description of Unknown: Cas Enzyme sequence
  MOD_RES 686..695: note = Any amino acid
MQKKNFYGDWLLGLDIGTNSVGWAVTDTGYNILKYKSNAMWGVHLFDPANQCEDRRSFRTSRRRLDRRQQRISLLQDLMAKPIAEVDSDFFIRLKQSALYPEDRSTGTQNIYFNDINYADKEYFSEYPTIHHLIDELMKDTTPHDVRLVYLACAYILAHRGHFLFSVDKDNISEVLDFDKVYQVFTNWFNSADKAQPWECSSEKFAEILKRSITKTAKEREFKLLLWDGKKPTLTEESAINPVTAIKLIVGGKAKLSDLFLNESYKELETNSITFNDDNFDGLFESLIPALDDGDSDLLASMKAIYDWSLLSGILKEKSCISEAKKEIYEQHKSDLAFLKYAVKKYIPKMYDDVFRIADSKLPNYLAYSYNTNDYKSKNKTIPSDLKKASPEDFCKYIKDIFKKTIPDNADLSKFEDMLNRLDLLSFCPKQVNSDNRVIPYQLYWYELNLILNNASTYLNFLNDSDEYSSVKDKILSLMEFRIPYYVGPLVSSDKSNFAWMKRKAEGKIYPWNFKDMVDEDASEEEFIRRMTCKCTYLPGKNVLPKNSLLYCRFNVLNEINNIKINNKPITVECKKLIYNEVFLKHDRVTLKHIKDTLRSHGCYEDKDAITGIDITVKSSLKPLRDFKPLLESGMLTEEDAERIIEKITFSNDKLRIKKWLKENYTLSDKVIKKIAKSNYKDFGRXXXXXXXXXXFDIDPKTGEVVNPNIITMLWETNKNLMELLSQNYGYSSNVKKQAKEYYNAHPKSIIDRLNEMYISNAVKRPILRTLDIVKELKHIMPTPPKRIFIEMARGEGEKKRTKSRRDLILEMYKNYGEDEVGELKKQLSSKADGELRSERLFLYFTQLGRSMYSGKSIDISNLASKAYDVDHIHPRSRKKDDSLDNKVLVLSEENAKKGDKYPISSEIRHNMKSMWEKLAKGNLISKEKLHRLERDTEFTDEELAGFINRQIVETQQSTKAIAHLLEEMFPDTQIVYVKARLVSEFRQTYDMLKCRSVNDLHHAKDAYLNIVMGNVQYVKYTNNPLNFIKSGQKYSLKLDSLLKHDIIRGNDTAWLKDGSSLTTVKNTMEKNNIRFVRYSSCQKGELFNIMPLKKGLGQISLKKDNISDISKYGGYNSATSTYFYLVKHMKKDKVTISFVPIDLIYAGQLTSKQEVLNHLCEKHGLIEPELLLGGRKIKYNTLLEIDGFRSHLTCKTNDRIKIKRGLQLILPYEWEKYIKRIETYNNRNSEYQRLNKKTLEITVKDEITKEKNVELYNILMDKLKNTKYNVFKTPSEIVKKGKEVFETLNVEEQSIALFKMLGLFNCTLPSGIDLKLIGGSQSSAILSISMDLNKKSFSSIKIIDQSPTGLFLKKSPNLLDL

SEQ ID NO: 7046 - protein, 1062 aa, unidentified
  REGION 1..1062: note = Description of Unknown: Cas Enzyme sequence
MNNNNTQIWGFDIGKASLGEAVWCGGKFKHVESLILDKDFAEIKTSAGRRRQARTRKAHKAREEWLEKCLEDCGIEILKRRKVGIVNGQWKLISKGDARLEKEFPAEGEEVCYNSIALRCKLILGENLESWQIFKALNSSIQHRGYDENIPWKETQNESKKEDGDYFKKIVLYESEKEDILNRLPQECKREDFDFPCFFKAKKMGIWSEENPYKVGLRISNNAQKAKGYVIPRKYVESEFVRLVQMASLQYPKLKDKQMFILYGISETPYASLFKDARKKFGLKRGADSDWTALGQKIPRFDNRMIGKCKLIPRLNTCKIKSPDKIKSEEDLLHYDITLALKLLNLRFFKDSEICALSFEEFKKLFEIGKSNKYKISKTDLKKFLKSIGASVLSQDHSEIEAPRTSGRSSFSRPAMKILKELIFSGEPPSKFLKAKIDKIANTDPNKGIIREDLDFIRIMGDCPWNGIFIPDVETYKYASQTQESSEAQINKLIGSQNDPIVRHRLSFFYERIKALSEKFGVPDKIVLEFVREDFMGKQAKKDLSLSMKKRFEEKIDIAKKLDDIGYKGNKMLLKMELLQKQGFACLYTGEALQETDLPILEIEHIVPRSLGGPDAAYNYVLTSESTNKAKGNQTPYKWLSPDRDKWRAYTERVRARAAELGSKRCRLLLSENAEELINKYTALAETAWISKLAQRIVCMHFGFQFGGNTGEKRVFTVPGNITAKIRSAFGLNKILHNIDADKKNMSEFDIVKLDYELDKKNRKNKKHHALDAMCLCFAPTGPNAQKLGIGALLPPEIAAKAEEFFRGYIEKVVPNEVAPKKPKLEESIYSKRTINRKECIVRKFNLVDLAYKSGLKPVYDISAIEKLLEDKPKKIPPIINPTVRRIVRDFVSTNPNEDEWRNWCKTVRMPSKNRNGTRIIRVLVYVGTPEEYKDLSKDGCGAFRKGDSHKGQIIWMDKNGRYKVSPVYVHSSKSQTMESIKSNPDFIKIAGFFKSHCLVEIESPVVNGKRDVLLSPGTYMINTIMAAGMAILSDTNGVKSPAININYLMNAGMRRISIKYK

SEQ ID NO: 7047 - protein, 1053 aa, unidentified
  REGION 1..1053: note = Description of Unknown: Cas Enzyme sequence
  MOD_RES 1036..1045: note = Any amino acid
MGNTLGLDIGITSIGAALLNEKDVVYMGVRMFDSAQEASVSRKARSQRRNLSRKRWRKEQLIDAFDDFGIIAKDESKQEGYLSFTTNNGVIVKPIDRTVYHLRSRALKEKVSKREILLCLYNILHARGHFLSEMINFEEGENYSFDDFKNIFYDLTSTYISYTSDLKKEIDDILLYIFESDKIVRDEIRLKVKGIKNNINEYEEIKLENIMYMISGYKGNALKIDDKFDKYKECHINKLKSTEEDIDDFLIGIVELYDMAQIHKVLKNHNYICEVAVDKLNAFYGIVDKYGTNSKEFEDTIEELKKNIAENKKKKNEGKPIKHYRVVRNLGNVFPNGLYVKECNDILINQQQYYPEITEEFREVCKSIVSARIPYYIGPLNEEATNAWVKKNGKIKYSYSYALKNDEKVIDVPESIKKWKSRMISSCTYLPQDEDGNKNAALPKGSFISETFNILNELNILTAIDKNGNEYYLTTKDKFDIFNNLFLEKKKVEYKEVAKLLDIENYGPKSSKDLFFNNGYTLYFQIVNIVPRLKLKSIDDFFDNKEKIDEIEDIILALNLYDEEKNKFEYFEKRYGASVAKKLAKLKSTSFCSYSRKIVLETVFDVEGNSLIDKLFEDNKSTYKNEQMTIISRATDINGNHVDYLSNKYVQRIKDNNKKLDYKILVDGDKPIIPISRPVLRSLNECMKVYLQIVESYGVPDRIVIETARDFKDFSENKVKTVKFSDNAKKQYENLLKELKDSKYKVYSAYNQMEKFGELEEYLTKNKDKISLYISQMGTDLLTGEKIYLNNLDAYEIDHILPRGFGDNSMDDKMLIAKKVNTKKGNRLPIQFINSNEQVEGHKILIESEFLKRVFALYDMGAISQKKYERLTLKNSGELDEFLNQNLVDTRYVIREFMSILRAYNQINNYNTHIVALKSAYTSTYRMAFGMDKVREYGDQHHAHDAALLCIADKTLSAYYPNYDRREYNKVECENKFNSYNGFLKAISDSNTDNDSKAELKNFIKYMYRKAYNVSAIDHNSIIDKIKNYVPYYSVXXXXXXXXXXNDSSAKRL

SEQ ID NO: 7048 - protein, 1386 aa, unidentified
  REGION 1..1386: note = Description of Unknown: Cas Enzyme sequence
VSNEKIYLGLNIEPENISWAVTNNDYQLCKYEKRLMWGVYCFDEAQLSERRRITRSARRRYKRQAGRVSLCQELFAKALYEKDKNFLLRISEGALTADDAKHRKHYVLFEDANYTDKDYYTQYPTVHHLICELIKNKVPHDVRLVYLACSYLLAYRGHFYYSISEDNVGEITDFSPLYNNFYSSLTNLCGEVPFEKNKSEFEKIIRSKNSLTFKKKAFNELMFAGKAKNYDNDIISYSILCNFISGGKIKISKLFVNEDYEDLETNEVSISIPDLSEMLEGKIDELQLAVINSVKAIYDWAMLVDILNGSSLISEAMVNKYNEHNSDLKKLKHIFIKYLPHEDYRTVFAEIGEKSNYKSYVYNSPKDEGRPKNYKKCTQEEFCKFTIKYLNQIKKVDEADQAILDELITKCADSKLCPKLNTTDNRVVPYQLYYHELKLILENAKDYLPFLNDKDEYGTVADKILAIMKFKIPYYVGPLVSSEKSPNAWLERKAEGNIRPWNFKDLVDEDACEKKFIERMTGQCKYVVGQKVLAKRSILNCKYNVLNELNHIVLSNGKLSVEAKQAIYTELCLTSRNRVTKKKILSFLVKNGYAKLGTDIAGIDDIMRSSMQSYLDFEKNHYISDGVLSIEQADEIISRITISTDIRRLRKWISTEYPHLSATDVKYLSGLKYQDYGDVSKSFLEDIYPVNTETGEIESDKNIITMLWETNETIEQLLGTKYRYTESIEYANKELYGLSNGQATLQKRLADAYVPVAMQKATSKAINIVKDLKRLQGKAPDKIFIRTAKDFADKPKGKNRKSKKEQILAAWGSLKDRDIAALNPGEMASLKKQLNDIDEGKLNLDKYYLYFMQLGRCMYSGAHIPFDELENSFTWNIDHIWPQAKVKDNSLDNKVLVDLTINTDKGKTYPIAKDIREAMADFWGQLYHEGLISDKKYQRLIRQSGFSKEELADFILAQITETRQSTKAIVNMFREYFPDSTVIYLKNDFATDFRREMELPRHEIINNFDLAKDAYLNLVLGNVYTTRFTSNPLNFIKNNRNYSLKMYQRRSDGSEVGMMMGKISEGNSVAWDPETSFDVVKRNYAINSVKCVRDAFRRKSGNNGGFFDNNPLRKGNGQIPKRKELPVSKYGGYNCATISFYSLAVVKDVGPVLFAVELLFAKEFLKSVDAAKEYAARKISAQIKSKIGADDVRFPFGQTPNIIKANALLELDGLRITLGGKTLDNIIIYSAEPLLVGPEDSLYADKIGKVVNRRRFNKDYKISENIGLSAAGNSELYDYMAQKCMSKPFSVLYNKTGHFFEKSKEIFEQLSIEEQITVLAEMIALLTYGRKRTIDLKLLGGSANACIKSIPMNLYKMKGYSSLRLISQSPTGLIEHKSCNLLKLTY

SEQ ID NO: 7049 - protein, 1432 aa, unidentified
  REGION 1..1432: note = Description of Unknown: Cas Enzyme sequence
MKKILGLDLGSNSIGWALVNEAENSDEVSSIIKLGVRVNPLTVDEMQNFEKGKSITTNADRTLKRSMRRNLQRYKLRRDALIKLLKKVGFIADGTILSEQGNRTTFETYRLRAKAPDEEISLQELARVLLMINKKRGYKSSRKIKEKEAGTLIDGMEVAKKLYDEDLTPGQLCLQLLESGKKSLPDFYSSDLQEEFDRIWNFQKQFNPKAFCDTAKEEIKGKNKSQTWAILAKYFIWTDEMVVWNEKESKTERVEKECKLVGLKRTVKKEEQRKENYRWRVQALTEQLDLEKVAVVLQEINGQISTSSGYLGAISDRSKVLYFNRQTVGQYQMAELEKNPNTSLRNMVFYRQDYLDEFDKIWEKQAKFHKELTVELKKEIRDIIIFYQRRLKSQKGLIGFCEFENREIMVEKNGKMQAKVVGCKVIPRSHPLFQEFKIWQTLNNVEVFAGEKKCKRKRTDAFPGLFDGTEDTLMVEGWRYLYQEEKEILAKELSVKKSLKKEYILKLLFDNPQDLDMNFEQIEGNDTGNVLFSAYSKMIEKYGYEPLDFGKPTDKIIEQLQVIFADLGWNTDLLFVDLNKEGKDLEKQPYFKLWHLLYSFEGDNTPTGNGKLVEKLMELCHVGKECALELVNISFQNDYGSLSAKAIKKILPYLKEGNRYDVACGYAGYRHSKSSLTKEEIENKVLKDKLDILPKNSLRNPVVEKILNQMVNVINAIIDTYGKPDEIRVELARELKKSAKEREELTKAIAKSTREHEEIRKVLQEEFGMINVSRNDIIRYKLYEELKDNGYKTLYSNQYIPKEKVFSKEIDIEHIIPQARLFDDSLSNKTLEYKAINIEKGNKTAYDFLKEKYGEKGLQQYLNRCESLFKGQRTKLRKLKMGQENIPEGFIDRDLRNTQYIAKKALAMLNEICRRVVATTGSITDRLREDWQLVDVLKELNLPKYETLGLVEVYEDKDGRKIKRIKDWTKRNDHRHHAMDALTVAFTKDAFIQYFNNKNAAWQADCKEHSDIIGIKTRYFENGRALPPMPLVRFRAEAKSHLETLLVSIKAKNKVVTNNVNCTKRKGGENKKLQQTPRGQLHLETIYGSHRQYVTKEEKVNASFDSSKIATVCKQAYRNALLERLAAFGNDPKKAFTGKNSLEKNPVYLDREQTARVPERVRTVELETVYTIRKPVDPNLSVDKVVDAKVRSILEQRLREYDGEAKRAFVNLDENPIWLNEEKGIAIKRVTIRGINKVQSLHGKKDKNGNLILDETGKKIPVDFVNTGNNHHVAIYRKPVLDKTGQEMLDAEGNPVYELDEVVVSFFEAVTRVNLGLPVIDKNYNKSEGWQFMFTMKQNEYFVFPNEKTGFDPKEVDLLNPENYAVISPNLFRVQKITEKDYMFRHHLETKVVDDKFLKEITWKRIRRPNELDGIVKVRVNHIGQIVSVGEY

SEQ ID NO: 7050 - protein, 988 aa, unidentified
  REGION 1..988: note = Description of Unknown: Cas Enzyme sequence
  MOD_RES 479..492: note = Any amino acid
KLLHFKKQPTWGSRLFDSAETAASARIPRGQRRRYVRRRWRLDLLQSLFDEEMSKADPEFFIRLRQARLLKEDREEGHREYGHPLFNDSDFAEADYYKRFPTIYHLRKWLMETDEKADIRLFYFAAHNIVKHRGNFLRQENTSLSAKNARPLDALLEFRSALADWCAELGYECDSDESQAKSEAILSILEEEHTANSDKKKRISSLIGVSMNDGAKESKACNDALAGAMVGLKAEFKNVFGDISADQTSIYLSNDEALRESVPDEGAELFEKLCNVYSAYVLQGLLSYAPGETISSNMVVKYEKYGADLKVLKTLVREYAPAEYDSFFRGEFYRDEEGREIGMYNASKAQGYTKYNLGTSKMPYEDFEKAVRKLFAGTAAESDARYTQMMADFGEQRFLRRLKTSDNGSIYYQLHLEELSAIIENQGKHYPFLLKEADKIKSLVSFRIPYYVGPLTGKNARKDKHGKNRFAWSERKPGXXXXXXXXXXXXXXWDEVIDRGKSAEAFITRMTGMCTYLQGEDVLPKCSLLYEEYCILNELNGSKWGMGGEDEHRFDAADREAIIEELFKKKKTVKYKDVENWLEREPGHMNVRVKGGQGESGYESKLSSYFFFRKDVFNVDELDPADYPMIEQIILWNTLFEDRKILKEKLENAYGPKGSGRLNDEQIKKICRKRFTGWGRLSKKFLTGIKVDTDCGPRSIMDVLHEGDPNAGRRGRTMVMMEILRDENLGFQEKVDEFNRNYFGKKGKALEVNELPGSPAIRRSLNQAIRIVDEIAKIAGKAPQNVFIEVTRDDELGKRGKRTKRRYDALKEALAVFKKEDPEIWAELQAASPSDLDERMTLYFMQRGKCLYSGEPIDINRLSSGDYEVDHIIPRSYIKDDSLENKALVLRKCNQSKTDAMLLDPSIRRKMRGYWDMLLDAKLIGPKKHRNLLRDHIDEKAMKGFVARQLVETSQSVKLAGSLLSVRYPEANIVPVKASMSHVKRLVL

SEQ ID NO: 7051 - protein, 1244 aa, unidentified
  REGION 1..1244: note = Description of Unknown: Cas Enzyme sequence
MEKDYFLGLDMGSGSVGWAVTDDQYHILRAHGKAMWGSRLFESANTAEERRINRTARRRLDRRNQRIEWLQEIFAEEINKKDSGFFRRMKESRYYPEDKRDGNGNCPELPYALFIDERFTDKEYHEKFPTIYHLRKYLMQTQEIPDIRLVYLALHHMMKHRGHFLLKGNIEQIREFRTTFDQFLKVIRDEEIGFAESIDEEIYEKIEEILKDVSLTKSAKKAKLIKIFQVTCPEEKELLALISGGTVKLSNIFNDKSLDECERPKLSFADSGFDDYAGEIQTSLNEKYLIVESAKAVYDWAALADILGKYSCISDAKVELYKKHQKDLCCLKKLVRDNLSSEIYKEIFSDVSEKHNYCAYVGTANINGKKKNIEGKKCTKEDFYGYLKKRVIGSIDDSEKTEWLKKELETGNFLPKQTTGENSVIPYQVHLYELNAIISNLEDKIPLMKKEREKIRKIFTFRIPYYVGPLNGIFINGKTTNWVERKEGKIYPWNFNDMVDEEASAERFIRRMTNKCTYLVHEDVLPKYSLLYSKFEVLNELNNVRVNGELLSVEWKQRIYAEVFQRYRKVTQKKLKDYLRKCGFISENAVITGIDGDFKGSLTAYHDFKEKLTDVILNEREKEEIILNITLFGDARSLLKKRLGKICSQLTDKQKESLSNLSYRGWGRLSEKFLSGITSPALAGEEWTIIRALWETQDNLSQLLSSKYLFRKAVEKENGELEKQEITYQSVKELCISPAVKRQVWQTLLIVKEICKIKGNPPRRVFLEVAREKTNSGRTESRKKRLLEFYKYCRTYEKELYDKKMQGKLENCSDADLRSDKLFLYFTQMGRCMYTGDSIDINELWDNQKYDVDHIYPQSKTMDDSIDNRVLVKRTENQEKTDIYPIQTKIRESRRIFWKQLQSVGFISQEKYKRLTRATEFEPGELADFISRQLVENRQTTKVVANILKQALPETEIVYVKARTVSDFRHRFNFIKVREMNDLHHAKDAYLNVVVGNTYLIKFTKSPVNFIESHSNRSYNLKKLFTDGKVERNGETAWVSGENGTIGTVRAVMKKNNILVTLRVHEATGGLFDQQLMKKGKGQIPIKENNRLQDISKYGGYNKEAGAYFVLVESDDKKNRKKRTIEYVPIRLKKQVEESKEKLRRYLIEEKELINPVVLLDKIRFDSLFKIDGFFTCVTARQANQLVLKGANQLVLSPQNEIVLKKVIKFINRRKENKEVKIYRSDNLDSTMLNALYDEFVYKL

SEQ ID NO: 7052 - protein, 1101 aa, unidentified
  REGION 1..1101: note = Description of Unknown: Cas Enzyme sequence
TFGFDIGIASVGWCVLGENRIVDLGVRCFDKAETAKEGDPLNLARRTARLMRRRLRRRAWRLVKLARLLKRSGLIGDPRQPSSTSPWKLRVEGLDRRLSDDEWARVIYHLCKHRGFHWISRAEEKKAEGDKKEGGKVKQGLSDTLRRMTEKGYRSAAEMVLTEFPDAQRNKAGDYGKALSRILLADELALLFRRQRELGNPHADDNLEAKILGNGDRKSGLFWEQKPPLAGVDLLKMLGKCTFERDEYRAPKASFTAERHVWLTRLNNLRIVVDGVTRPLNENERRIALPLPYGYANAKLDYKQLRTALTKAGLSNFSFAGITEDKEKDALIKLPAWETMSKALKAKGLETEWEGMAGAATGGDPTLLDEIARVLSVFKDGAEVEAELRKLNLPGGKKMIDALSEIGFDKFHALSLKALRKIVPHMEAGLRYDEACQAAGYHHSQLHAAGAGEHKYLPPFYARRDKDGRMVFDEDMDVPRNPVVLRALNQARKVLNALVRTHGSPAAVHIEMARDLSRPLDERNKVKKAQNEYRERNEKDKAAFAAEYGIAAKSREFEKFQLYREQQGKCAYSLKPLDLHRVLHDIGYAEVDHALPYSRSYDDGKNNKVLVLAEENRNKGNRTPYEYLTALGGETGERWRNYVAFVESNKSFRLAKRQRLLRKDFSGKAADEFRERNLNDTRYICKFFKNYVERHLKLAPKVGAGGTADATTNKRCVVLNGQTTAFLRARWGLLKVRGDSDRHHALDAAVVAACSHGMVKRLADYARTKELAKARDGFPDPETGEIVDPAMFQQLHAHFPDPWPHFRQELEARLNLDNADELRAQLEMFGTYPPEAITAAKPLFVSRAPQRRNGGAAHKDTIYAQPERLKAQGGVTQKVALSSLKLADLDKLIDPHRNEKLYAAIRARLEAHGGKGDKAFPPDNPLKKPDRDGNPTGPVVRTVTMVIDKLSGIPVRGGIAKNDTMLRVDVFRHKKDGKFHLVPVYVHHAVTKELPNRAIVAFKDEEEWTLIDEQNFDFLFSAHPNDLMRVTLKQEALTGYFSGCDRSTGNVGLWAHDRNSSVGKDGFIRTGVKTAIAFEKFHVDVLGNIYLAPPEQRRGLA

SEQ ID NO: 7053 - protein, 1070 aa, unidentified
  REGION 1..1070: note = Description of Unknown: Cas Enzyme sequence
MSSAMEAPQKYVLGLDLGSASLGWAMIALNQADEPTSLIRSGVRIFEPGVDGTALDIEQGKDQSKAVERRTARLHRRQLRRRAARQRELFQELQKAGLLPINTAGGGASSEQRHELLNEFDRSLILKFLKPNDDSFAQKPLYLLRTIALDHALEPFELGRVLFHLSQRRGFKSNRKETKKSAKENEDLGQVKADIHSLELAIHEAGARTIGEYFAGLDPHTEKVRRRWTARKMFEHEFALIWAAQVAHHGSLLTQELHERVHELLFFQRPISAQKHLVGTCELERGNDKHPPKRRAPWATMAAQRFRMLQKVNDLVVIDTKNQASRKLTEEERGKLYQLLDREGTQSFASIRKYLELKGTTFNLEAGGDKDLPGNRTQKSMRKVFGVFWDEFTEGKQNQIIENWRNSESDELLMQEAMEHLGLDAEAAAVLVKESPQADYCSLSLTAITKLMPLMMSGRSFKDAETEIYGSRFSGLAVHDTLPPVREALPTLRNPAVERAMTELRKVVNAIVREYGKPYEIRIELARELKKPRQERIKATTANRKREADNKGIAAKILNECGIANPSRGDLEKAKLFVECGGICPYTSRSIPFSQLFQDSEFDVEHIIPRSRYPDDSFQNKTLCYLPENREHKRNQTPFEAYSNNPDVWAQILLRVAKWSNPGKLSRFKLQSESELADFSARQMNDTRYTSVLAGRLLAKLYGGRDVETDNGNRQVIFASSGAVTATLRRSWGFERILQAIVSPEPGETRGKPRTDHRHHAVDAITIALTRQSVIQAMANASAFESWQPRTRSWRRVPEPWTTPDFVRSLTDQIENMVVSHRPEHKISGELHKGSNFSRPYTYQGKPTVHTRCLLANLSVADIEADDVIVDPVVRDAIRLKLTELGGNPKLFENSVNTPVLMTANGRTIPIRKVRVRETKNPLKVGHGMSERFVDSGGIHHVSLFVARNEARKENWESAFVQITEAYDRRRRKLPVVSHELGNGLDADFLFSLQKDDTVELDFNGSRAIARVKKFYATGQIWFTGVNNAQMDAEQQKQKTTWSKRANSLKDLRPRKVVVDLLGRVHSAND

SEQ ID NO: 7054 - protein, 1024 aa, unidentified
  REGION 1..1024: note = Description of Unknown: Cas Enzyme sequence
MTYVLGVDGGIASVGWALLDEARQQIVAAGSWCFDPPEEPKTRTPTSAIRRQHRGQRRVIRRRRQRMAGLRVLFAEHGLIEEAGKNALRWRPECDPWVLRAAALDRILSCLELALALGHIARHRGFRSNSKRDRGVNAPSDTSDMLRAIAATTDRLEGRTVGQLAASDPDWIMRKRNRGDYLRTVQRSDLQHEANCIFDAQRRMGSVHASHDLQNQYSPLAFDQRPLADSDEKVGNCNHEPREKRTAKRAPSFELFRVLGRLTNLKLLTHEGAPNLTPEQINIAVDDFGKAGAKLTFKHLRQRLNLAIGVRFEGVSLADEIRDVAAREGASEGTHALREALGEPGWGSFRACPEKLDRAAEVLTFREDLFRIEEGLRETGMEPWCADLLLKAVAAGRFARFKGAAHISAKTVRAINPGLRRGLAVNEAFAEAGYNHAARAETAMKDIANPVARKALAQMLKQVHTVIHEHKHLFGTSGLPDRIHVELARDIGKGQEERDKISAGLDRRNREKDRVRQELKDLFPGHEPTADDLLRFELWKEQCRTCIYTGDSIPPASILATDNSYQVDHILPWSRFGDDSFRNKALVSARANQNKRNRTPFEWLGGDLRRWAEFSALVESCKDMSGGKKAGFYLRRNAAEVEERFRSRNLNDTRYACRVLLDMLARWYPADERDTEGKSMTRHVFARPGSLTSKLRQVWGLEGRKKGVDGKRLPDDRHHALDAMIVAACSESMLQRLTVQVQQSEALGLPRAFVHVPQPWPEFQAQAHAILDRVLVARPEGRRARGEVHAATIRQIRERDGVTIVYERKAVELLTLNDLSRVKDGKERNAPTVAILRAWIEAGRPMTALPRSPKGDIIRKVRLETNRKVGVLVRGGAADRGDMARVDVFCEKPAGKAARFHLVPIYPHQISDPSRKSPPDHAIVAYKDESDWTSTKSFDFLFSLYNNSLVEIIKSNGSITRGYFKGVNRSVAAMALADPICQQSLRVGIGTKTLLSFQKLTTDRLGRLSHVARESRTWHGVVCI

SEQ ID NO: 7055 - protein, 1519 aa, unidentified
  REGION 1..1519: note = Description of Unknown: Cas Enzyme sequence
  MOD_RES 666..673: note = Any amino acid
MKRILGLDLGPNSIGWALVNLEDNEEYGCGAGRIVADGSRIIPMDAAIQGDFEEGNSVSQTAERTGYRGIRRLRERCLLRRERLNRVLDVMGFLPEHYSAALTRYGKFKDDDGCKLAWRKSEDGRYEFIFKESYAEMLADFRLNQAEWLAGGALVPYDWTIYYLRKKALTQAIDKQELAWLLLNFNQKRGYYQLRGEEKDEDKSKLEEFYALKVVDVRDTGERKGKDTWYDVVLENGMVYHRAAPEPPEWKGLVKEFIVTTQLDKDGNPKLDKDGGVKRSFRMPKEDDWTLVKKKTEADIDKSGKTVGEYVYDALLANPKQKIKGKLVRTIERKYYKEELKRILEAQKNFIPELTDEALYSACIEELYHSNDAYRRSIERRGFTYLFTDNIIFYQRPLKSKKSLIDDCPYESHAYTDKETGERKTAPVKCAARSNPVFQEFRLWQFVSNLRIFQREKEVGGLLRTDVDVTGEFISSTDDVIRLFGWLNDRENITQDTLFGSYFKIKKPKGKDTQYPYRWNYVEDKAYPCNETRALMLKHLDKAGIAKDVLTPETEMRLWHILYSVEDKQELQQALKTFAGKHGLGEEFVEAFAKFPPFKKDYASYSEKAIRKLLALMRPGRRWSEEAIDLKTRERIEKLINGEYDESISDKAREITRGMTRVEDFXXXXXXXXRHSEAKEVVKWRTPDDVDEYLRHFKQHSLRNPIVEQVVTETLRTVRDIWRTHGTIDEIHIEMGRNMKQTAEQRKKATQLITDNENANIRAKAMLAEFMNPEFGIDNVRPYSPGQQELMRIYEDGVLSSVGEIDDGISEIIRKLSETDEQKRPSRSEVLRYKLWLDQKYQSPYTGRFIPLARLFTTDYQIEHIIPQARYFDDSFSNKVICESAVNALKDKMLGMEFIKEKHGQIVRLDNGGDATILSVEEYERLVTNIYRNNRAKMRKLLMDDIPDDFIARQLNDSRYISKLVKTLMSNIVREDGEEQDISKNVITTNGTITDRLKKDWGVKDVWNRIVLPRFRRLNELTGTRKFTTTSAGGHEIPDMPLELQKGFNKKRIDHRHHAMDAIVIACTTRSHVNLLNNEAAMSGNNANRYQLSRKLRRYEQTEIVRNGERKTIETAREFLKPWPTFTTDMEKALRDIVVSFKQNLRIINKTTNAYQRYVDGKKTTVHQVKGDSWAVRKPLHKETVYGEVNLRRIREVSLKEAIRQRKAIVDKDMKRKIIDFVKLGYDEKLIKTYFAGHKDAWPDFNPSKIKIYYFTQDVLGKDGSVKDRYFATRKPLDTSFNRKRIEDSVTDTGIQKILLRHLEACGDAERAFSPEGIEEMNRNIVSLNNGKQHQPIYKVRVYEKAEKYAVGKRGSKATKFVEAAKGTNLFFAVYETEETDKATGLPVKKRSYATIPLYEAVKRAKAGLPIAPENANGDKPAFVLSPNDLVYLPTKEEIDKGTISRPLDKSRIYKMVSSSGYQCFFIRYEVANSIVDKFEFSALNKMERAITGEMIKETCIPIKVDRIGNIIEINGERL

SEQ ID NO: 7056 - protein, 1469 aa, unidentified
  REGION 1..1469: note = Description of Unknown: Cas Enzyme sequence
MDAAMLGDFDKGNSTSQTFERTKFRSTRRLRERHLLRRERLHRTLNILGYLPEHYAQQIDFSHNPGKFIKGEEPKLAWTKDKCGNNTFLFQTSFQEMLTDFAQHLPDYFTNNRKIPYDWTLYYLRKKALTEKISKEELAWILLNFNQKRGYYQLRSEEEEETKKNKQIEYHALRVVNVEATEDKKGKGTWYNIHLENGWIYRRSSDVSLKSWEGMTKDFIVTTDLNDDGTPKTDKQGNIKRSFRAPNEDDWMLLKAKTESDINASHKTIGEYIYDTLLEKPQQKIRGKLVRTIERKFYKDELRRILEVQTTFHPELQDHTLLAQCIQELYPHNEGHRNLITRRDFIHLFIDDILFYQRPLKSKKSLIGNCPYESHKGIDKETGEIKEYGVKCIAKSHPLYQEFRLWQFLSHLRIYQKEKYVNGKLETDVDVTNEFIASEKEIATLFEWLNERTDIDQKSFLKYPPFGLKKNALNEYRWNYVEDKTYPCNETHAAICARLAKANIPARLSPQMEEHLWHLLYSISDKDELRKALTTFANKQQWETDSFVESFIKMPPFEKDYGAYSAKAIKKLLPLMRLGKYWSEEAIDQNTRIRIEKLIHGEADENIGQRTHEKTSHLKVPEQFRGLPLWLACYIVYDRHSEAQEITRWESPADIDRYLNNFRQHSLRNPIVEQIVLETLRVVRDIWKKTGQIDEIHIELGRNMKETASKRALQTARILENENTNLRIKALLTEFINPEFDIENVRPHSPNQQDLLRIYEEAVLQENADQLPDDITDFLKKLRENKQPTRNEFIRYKCWLEQKYCSPYTGEIIPLSKLFTPAYEIEHIIPKARFFDDSFSNKVICESAVNKLKDKQLGYEFIKNHHGLKVETGFGGTVQILTEEAYEAFVKDHYRHNRTKMKKLLMEDIPDKFIERQLNDSRYISTIVKCLLSNIVREKDEQGDLEQEAISKNVIVCTGGITDRLKKDWGLNDVWNDLMAPRFERLNRLSGKTCFGHWEQTEGKRFFRTELPLEYQRGFSKKRIDHRHHAMDAIVIACATRNHINYLNNESARKDAKISRGDLQRLLCDKRGTDDKGNYNWIIRKPWKTFTQDVRQTLENIIISFKQNLRVINKCTNHYTHYDANGEKIIDKQHKGDSWAIRKPLHKDTVFGRVNLRKVREVRLSQALEMPQMIVDKKLKTKIQQLIAYKYDKKRIERYFKENTFDWKEYNLSKIPVYYYTDTIDPLVASRKPLDTSFTEKKIRESITDTGIQKILFAHLSNKNNEAELAFSPEGIEEMNRNLMVLNNGKPHQPIYKVRVYEPLGNKFPVGESGNKTSKYVEAAKGTNLFFAIYTTTNGKRTYATFPLNIVIEREKQGLKPVPEQDEAGNQLLFWLSPNDLVYLPTSEEIETGRIGEIDKRRIYKIVSFTGNRLYGIPHRIANLIIDRMEFYTLNKIELTDDKESIKEICLPLKVDRLGNIIQLGKPTL

SEQ ID NO: 7057 - protein, 1369 aa, unidentified
  REGION 1..1369: note = Description of Unknown: Cas Enzyme sequence
MKRILGLDLGTNSIGWALVNEAETVNEKSSIVKLGVRVNPLTVDEQKNFEAGKSIPTNAGRTLKRGMRRNLQRYKLRRDYLIQCLKEYGWITSDTLLYECGNRTTFETYRLRAKAVDEEIALEELGRVLLMINKKRGYKSSRKAKSSGEGQLIDGMAIAMDLYHNGITPGEYVYSLLSKGKKYVPAFYRSDLLGEFDRIWDYQCTYYSDILTPQFKELIRGKSSQVTSKLFKQQYNLFTADNKEKDKRLQAYCRRADALKKRLPVEEVAAALCDVNRDVNASSGYLGTISDRSKKLFFNKQTVGQYLMLELDKDSHFSVKNEVFYRQDYLNEFEAIWEKQAEYHPELTPDRKKILRDVVIFYQRPLKSQKDLVACCELERRRIEVMKDGKVRSVEIGPKVCPKSSPLFQDFKIWHVLNNLKVRDKATGDERFLELDEKEILFSELAIKSKLSKTEALKLLYQKPKGLDLNYDSIEGNTTQAALFAAYQTVIAMTGHGEYVFSKMSASEVMSVVEGVFGGLGFNTSVLRFDSLLQGKELEKQDSYRLWHLLYSYEGDNSMTGTDGLVAKIASLLRCDEEYAKVVAGVTFQPDYGSLSAKAIRRILPHMCAGNEYSLACEYAGYKHSRRSMTKEELGQKDYKDHLELLPRNSLRNPVVEKILNQMVNVVNAVVDAYGKPDEIRIEMARELKKSAREREEMTAAINKANSEHERIKEILRKEFGIQHVSRNDIVRYKLYCELKNNGYKTLYSDTYIPQEKLFSKEVDIEHILPQARLFDDSFSNKTLEYRSVNIEKSNQTAWDYVAIKYGEEGVTRYKKRVDDLWAAGVISKSKHDKLLMKQEDIPADFINRDLRDTQYIARKAREILEDMVSMVVSTTGAVTDRLREDWQLVDVMQELNWDKYAMKGLTEEWTDKDGRRISRIKEWTKRNDHRHHAMDALTIAFTKHSFIQYLNNLNARSDKSGSIYAIEQKELYRDNHGKLRFIMPFEGFRSEAKRQLENILVSIKAKNKVVTRNVNNARRGSGRQAKVQLTPRGQLHNETIYGSIHRYVTKLEKVGGNFDGEQIAKVANLRYREALQARLEAFGGDAKKAFTGKNALDKNPLYLKDTRTEVPLKVKTVSTETLYTIRKAVAPDLNVDKVIDAKVRKVLEERLQEYGGDPKKAFVNLDENPIYLNKAKGITIKRVAITGVNNAIALHDKKDVGGHIMLDASGRKQPVDFVNTGNNHHVAIYRDAEGILQEVVVSFYEAVARVSLGLPIIDREYRKEDGWQFLFTMKQNEYFVFPNPETGFNPQEVDLTDETNYALISPNLFRVQKFTIKDYFFRHHLETTVEDRKELKDMTWKRCGLGGIIGIVKVRVNHIGRIVSVGEY

SEQ ID NO: 7058 - protein, 1515 aa, unidentified
  REGION 1..1515: note = Description of Unknown: Cas Enzyme sequence
MAMEQKYVLGLDIGTNSIGWAVINALKDESTMNQLNGIYLAGVRIIPMDAAILGDFDRGNSKSQTADRTRSRGIRRLYERSQLRRERLHRVLNVLGFLPIHYARQLDRYGKYLAGTEPKLSWYKDGQGHWTFLFQESFNEMLADFCQKHPELLSGRQKIPYDWTIYYLRKKALTQKIRKEELAWILLNFNQKRGYYQLRGEEEQERSSKTRQYFDSQIVTDIIDTEQQYKGMKVLSVVLESGIKGKIFRKEIPDWIGQKKDVIVIIDIDKDGNDKYDEKGDLSCRFKVPTEQEWDEQWELIKAKTQKDLDNSGETVGAYIYDTLLQMPKQKIRGKLVRTIERRYYKDELRQILEKQKEFHPEFCDRALYEACIEELYSQNDAHRNLISNRDLVYLLADDILFYQRPLKSKKSLIADCPYEAYTHTDKDTGVIQHFGIKCIAKSHPLFQEFRLWQFLSNLRIYQKEKTMDGKLCFDVDVTSEFLKNEKDYTDLFDWLNRQKSIKQDTFLKCPLFRLKKNDIGRYRWNYVEDKTYPGNETHALILERLEKAGIPTDFLTREKEEALWHILYSVSDKEELGKALDSFAEKQGLDRNFTDTFLKTPPFPKEYGSYSAKAIKKLLPLMRMGKYWNEAYIDKQTRNRIDKIVAGEYDENIRTRVREKAIHLEDVSSFKGLPLWLACYVVYDRYSEAKDIQKWEKPADIDDYLKKFKQHSLHNPIVEQIILETLRTVRDIWQQVGHIDEIHVELGREMKNPKDKRAKMTQQIQENENTNLRIKALLTEFMNPEFEIENVHPYSPSQQDLLRIYEEGAWSSVDEVPDDIAVIVKKFNESDAKKRPTTSEVLRYKLWLEQKYRSPYTGEMIPLGKLFTPAYEIEHIIPQARYFDDSFSNKVICESEVNKLKSNMLGHEFISKHHGEKVQLPGGKHVEIFSVGSYEQFVKDNYSRNVAKMKKLLLDDIPEQFIARQLNDSRYISKLVKSLLSNIVREEGEQEETSKHVIVCTGSVTDRLKKDWGINEVWNKIILPRFLRLNELTGYNRFTSVNTSGNVIPAMPLELQKGFSKKRIDHRHHAMDAIVIACASRNMVNYLSNESASKNAKISRYDLQRLLCDKQKTDDKGNYRWFIKKPWDTFTQDVYLILQNVIVSFKQNLRVINKTTNYYQHYVDGKKKEIPQKKGDSWAIRKPMHKETVFGEVNLRGIKVVPLKEALKNPKAVVEKDLKKKLKELLAQNLNEKQIKKYFETNKDTWQDVDLKKIKVYYFSKETKDRFFAVRKSLDSSFDKKKILGSVTDTGIQKILLRHLEANGNNAELAFSPEGIEMLNKNIIELNDGKWHQPIYKVRVYGKADKFAVGQTGNKSLKYVETAKGTNLFFAVYETEQEEPNTGELIKKRSYATIPLNVVIERQKRGLPPAPEDENGNLPKFVLSPNDLVYVPTKEEVLRKKINFPLNRERIYKVVSFSENRLFTIPNHIAKVVVDGEEYNKKNIIELTDENQSIKEICIPIQVDRLGNIIKKLL

SEQ ID NO: 7059 - protein, 1201 aa, unidentified
  REGION 1..1201: note = Description of Unknown: Cas Enzyme sequence
MEKIIGLDLGTNSIGWAIVRHNDDLSYTLQDKGVNIFQDGVAHDKNGEKPAVQARTDARASRRHYFRRRLRKIQLLKILVAQKMCPYISDEDLDKWKLHKEYPVSDDLMAWQRTDDSCGKNPYYDRYRCLTEVDMNNRVDRYALGRALYHISQRRGFLSNRKESTKESDGAVKAGIQDISNAIRNAGCEYLGEYFYKIYGSGQKIRTRYTSRIDHYKKEFDAICAKQALDDNLKVQLEKAIFFQRPLKSQKSLVGKCTFEKSKPRCPVSHPRYEEFRMWAFINNIRVKTYSDSNPRPLDDCEIMKIVPLFYRKSKSQFNFEDIAKTIAGKGNYSDLKDKAEKPYKFNFKMYASVQGSPVTSGLKSIFGENWEDSLCNKYIRSERKTRDQIINDVWHVLFSFDNDEMLCSWAIRNLGLSEQDAEKFEKINIPQGYASLSLCAVNKILPYLRAGYRYDEAVILANLPAVTGYDKGSEKLEEIQENISIIIEDHAKNPLENKRSIQYSVEDYLRGCQNIDSKHLSRLYHPSMIEVYPQVSPENGIYKLGSPRVSAIRNPMAMRSLFRLRKLLNELLQSGTINHMTTVRIELARGLNDSNMRKAIEAYQREQKKKRDESRYRIQEHFGAQYEPSENDILKYILWEEQKHRCPYTGNEIGIEDFIGPNPKYDIEHTLPRSLGGDNSQMNLTLCENRYNREIKRATLPANLNDHDKIMAIIETFGWQDEIETLKKQIERTKTPSSTKEEKDKKIQRRHYLKMKLNYLEGKLKRFTMTEVPEGFSNRQGVDVGIIGRYARLYLKSVFRNVYTVKGATTAEFRKMWGLQEAYAKKERDSYANHCIDAITIACIGRNEYEEWARFKKTEESYRFSKGAKPSFPKPWPTFTEDVKSVADSILVPHYTASNQSKHTKKKFRKNGKIQYNDEGKTIYLQGDSARCALHEAFFYGAIKKNDEIRYVIRKSLDSLEQNDLDKIVDDTVKEKIKEAVRQKGFKNAIAEGIWMNEALRIPIKKVRVYIKDKPIQLKPHRDKSQQKYKRYLNVMNDSNYCMAIYEGTNDRGKVIRSYSVVNNLDAARFYNGKTQWDDIVRLSDDNDLPLKYILKIGTMILFYEKSPEELHECCVEELSKRLYKVIGLSSGSETYPYAVIFCRHHLEARKSSDLKAKNGVWKIGEDYRPIIKVLHTQIRAYVEGQDFEISLDGHVKFKH

SEQ ID NO: 7060 - protein, 1369 aa, unidentified
  REGION 1..1369: note = Description of Unknown: Cas Enzyme sequence
MKRILGLDLGTNSIGWALVNEAEIANEKSSIVKLGVRVNPLTVDEQKNFEAGKSIPTNAGRTLKRGMRRNLQRYKLRRDYLIQCLKEYGWITSDTLLYECGNRTTFETYRLRARAVTEKISLEELGRVLLMINKKRGYKSSRKAKSSDEGQLIDGMAIAMELYHNGTTPGEYVYSLLSKGKKYVPAFYRSDLLDEFDRIWDCQCVYYPDVLTSQFKELVRGKSSQATSKLFKQQYNLFTADNKEKDKRLQAYRRRADALKKRLAVEEVIAALCDVNRDVNASSGYLGAISDRSKELFFNKQTVGQYLISELDKDSHFSVKNKVFYRQDYLNEFEAIWEKQSEYHPELTLDRKKLLRDVVIFYQRPLKSQKGLVACCELERHRIEVMKDGKVRSVEIGPKVCPKSSPLFQEFKIWHVLNNLKVRDKATGDERFLELDEKEILFSELEIKGKLSKTEALKLLYQKPKGLDLNCDSIEGNATQAALFAAYQTVIAMTGHGEYVFSKMPASEVMSVVEGVFGGLGFNTSVLRFDSLLQGKDLEKQDSYRLWHLLYSYEGDNSVTGTDGLVAKIASLLRCDEEYAKVVAGVTFQSDYGSLSAKAIRRILPHMRAGNEYSLACEYAGYKHSRRSLTKEELERKVYKDHLELLPRNSLRNPVVEKILNQMVNVVNAVVDAYGKPDEIHIELARELKKSAKEREDMTAAISRANSEHERIKEILKKEFGFQHVSRNDIVRYKLYSELEKNGFKTLYSNTYIPREKLFSKEVDIEHILPQARLFDDSFSNKTLEYRAVNIEKSNQTAWDYVATKYGEEGVTGYKKRVDDLLAAGVIGKSKHDKLLMKQEDIPEDFINRDLRDTQYIARKAREILEDMVPMVVSTSGAVTDRLREDWQLVDVMQELNWDKYAMKGLTEEWTDKDGRKIRRIKDWTKRNDHRHHAMDALTIAFTKHSFIQYLNNLNARGDKSGSIYAIEQKELHRDNHGKLRFMMPFEGFRSEAKRQLENILVSIKAKNKVVTRNVNKAKRGNGHQAKVQLTPRGQLHNETIYGSIHRYVTKLEKVGGNFDGEQIAKVANLRYREALQARLEAFGGDAKKAFTGKNALDKNPLYLKDTRTEVPLKVKTVSTETLYTIRKAVAPDLNVDKVIDAKVRKVLEERLQEYGGDPKKAFVNLDENPIYLNKAKGITIKRVAITGVNNAIALHDKKDVGGHIMLDASGRKQPVDFVNTGNNHHVAIYRDAEGILQEVVVSFYEAVARVSLGLPIIDREYRKEDGWQFLFTMKQNEYFVFPNPETGFNPQEVDLTDETNYALISPNLFRVQKFTIKDYFFRHHLETTVEDRKELKDMTWKRCGLGGIIGIVKVRVNHIGRIVSVGEY

SEQ ID NO: 7061 - protein, 1399 aa, unidentified
  REGION 1..1399: note = Description of Unknown: Cas Enzyme sequence
  MOD_RES 329..338: note = Any amino acid
MKKILGLDLGTTSIGWAVVNEAENKNENSSIVKIGVRVNPLTVDEQRKFESGKPITTNADRTLKRSMRRNLQRYKLRRNNLIEVLKTTGWITDATILAEHGNFSTFQTLRLRAKAATEEISLEDFARVLLMLNKKRGYRSSRKSKGNEDEGQAIDSMDVAKYLYDNQLTPGQYAFSQLSDGKYNIPDFYRSDLIDEFDRVWEKQKEFYPGLLTDSLKESLSGKNEKQVWAICRDSLNIEGIKRATKGKEQIKENFEWRAKAVNEKLDLESLAVVFQKINSQIKSASGYLGSISDRSKELYFHKQTVGQYLVSLLDKDPNTSLKNRAFYXXXXXXXXXXEKIWSTQAQFHPQLTTELKKEIRDIIIFFQRPLKSQKGLVNICEFEQKQIEIELNGKRKTKLIGPKVCPKSSPLFHEFRIWQTINNLKVNGEYLCQEDKEKLASELEIKEKLSKAEILKLLFKNYKELDLNFKEIEGNRTIAALYKSYVQIIEMTGHGEYDTLINLPSDKLKKTISETFHALGYDTGILEFDSYLQENDFEQQPIMKLWHLLYSYEGDKSKTGNDSLINKISELFGFEPEYSKIIASVTFSPDYGSLSTKAIKKILPYLKEGNEYSAACRYAGYRHSKKSLTKEELENKTYKDHLEQLAKNSLRNPVVEKILNQMVNVVNAVIGTYGKPDEIRIELARDLKKSQNERKDATLAISRSANENDRVKKLLHEEFNIEHPSRNDIIRYRLYEELEATGYKTLYSNTYIPREKLFSKEFDIEHIIPQAKLFDDSFANKTLESRLVNIEKSNMTAFDFIKNKYGEVESYKARVEKLFKDGKISKTKYKNLLMPEKDIPEDFIERDLRDSQYIAKKAKEMLEEITGSVVSTTGSITKRLREDWQLVDVMQELNWDKYSKLGLTESYKDKDGRTVNKIIDWTKRNDHRHHAVDALTIAFTKLAYIQYLNNLNARIPKGNDEEEFFDLSKFSLKDVPPEERSRIVRYIESTMLYRDSKGKLRFCPPIPLDIFRAEVKRQLENVLVSIKAKNKVVTRNTNVTKKKGGVNKKVQLTPRGQLHNETIYGSKQQYYTKDEKVGASFDVEKIKTVAKKAHRDALLKRLADFGNDPKKAFTGKNSLDKNPVYLNESHTEQVPVKVKILYMETVYTIRKAITPDNFKDAKTIDKIIDSHIKELLLDRLDKKNGDAKKAFSNLEENPIWLNKEKGIAVKTVTIKGVNNAIALHDKHDKTGKPVLDQSGNKLPADYVSTSNNHHIAIFQDADGNLQEQVVSFYEAVCRKNLGEPVIDKEYKKDEGWKFLFTMKQNEYFVFPNSETGFNPYDIDLMNPDNYPVISPNLFRVQKLATKDYTFRHHLETNVEESTVLLNKTWKRIRNVNGLKGIVKVRINHIGQIVHVGEY

SEQ ID NO: 7062 - protein, 1394 aa, unidentified
  REGION 1..1394: note = Description of Unknown: Cas Enzyme sequence
MRKILGLDLGTNSIGWAVVNEAENKEEKSSIVKLGVRVNPLTVDEQRNFESGKSITTNADRTLKRSMRRNLQRYKLRRDNLIEVLYNAGWITDNTVLAETGHNTTLQTLRLRAKATHQEISLEELARVLLTINKKRGYRSSRKTKNNDEGQIIDSMDTAKYLYDNNLTPGEYAYDLITKGKTNIPDFYRSDLKEEFDRIWENQKEFYPDILTDELKENLSGKNEKQTWAICQAPFGIIGIKRTTKGKDQIKENYEWRQRALKEQLDLESLAIVFQKINGQIKNASGYLGNISDRSKELYFNHQTIGQYLVEHLDRNPGSSLKNLVFYRQDYMDEFEQIWEVQSRFHPGLTQELKHELRDIVIFYQRPLKSQKGLVSTCELERKTIEVEIAGKKKQKEIGPKVCPKSSPVFQEFKIWQTINNLRVNGEYLSQEDKELLANELSVKDSMSQSDILKLLYKNPEELNLNYKEVNGNKTNAALFKAYSKIIDLSGHGEYDFSKMPAAKSIKTVKEVFSALGYNTEILTFDLSSDDIEHQPLFRLWHLLYSYQGDKSKTGNESLVQKVSELCGFETDYAKIVADITFEPDYGNLSSKAIRKIMPYMKEGHDYSSACGYAGYRHSKTSLTKEEIENKEYQGRLAELPKNSLRNPVVEKILNQMVNVVNSVIDTYGKPDEVRIELARELKKSKDEREQMAKAISKAKSDNEEIAKKLQEEFNIPHPSRNDIVRYKLYMELKDNGFKTLYSNTYVPREKLFSKEFDIEHIIPQARLFDDSFANKTLEARQVNIEKSDMTAYDYVKGKYGEDALPAYISRVENLSKTGSISKTKMRNLLSAVNDIPEGFIERDLRDTQYIAKKAKEMLEDVVKSVVSTSGAITERLREDWQLVDLMQELNWNKYDKLELTESYPDKDGRIIKKIKDWTKRNDHRHHAMDALTIAFTKRSYIQYLNNLNARIAKSTDDSYIDLRNFSLCSLPKEDRSKIVRYIESTQLYRDNKGKLRFLPPMPLDIFRAEAKKHLENILISIKAKNKVVTRNINTTKKKNGLNKKIQLTPRGQLHNETVYGLINRYATKEEKVGPSFNVEKIKTVASPEYRNALLKRLNEFGNNPQKAFGGKNSLDKNPVFLDDFHSEKLPVKVKTLYMEPVYTTRKAVTPDNFKDAKAINKVIDSRVKQILSDRLNEFGGDAKKAFSNLDENPIWFDKERGIVIKSVKITGISNAVALHDKHDCFGHDITDDFGNKLPSDFVSTSNNHHIAIYRDADGNLQEQVVSFYEAVARASLGQPIIDKEYKKDEGWQFLFTMKQNEYFVFPNSETGFDPGETDLMNPENYAEISPNLFRVQKLATKNYTFRHHLETNVDENMALRNTTWKRIQTVNGLKGIVKVRINHLGQIVHIGEY

SEQ ID NO: 7063 - protein, 1346 aa, unidentified
  REGION 1..1346: note = Description of Unknown: Cas Enzyme sequence
MKKILGLDLGVSSIGWALVNEAENKDEKSSIIRLGVRVNPLTVDEKGNFETGKSITTNADRTLKRSMRRNLQRYKLRRAALIDSLKSYGWIKEDSILVESGKDTTFQTLRLRAKAAEEEISLEELARVFLIINKKRGYKSSRKLNKDENPDEGSAIDDMETARILNQEGITPGEYSYRLLCNGKEDKNLPKFYKSDLENEFEHIWEFQKHFYPDIMTDTLKENLRGKNEKQTWAICEKPFSIAGIKRTTKGKELIKENYLWRSQALKEQLNLEQLAVVLQKVNAQLKNSDSYLGKISDRSKELYFRHRTVGQYQLEQLLENPHCSLKNQVFYRQDYMEEFDRIWETQSRFHPEMTPDKKKIIRDIIIFYQRPLKSQKSLISYCEFEKGRKVCPKSSPVFQEFKIWQMLNNLKVDGEYLDLEYKQLLFRELSIRKELSKADTLKLLFGKPKGHEMNFRKLEGNRTQATLFQAYSKILSLSGHDEIDFSKSADEITDKTAAVFSALGISTDILTFDSSKSGKEMENEPLYRLWHLMYSYTEDNSKTGYDSLVSKLHEEFGFTPEYGKILASVTFEDDYGSLSTKAICRILPFMKNGMEYSAACTEAGYRHSQRSLTKDEIENKEYKDRLDILPKNSLRNPVVEKILNQMINVINGVIDAYGKPDEIRIELARELKKNAAERQKAIDAINKSTKENKEIEEILKRDFGMAHVSRNSIIRYKLYMELKDNGFKTLYSNTYIPREDLFSKRFDIEHIIPQSRLFDDSFANKTLESKDINITKGDMTAIDFVADKYGQEGVERYKSTVDMLFGKGAISKTKYHNLLRTQNDIPENFIQRDLRDTQYISRKALEILGDIVKSVVATSGDITARLREDWGLVDVMKELNWDKYDKSGMTEYYNDSDGRIISRIKDWTKRNDHRHHAMDALTVAFTKRSIIQHLNTLNAKDKEQQQEITSKGRLLPPMPFDELRCETKKHLDDILVSIKAKNKVVTRNTNKTKSKGGYKEKIQLTPRGQLHNETVYGEILQYDCKDEKVGSNFDADKIATVACERFRNALYQRLAQYGGNPKKAFSGSNSLEKNPLFTDILHSEEVPQKVKTVRLIPVYTIRKQIDPTLKIEKVIDCHIRQILYNRLEEYGNDPKKAFSNLDENPIWLNKDRGIQIKRVTISGPANVYALHDKHDMSGIPILSSRGETIPSDFVSLSNNHHIAIFMDSDGNLQEQPVPFMEAVARVSLGDPVIDKTYKVKDGWKFLFSMKQNEYFVFPNKETGFDPNSIDLLNPVNYPVISKNLFRVQKLTTKDYCFRHHLETSVVDNNDLKDITWKRIRNTNNLKGIVKVRIDHLGNIVQTGEY

SEQ ID NO: 7064 - protein, 1046 aa, unidentified
  REGION 1..1046: note = Description of Unknown: Cas Enzyme sequence
MSKLVLGLDVGIASVGWGIIDYETNKIIASGVRLFSERDKKQNETRRNSRSSRRLIRRREHRLERIKKILFEDKIITENFIPLENPYEIRVKGLNNKLSNKELATAILHIAKRRGVSGNWTVEESKKAAAEEESLKKILNENREQLKNKYICEIQLERLKNDGKVRGNTNCFNTSDYLKELDKIFENQNIKKETKEKIREIIEDRREYYEGPGNEKSITPYGRFIIKDGKVIELNFIEKMRGNCSVFPEEKRASKNSYDACLYNLLNDLNNLTIDGKSIDPNTKKIIIEEYINKKGNITVKQLLKVLNVDNSLLVHGFRTNKSEEPIITSFECYKKVLNKVEKEKLNPIVCEDKELFNQISDILTSYKGIEQRKEKIKELSDKLNDKDLEILANLTGFTQYHSLSHKALKLFINEMMETNYNQMQLLQINNWFNKKDTSKGKKNISFNEEDILSPVAKRSHKEAIKVLNAVRKEYGELDSIVIEMAREKNSEDKKAKIKEIQKSNELLNQKVKEVLNGKEVNYQTQLKIKLYLDQECKTAYTGEIIDLDKLVNDPTAYEIDHIIPLSISLDDSYNNKVLVTHKENQDKGQRTPYEYFKSGKINENYENFKARILSNNNISGRKKQNLFFERDINQYDVRKKFINRNLVDTRYATRSLLNNITNYYKNNEIDTKVYTINGNITNLFRKKTILSKDRDKDATHHAIDALIIAGIKKMKLMDNLLNLEIKDDIVYDKETGEVMTLENEKDFFDETFMNFLSSLKEVQPKFSHKIDSKVNRALSDETIYSTRRINDTEYTVGKYKNIYDKDGEKLAKDIRSNKVEKLLIYKNDKKSYDIIKSIVEEYPNDENPFATYFKEHNEYIRKYSKKGNGAPIINIKYIDDKVGEKVINLTDKFKNSTRRIIKKQLNPYRVDIYKTEDNKHKILEVKQIDIAYKNGKAYIDKNKYEQLKKDHNINEKDKFMFTLYKDSIIKVENEYIRYAGIQNIKFGIICYKTIDQSKTYRNDKEVRQPYINIKNATIFEKYNVDVLGNMHKSVNETCKLEIEMI

SEQ ID NO: 7065 - protein, 959 aa, unidentified
  REGION 1..959: note = Description of Unknown: Cas Enzyme sequence
  MOD_RES 639..653: note = Any amino acid
MKRILGLDLGTNSIGWALVNEAENTDEKSSIVKLGVRVNPLTVDEQKNFEIGKSIPTNAARTLKRNARRNLQRYKLRRDYLIKCLKEYGWIDSDTMLYEWGNHTTFETYRLRAKAVTEEISLEELGRVLLMINKKRGYKSCRKVKSSDEGQLIDSMEIAMDLYHNDMTPGEYVYSLLSKGKKYVPAFYRSDLLNEFDRIWNCQSVYYPDILTPQFKELVRGKNAQGTSKLFKQQYNLFTADNKEKDKRLQAYRRRIDALKKRLDIEDVAAALCDVNKDVNASSGYLGAISDRSKKLFFNKQTVGQFLMSELDKDSHFSVKNEVFYRQDYLNEFEAIWERQALYHPELTKDRKKMLRDVIIFYQRPLKSQKELVACCELEKHCIEVIKDGKTRSIEIGAKVCPKSSPLFQEFKIWHVLNNLKVKDKTTGDERFLELDEKETLFSELTIKSKLSKAEALKLLYQKPKGLDLNYDSIEGNVTQATLFTAFQTIIAMTGHGEYVFSKMPSSEVMSIVEGVFEGLGFNTSVLHFDSGLEGKALEKQDAYRLWHLLYSYEGDNSVTGTDGLVSKIANLLHCEKEYAKILSGITFQPDYGNLSAKAIRRILPHMRAGNEYSLSCEYAGYKHSRRSLTKEELEQKIXXXXXXXXXXXXXXXNPVVEKILNQMINVVNAVINEYGKPDEIRIEMARELKKSAKEREEMTAAINKATSEHERIKEILNKEFGIQHVSRNDIVRYKLYCELKNNGYKTLYSDNYIPREKLFSKEVDIEHILPQARLFDDSFSNKTLEYRSINIEKSNQTAWDYVVTKRGENGAAQYKKRVDELLIVGAISKSKHDKLLMKQEDIPKDFINRDLRDTQYIARKAREILEDIVPIVVSTTGAVTDRLREDWQLVDVMQELNWNKYAQQGLTEEWNDKDGRKIRRIKEWTKRNDHRHHAMDALTIAFTKHSFIQYLNNLNARS

SEQ ID NO: 7066 - protein, 907 aa, unidentified
  REGION 1..907: note = Description of Unknown: Cas Enzyme sequence
RNSKNAWIVRRTDEKILPWNIESVVDYDKCEQEFIKRMQNNCSYLSNEPVLPKCSLLYSEYMVLQELNNLQINGQKLTREIKEKILEKYKEFGSVKISELKTFLRSEGFVESGDEISISGISDKLMANMNIYKNFNRILNGEIEKHRDEVEDIIAHATYMSDKSRLQRWLNKTYSNILDAKQIKEIKGLKISDWGKFSKKFLDGILGLDQRTGELRAIIQIMREEPLNLMEILAKYEFDALNVKQSDKETITYDDIEQLYCSPAVKRGTWQSVKIVQEIQKIMGAKPEKIFIEVTRADDEKMKGKMFGPRKDKMLKTYNSIKADLALMIKDADIKELKDKLSKEPTLDSKKLYLYFTQMGKCMYSGESISLDDIMKDTYDIDHIIPQSVIKDDSFDNLVLVKRQANIDKSNEVVAPKIQKARKSFWQYLNKNKLISNEKLARLLRTEKLSDEEKKDFVARQLVITNQSAKAVIDLFKSVYGSLNVVYSKAKYVSMFRNCEFKFDRDENVKDSTKWEQLKQSLIKCRDMNDLHHAKDAYLNIFVGNVFDEKYSRRFYLKDKLSYGFNLNNAFLKDMPGVLEKEKHLPIVTQTMQSNTPHIGFLSREKTGQFYKETIWGIDKHQKDFDSIEEIKFLKNDGRWNGGNIPCKSAKEPLSNTEKYGHLSDATYSYFSVVEYEQKGKTIKRFVEIPYIYAKDIKSDENLIGAVEKIIGVKNCRVIMRKVNPGTIVKIGSGYFKIAGNTGNSIKLHNFNQLFLPVEMNEYFKAVSKAIKSLVDKKELQFDGENIVVIQNRFGDKKLVTKEKNLALYKELVKHLNKAIYKNVSIGAIGKRLKDTYDTFKDLDCVKQIETIKGLLDVINGSNGGNLANVGESKNCGTIKINKNINVPISIINYSPTGFYEKEIKLN

SEQ ID NO: 7067 - protein, 1372 aa, unidentified
  REGION 1..1372: note = Description of Unknown: Cas Enzyme sequence
MKYYIGLDMGTNSVGYAVADEEYKLLKAHQKPMIGVRLFDEAQTAAKRRLARVNRRRMERRRQRLALLEDLFSPVISKVDPGFFQRLKESFFMVAHKTEEQPNTLFNDPDFTDRNYHKKYPTIYHLRHELMTSQQPHDVRLVFLAIHHILKHRGHFLNPGELGELGGQLQSCYSQFLVSLSEDFAIELPPDIADQIQAVLTDKTTRRSEKQELLKQLFAVDDDMVAQLSKLFAGLSANISKLFGEQYKEQSPKDVSFSGAGFEDEKQIELQQILTDSEFSLLQSAFNLYAQIQLDSLLQGYPSFSASKIGLYEKHKSDLKRLKKLLKTNLESKAYTAYFSESKKDFCNYVAYSGHCLKNKKKQPVAYRCQKTAFYEELKKILAKLPESIRDGEEVKSIQLEIENETFLPKQVSKDNSLIPNQLQLSELRQILKNAATYLPFLNRQGEDGLTISEMIEKIADFRIPYYVGPVNPAHRVIPGKPNGSRHAWVTKISAEPVRPWNFERVIDLEQSATDFINNLTNKCTYLIGEDVLSKDSPTYARFMLLNILNLLSVNGQRLPVLVKQNIYNDLFLHPKTSGKVTKKKICAYLNAEGYPVTEAELGGMDLEIPISLKAERQLEALAPGKLSLEDKEEIVRLITVFPESNRMLRNRFSRQFGNKLTQSELTAISKLKFAKWGQLSRKFLTGLRANGPDGRETTILEAMWDYNLNLMELLSQDYGFADAVKQYKQDMLGDQQNFSYSLVDQYPTSPAVKKMIWQTMKIVDEIIRIRKQAPEKIFIEVAREEGEKKRTTSRLDQIKQIFKANKDIEDRLKKELDTKSEENLRRKKLYLYFTQLGRCIYTGKAIDLEKLDAKDSANNDFYDIDHIYPRSQTKDDSLMNNLVLVESSANRQKGDDFPIVPGIQAAQKGWWTALKDKKLISEEKYRRLVRTTPLSPEELESFISRQLVQTRQATKAVAELLKLVFPESRVVFVKAGHVSDFRYEQNAFRFPKVRGMNDLHHAKDAYLNIVVGNVFDTKFTQDVRNYIKNHPKRDFNLGRMYDFDVVGASGKLAWKTGEEGSIRMVRSMMALNAIQCTWQTRHQTSGQNGGLFDQNLLPKGKGQFPIKTSNPHLAGQEGINNYGGYNKPTGATFFVVEHELRKKAQRTILPLDLTWVLTHEQTAPELEAYCRETLGLIEPRVILADLPYNSILEVNGFPLRLLAKTGASLKLAPALQPYFPTAYEPILKALTRQAEEGKDAEADPRAVYPPEENLALYDHFTQKLGSEPYSRLSVFVNQYRNLSASRGNFILLTPFEQMKVLGQILILFLCDGRTSDLSLLQPKNPNGTPSSKNKQSGMVTISQNLQKGIKVDVLNFSCTGLFLSRTPLSQP

SEQ ID NO: 7068 - protein, 1512 aa, unidentified
  REGION 1..1512: note = Description of Unknown: Cas Enzyme sequence
MKKILGLDLGTNSIGWALVNEDDVNKKEILGIGSRIIPMSQDILGKFDSGNSISQTADRTGFRGVRRLRERYLLRRERLHRVLHILGFLPVHYEKYIDFNNHVGKFLSDLEPKLVWEELENGSFDFIFKASFNEMVEEFKIIQPQLFETGKLIPYDWTIYYLRKKALSQKIEKEELAWLILNFNQKRGYYQLRGEEEEENPNKSVDYHSLKVVEVTADELQKGKTDIWYNVILENGWIYRRSNKTPLFDWKDKIKDFIVTTDLNNDGTVKVDKDGKEKRSFRSPSEDDWTLLKKKTESDIEKSHKTVGCYIFDVLLQNPTQKINGKLVRTIERKYYKQELKAILEKQKEFHEELNNTELYKACLEELYGNNEAHRNSNANRDFTYLFLNDIIFYQRPLKSKKSLISNCPYEARTFIDKESGEKITDSIKCISKSHPLFQEFRLWQFIQNLKIYEREKLVEEKLQTDIDVTSEFLKLEEDYVSLFDWLNEKKEIRQDTLLTSYFKIKKKKGEEKLSHRWNYVEDKDYPCNETRAQFINRLSKVKHVPENFLSKETEFALWHLLYSVEDKLEIEKALKTFAIKNELGDDFVDVFKKFPPFKKEYGAYSEKAIKKLLPLMRMGKYWNESSITSDTKNRIESIKERLQSINYDASLIDTISDDSIPKQVLKSFINCSNPYSGINTYQACYAVYGRHSESGDIKKWKTYEDLERFIKEFKQHSLRNPIVEQVITETLRVVKDIWKKYGDFTEIHIELGREMKNPADKRAKMTAQISENENSNLRIKYLLAELINHNDVENVRPYSPSQQEILRIYEEGVLNSGIDIPEDIAKIVKTNQPTKSDLIRYKLWLEQKYRSPYTGEMIPLGKLFTSAYEIEHVIPQSRYFDDSLSNKVICEAEVNKEKDNALGYEFIKNKGGSIIELGYGKKVTIFTTPQYEDFVKLYYNKSRGKMKKLLMEDIPEDFVQRQLNDTRYISKVVKGLLSNIVREDGEQDVTSKNVISCTGGITTILKQDWGLNDVWNSIVSPRFERMNELTKSTDFGQWTNKEGKRVFQTEMPLELQKGFNKKRIDHRHHAMDALVIACATRSHINYLNNESAKASAKVSRHDLKYKLCYKSKTDDKGNYKWQFYKPWDTFTQDAKIAFENIVVSFKQNMRIINKTVNKYQGYEDGKKIVKTQEKGDSWAIRKSLHKDTVAGVVNLKLKKTVNLSIAIDQWEMLVDKNLKTKIKQFINEGLDKKKIQKFFAEQEYKWMDKEISKVELYYFTNDKDVQVASRVNLDQSFNCKKIDSVTDTGIQQILINHLTHFDENKDGKNIEHPELAFSPEGIDTMNKCIASLNNGKQHQPILKVRTYEPMGNKFNVGITGNKINKYVEAAKGTNLFFAIYADDEGKRSYETIQLNIVIERLKQGLTEVPEINEKGDKLVFHLSPNDLVYVLNEEEILNGFNKSSIRNTDTIYKMVSSSGTQCFFVPNNVSVPIIQTTELGANNKSERTWSGEMIKQFCIKLKVDRLGNISI

SEQ ID NO: 7069 - protein, 1324 aa, unidentified
  REGION 1..1324: note = Description of Unknown: Cas Enzyme sequence
MPTNFSVLALDIGSNSVGSAWIDREAGAITTGVSVFPAGVDESDDKRGEPKNAKRRMTRRTRITLARRAQRKRELRLKLIEVGLLPTTEADFITLLEQTDPWELRRRGLDSALSPFEFGRVLLHLAQRRGALGLRPLDEDSQTDDAAGSGDDGRVKAAIDAVRKKMIEKKARTFGEFIGMVRDERVTAITTEDRRPTGRRKGPRKWRSAVRNKAASYEHCADRPMIRDEFAKLWDAQTRLGGQTATLLSAELRLALDDESGDSLWRHKGLLFGQRRQSWDLGTLGRCNLHPDERCVPHADMDASRYLVIETINNLKIIERGKEARYLTPEERQRIKEYLSGPLGVETRGKRKGHPKRTVTVTDLRNLMGGTSDGWGRATKSSRFRFNIENDEDRIINTDWFSREVVHGAVTLERWAELAEQVRNGLNRAIVKYDPDEPDDASKLRAGVMDWGGLTESQADAVVAAWMTRPKPDAKRLNMGRTAVRNLLTLMDRSEPWPDVRSVNGHRWLTQIEARKLIAEDADFLDASTGEPFDDITRRRYATGSKGATARDRYYMAKHVLMHEGRPVIDRQTGKPLAEPPPAPLISNPVVRKAIHEVRRHLVEYMIVFGRKPDEVYIELAREARMGKVDADRVLFRNRLRNRIRNDIIHEFQMESLSSTQQRAAVDRVVLCVQQGGVCPLCGEGGLTPVQAANGQDCEVAHVIPRASGGHSGLSNIVLSHTPCNRDMARRTPRHFWSAGPGFETAIARVEGIYGDIQRIKGKETRSAHGLELWRCYFTKRDDLAKIEQFKKDIKDIQEMTQRQEAATKYAARQVMAYLADALYEGKGLPERGGERRIFATDGLWTSRLRREWGLLFDTHSARAYGLSNEQEHERKEKNRADHRHHAVDAIVIANCTRPIQIAWEEREQKADRYGINTADEESMDNFRRLNPLKPPSPFGTREKFREAVEHAVFGDRAEIKPICHRPVKRKLIGALHEETLFGPVLDKDGRLTDNFTAKKATASLTPNHLRIPDGWDERSAKLDDDRTPEARKRAIRAELASMRDPPPGKPGIVRDRALRDRIRKCLRRAGIDPDKFTATEIKKVVEAGAVHLASGVPIHSVVLLRTMTDPVVVDRKRPEYRSGRMVRDGEPAAKRAYVGGNNHHIEIRVDDKGTWSGRIVSAFEAGQRNLARLRALREADIPRPKELRTLPRADRARHNATMRAIEHAHPLVDRRDDAGLGGRFVMSLCEGEMLRMKHKHTGQEVYFVVAKLDKPQSIVLVPHWDARSATERKDAEGKKVPDSKREQFAITPRDLKGLAPESCDHALKVRVSSLGRITILEQD

SEQ ID NO: 7070 - protein, 1135 aa, unidentified
  REGION 1..1135: note = Description of Unknown: Cas Enzyme sequence
MDTQRTVLGLDVGVGSVGWGLVRLEEEKYTDEQSGEEKLRICGGEIIDRGVRTFQLPQDRDGKSLAVKRGTARRNRWRIQRRVRRLKRLVSLSREIGLIDGDFSHESILKPSKGINEKEQWDIWRIRKEAIERKLTDTELFRVLYHIAKHRGFYFHTEAEKLGENELDSKQTDQEKKEKDRIKKGLARIKGKLTQGGYETVGQMFWEEFSQQNEKNKRKRNKKDDYQNAIHRLLLKDEIETIFKRQQELKNPKATPELMGRYIQDILMDEKGFDNEKLQGMMNRCEFEKDEKGEPKICAPKEGYVSERFTLFNRLNSLELVDTADKDRHIPLDEFDPDARKKIVTLAYKNSKVTFAQIRAELELKEQLNLRFNLCSYREKDPEYSKKLECKVEKGKLVFEDKHFVPIVNIYTGEVTVLDKEIKKVFQSKDLWPNAKKLSVYYSDIRKQLQLSNEFRFKTLSGYTKSAEEFGSEEKYLKQFEDKDVFVELKGFHKIKKAIMSNCDEEVWEQFQQDKGKLETIAESLTYCKSDETRTAYLKDRGITDTKIIEAVLTLNMSKVANFSSTAMQRLLEYMEQGDYFKDAREKCGYGKPEYDKQAILQPYSGFFEKNPVVARVFSQTRKVVNAIIRKYGATHPIDQIHIEIATELARGEKERGRIKNGQNRYKEAKEAARQRCIEAGLDPDEGQTLLMFRLAEEQGRRCPYTGKFISTDSKVTTDNAVYILDCEIDHVIPMSRSFNDSLKNKVLCTQEANQNKRDRIPFEWFEDQYGKDSQQWSDLENRIKKMYNMPYGKKRNLLRKSWTEKDKEKFISRNLNDTRYAAREIANYLRKYFDFSGSGRDDIKDVSRIQLRSGGVTAFLRHIWGLNKDREENDLHHATDALVVACSTYGHVYLVSNLSRDMERKGKGWFRHFGFLRENFKPWGTVREDIERAANSIFVSRMPRHTVTGEAHGANPESLDEKKRIKKANAKKPKKPVTEMPVRKRVIKFNNGYAEMGEIVRADVYIDKNGKNYVVPLYAVDFAASKPLPDKYLKKNDSPYDEWPSVTTDGLEFKFSLFKDDLISIDGIMYYINFVQGTRAKINVRSVEGSIKKKETAYRNTELKKFSVDLLGNFKEIKQEKWQGNTFEKKRKKS

SEQ ID NO: 7071 - protein, 1525 aa, unidentified
  REGION 1..1525: note = Description of Unknown: Cas Enzyme sequence
MDRILGLDLGTNSIGWAVVDAKIKDGKVESYNSIIDSGVRIFPEGVEPDTIGKGDKEQSKNATRRDKRQMRRQFYRKRLRKIKLLEVLIEQGMCPLSLRELRKWKNWDRIKKWEGRKFPDSPEFISWLKLNPYGLRARALHQQVTLDELGRIFYHFIQRRGFLSNRKGKEDSTIFTKGKPDENILSINDTKEKIGYSTLGKYLYSIFYKEGRPYKTITDETGKEIRVRGRYTVRDMYIAEFERIWQVQSSALNLNEKFVKASKIRELKGSLEGKRNRSKIEYLQKKYGSDNVIINSSNRGNITKVTTVNSISLKEFLAGEIEEIVNEEGEKKILFKSNESVLFWQRPLRSQKGLLANCRFEDNLPVIKENGEFLLNKNGEIQRRSKKPCPLSHPEFEMFRAYQFINNIFYGKNNRLTTEQRQLVLDQINKNDKNFYFKKIPEILNLTYEKFNYGDKQKVAGNPTIKALKSMFNNETWEESYEEIWHCFYFYEDNDKLFEKLKKNFGFKKDLEAVKKVKLKEGYSNVSLKAIRNILPFLEKGYQFDRAVILGGVKNVFGKRRWKEMGEFQRLEIEKEVVEILRQDNKEGEAIGKIKEYLSEPAMFWGFEKDDHHFTHLYHHSQEVEKQEKLCSQVPEVENLRNPIVQQGLNETRRLVNTLIKKYQREYGEGFHFNQIKVEMGRDLRNNKAGRQEMSFRINENEKKNDDARARLAEYGLQPSRENTQKYLMFKEIEERAGKAQCPYTGKTISVFDLLGRENLIQIEHIIPYSVSLDDSFGNKTLCEANFNREKSEKSPYQFYKENPDPKLWGVTTWEDVEERAFRLLPYPKAKKFTSKREFEKSDFIQRQLNDSRYIAKKAVELLSHVCNDVRVMPGQLTSELRHLWGLNNILQPVQNLDKHKYDVDSKNGIPYYMVTDDKGEILSIHRKQNQRPETKNNEILVTGYVDKNKFSSKYFKIDMETPDLSDGKYWAKLNVSTPVQIVPKFIEKPATNQNNIVFKGKVEKGYFINDTTGRIKARCEDGSYWARFEIMNVRFEVPEKDKQPKTKRNQVMLFGNVLNGVFKCFIYQCETNLQDGKYWVILDLNPDNIEFIRSENVQPEILNNQLILTATINEDGIITSDLDREFQVQTEYESGKYFVVLEIMSEKPELFQIDNKPPELEKGQTLVEGNIWVDKYTGEIKFDPKKNREDHRHHAIDAITIALTEQSYLQRLSTYNAQRKEKQRQKLDSTEKFPEPWIGFANDVKKAANAILISHKKNNKTLTKNKKGFSVRGQLHKENVFGKRQAPNQESGFHRRTKITDLKNNKHIGKIVDKTLRCRIETHLQENYNIDIKSPKGYTIPKDAFLKDGKWQIFLPNKKGDPVPVKKVRINENLGNVLQLKSNLNQYVNPRNNHHVLIYKDFEGNLKEDVVQFWTVVERKRQGEGIYQLPEDGQSLVTTLEINDMFLLGLSDEEYESNKNNPAFLSSYLYRVQKISSSYYTFRYHLASTLDKKEEEIYIQSFGAWVKQNPIKVKIDIIGHVSKI

SEQ ID NO: 7072 - protein, 1522 aa, unidentified
  REGION 1..1522: note = Description of Unknown: Cas Enzyme sequence
MKKILGLDLGTNSIGWALIEQQFENHEDKIIDLKKGTIINIGSRIIPMSQDVLGKFDSGVSISQTAERTGYRGVRRLRERYLLRRERLHRVLNVLGFLPEHYAKQIDFKKRFGQFIPETEPKLVYDDDKQFIFRKSFDEMLAEFLIHQPELVKDGKKIPYDWTIYYLRKKALSEKIDKEELSWLLLNFNQKRGYYQLRGEEEEENPNKLIEFHSLTVIEVTADEPQKGKDEIWYNIVLGNGWIYRRASKQPLFNWNGKIKEFVVTTDLNDDGSVKTDKEGKEKRSFRAPAENDWTLVKTKTEQTIDRSNTTVGQYIYNTLLETPSQKINGKLVRVIERKFYKVELKQILETQQKYHPELQDKKLYSNCIEELYENNEAHKSNITTKNFVHLFLNDIIFYQRPLKSKKSLISNCKFESRTYILNGEKKTEPLKCITKSHPLFQEFRLWQWMQNLHLFEREKEEPITKHYLSSEDDYVKLYEYLNDKKEVDQKAILKYFKLSEKTHRWNFVEDKSYPCNETRSTILSKLNKCENVPTDFLTDEKLEQVWHILYSVNDKLEIPKALKSYATKYDLGDDFVEQFKKFPPYKNEYGSYSAKAIKKLLPLMRMGKYWNEENIHPQTIERIDKIIDGEFDATIQERVRYKAINLSKISHFSALPLWLTSYVVFDRHSEEGDLLKWKNPQELEDFLKEFRQHSLRNPIVEQVITETLRVVKDIWNTYGNGAENFFDEIHIELGREMKNPADKRKSMTEKNTENENTNLRIKALLAELLNDTDIANVRPYSPMQQEILKIYEDGAINSDIPIDDEILKISKMAQPTKAQLIRYKLWLEQKYRSPYTGLVIPLNRLFTPEYEIEHIIPQSRYFDDSFSNKVICESEVNKDKDNQTALEYIQNKRGAKLEVNGGRFITLFTEQQYEEFVKQHYAKSYSKKTKLMLLDVPEKMIERQMNDTRYISKEVKSLLSKIVRNDKNDDGTTSVNVLSSNGQITSALKQDWGLNDVWNDLITPRFERLNGMTGDDGKFGKTNKNTNKFLPTVPLELQKGFSKKRIDHRHHAMDALVIACATRNHINYLNNQNALEKGKNAAQKQKSREDLKRLLCDKKYNEGSEKNYKWIFKKPWDNFTKDAKNSLETTVISFKQNLRIINKTVNKHQKWETKNDKLEKVTVTQTKGESWAIRKPMHAETVSGKVYLKRIKQNPVAIISILENINLVVDKTIKTKLHSISNDLGNDIIQIKKHLKANSITIDERTFDKVLIYETIEATATRKTLDITFDKNKIEKITDTGIQKILLRHLEQDVYQSAIDEKGVKIPAHEIAFSEDGLEKLNQNLTGLNNGKFHQPIKKVRVFEEGSKFSLGSTGNKKDKFVEAAKGTNLFFAIYQNEAGKRNYVSVPLNEVLESQKQSALLNQKPTSVPQKYIDEKTGNEHHLLFHLSPNDLVYVPTEEERTNPNLVNFDFLTREQVDRIYKNVSFSGVDCFFIKANVATSIINKREFSSLNKMEKTTDGVQIKSVCWKLKVDRLGNVKL

SEQ ID NO: 7073 - protein, 1483 aa, unidentified
  REGION 1..1483: note = Description of Unknown: Cas Enzyme sequence
MVFHNYKILFIYNLIAKLKRRMAKNILGLDLGTNSIGWALINQDFENKKGEILGMGSRIIPMSQDILGDFGKGNSVSQTASRTRYRGVRRLRERFLLRRERLHRVLNLLQFLPEHFASQIDFEKRFGKFKDENEPKLVYDANEFIFKKSFKEMLSDFQKHQPQLLENGKKVPYDWTIYYLRNKALTQKIEKEELAWILLNFNQKRGYYQLRGEDFEEEKDKTFVRLKVEKIVDSGDNIKGKILYDVYFDNGWKYDKQIVKTEDWIERVKEFIVTESFLKNGDIKRTFKAVDSEKDWIAIKTKTEQEIENSNKTVGTYIYNALLQNPKQKINGKLVRTIERKFYKEELKKILETQQSFHTELKNDDLYNDCVRELYRNNEAHQLTLSKKHFVHLLMEDIIFYQRPLRSQKSSISNCTLEFRKYKDANGVEHTQYIKAIPKSNPYYQEFRVWQWMYNLNIYKRDNDFNVTKDFLNTTEDYENLFEFLNNRKEVDQKALLKHFKLNEKTHRWNFVEDKKYPCNETKTMISSRLDKVENVASDFFTREIEQNIWHVIYSVNDKIEYEKALKSFANKNNLDEVSFFEAFKKFPPFKSEYGSFSEKAIKKLLPLMRLGKYWDYTDIDKDLKERIQKIINGEYDENIKDKVREKAIHLTDEENFQGLQLWLAQYVVYGRHSEALMIGKWHSADDLENFLKDFKQHSLRNPIVEQVITETLRVVKDIWLKYGNGRKDFFDEIHIELGREMKLPADDRKKITNQISENENTNLRIKALLAEMMNDSLVENVRPYSPMQQEILKIYEDGVLNSGIEIEDEYLKISKTAQPSPSDLKKYKLWLEQGYKSPYIGQIIPLNKLFTLEYEIEHIIPQSRYFDDSFSNKIICESAVNKLKDNYIGLGFIKKFGGTIIELGFGKSVKVFEAEEYENFVKKHYANNRGKRNKLLLEEIPEKMIDRQLNDTRYISKYISGVLSNIVRIDEEQAKKIIDDAEVLAKKEIDKDKADEIRRKAKSQATDDGVNSKNIVPGNGKITTQLKQDWGLNDVWNELILPRFERMNQLTNSTDFTTWNENHQKFLPTVPIEFSKGFSKKRIDHRHHALDALIIACATKDHINLLNNQSAKSDTKRYDLKKKLMKFEKAVYNHPQTGVRIERDIPKQFLKPWDNFTVDAKNSLETIIVSFKQNLRVINKATNHYEKWVEKDGIKKKERVKQKGINWAIRKPMHKETVSGKVDLPQIKVPKGKILTATRKSLDTSFDLKTIKSITDKVIREILKNYLEYKGSPELAFSPEGIEDLNNNIEKYNKGKTHQPINKVRIFELGSKFQVGQSGNKKDKYVEAAKGTNLFFAVYEDENKKRSYETIPLNVVIEMQKQGLNHVPLENQKGNKLLFYLSPNDLVYVPHEDEIIDDNFSLNKLDEGQIKRIYKVEKTSGVECYFVRQDIAYLIKQYDAKTKIGELESQNKLQVTMTDDRMKIADVCFKIKVNRLGNVSKV

SEQ ID NO: 7074 - protein, 1242 aa, unidentified
  REGION 1..1242: note = Description of Unknown: Cas Enzyme sequence
MKKILGLDIGTTSIGYSIIEISDEKNKNSISEKLAVSDINNDRIGIFEDAIGVRIINQDTDRFDRGLKLNDPKGSTLTPTANRRKFRGIRRMRNRYKLRRNKLYKVLSLLGLTPDETYFTNKKGKRSKENDIGKALYGLRERAAREKITLSELARVLLHLNQLRGYSSDRFAKDEVTKFDYYLTEVVALDWENRTAVFDKGSTEDVKYYQFKTKLRFVEPYVILENDEKTVLYEVEGYIFKKEIDFEIGDFITIKAPEFKQNKKGKVVMEEYYKITPTKPDATDWKYKYQTLHKNLSDWCKAGGTVGSYFYKNFYELSNLSRIRNNVVNREWYEKEFDAIWALQYEFHKDFFEKIDVSNLVKDVFKDYSTVLNDVINKLGNKEQLQTLIKDKIIFFQRPWQQAKSKGRCEFEKIKVKREFAIKGTGTKELREEHIGRIVVPRSHPIFQDFKVWQQINNVRLIWNTADEKINLFENAELFEKLTDKTIEVVKELLFKKLQGSKTMSWRTFVKEELGLDTYDEIEEKRKAKVSKKQGLDLETGEVVDEFFSVNFRKRKRDGTYDDIKLKGNTTRAELQNILKEKSVEWFETLHEQNKNVTNLQLLWEIIYDITNSDVTKVSSIIKKHFDFDEDICLMLSKVQFEDAGMANLSAKAIKNLLPLMSDGKNYTNKSKIKVDELISLNNSETDIDADEKLSGLKDFVTDRKARIRLSKFATENEFKYLNYWEAAAIVYGSHSSKGKSETKVMERLKNHLMNNPVVEKIVNETISIVNLLKDKYGFDEVRIELSRELRASADERQQMWEGMSNGAAKNEWAKKMLREIKQAMLEDDRDGSHLDTEISGSNLDKIKIIEDVVKYQKPLEFKTKEKEYKLTEPSNAEVTKYLLWLEQNFKCPYTNQPIPLTDVFARGKVVEIEHIIPRQRYFSNAYANKVITWREVNQEKGNKTAYEFIVSKRNSAGTVQVGKKEISLVSASQWENHVKEMFPKSGKRNNLLRKEIPEDPIERTLKETQYINKKLKEKLGELVGSDKVWVTSGAITDMLREKWKMNDIWKELLEERFVKFNNGEAKERLNLKYTTKHFNNKTNQYDDVEKFAGMSKRIDHRHHALDAIIIACTKQNHIQYINNLNAINSADIENDDSKKAKYKGIKTDVCLGNSSSKFKFPWDENRFIPEVKQALQNVLISHKNSNILISPSKHRNNKDINSGKVASVRGELHLQTNYTKKKYFENEKIDIVKLIPLLFKK

SEQ ID NO: 7075 - protein, 1434 aa, unidentified
  REGION 1..1434: note = Description of Unknown: Cas Enzyme sequence
MKKHILGLDLGVTSIGFAHVIESNQPNESEIKQIGVRINPLTAGQSGEIDNFTQGKSISTNADRTLKRGARRNLDRYQDRRKNLIDALLKANIITNDTVLAENSKNTTHSTYFFRAKSVVEKIEKDELARVFLAINKKRGYKSSRKAKNEDEGQIIDGMAVAKRLYEDNLMPGQLAYQLLKEGKKYLPDFYRSDLQSEFDKVWEFQKPFYSEILTDEFYTELKGKGQRATSAMFWSKYGFNTAENKAKSREDKKLQAYKWRSEAISKQLEKEEVAYVLTEINNNLNNSSGYLGAISDRSKELYFNKQTVGQYLHEQLKENPHTRLKNQVFYRQDYLDEFETIWNTQSKFHPELTNELKDEIRDIIIFYQRKLKSQKGLVSFCEFESKEVLIDGKKKTIGFKVAPKSSPLFQEFKIWQNLNNVLIRKKGSKKRVAKQDNQGSLFEEEKEIFAFDLETKQLLFDELNLKGNLKANKIIELLGYKPSEWEINYSELEGNRTNKLLYEAYLKILDIEGYDVKDLLKVKSNKDEVELDDLNVPSIEIKNMVRDIFKVLEIDTEILDFNAELEGKDFEQQKSYQLWHLLYSYEGDNSQSGNEKLYELLEKKFGFKREHSKILANVTLSDDYGNLSTKAMRKVYLFIKENNYSIACELAGYRHSKYSLTKEEIENRQLEDKLELLKKNSLRQPVVEKILNQMVNVVNSLLDKNRKENPDFKFDEIRIELARELKKNAAERVEMTVGINKAKTAHEKIFKILQTEFGIKNPTRNDIIRYRLYEELKNNGYKDLYTNTYIPREIIFSKQVDIEHIIPQSKLFDDSFSNKTIVYRNINLEKGNQTAYGFIASKYGDTKDYEERIKALYDVNLKNKDEGISKAKYQKLLKRETEIDDGFIERDLRESQYIAKKAKETLFKITKSVVSTSGSITDRLREDWDLINVMKELNLPKYRALGLTEMQERKFGQKVEVIKDWTKRNDHRHHAMDALTVAFTKHNHIQYLNYLNARKNEKHKLHSNIIAIENLETEIKVDNDGNKKRVFKEPIPNFRQVAKEHLENVLISHKAKNKVVTINKNKTKSKNGEKVKTELTPRGQLHKETVYGKYHYYESKEEKVGTKFDLETIEKVANPAYKKALLKRLSENGNDPKKAFGGKNALSKNPIYINLEQNIKVPEKVKLVWLEEDYSIRKDITPENFKDEKSIEKILDEGVKRILKNRLKEFGNDAKKAFSDLDKNPIWLNEAKGIWIKRVTISGVKNAEPLHYKKDHLGNEILDEKGNKIPAAYISTGNNHHVAAYRDEKGNLQENVVSFFEAVIRVNQDLPIIDKTYNQHLGWQFLFTMKQNEMFVFLNENTGFNPNEIDLLDPKNKKEISTNLFRVQKMSKVIYGNSAVREYVFRHHLETNVDEKKELKDVTFKNIKSLGYLENIVKVRINHLGDIVNVGEY

SEQ ID NO: 7076 - protein, 1059 aa, unidentified
  REGION 1..1059: note = Description of Unknown: Cas Enzyme sequence
MSPYILGLDLGENSLGWAAIEIQNGKTIGIIDAGSRVFPEVIERSDKSSQVSNPNQDRRMHRGARRVKARRVDRKHRLLEIMVEAGLFPQGKAEQHELFAFDPYALRAGALHRKLKPHEFGRALYHLAQRRGFKSNRKSGSEDQKEEGKIAAEIGKLRQDIEEAGAQTLGEYLHECAQDRDALNYGQLRLRNHHYSRAMIGEEFRAMWEAQAAHHPDLLTDPLRAKIHDILFFQRDFAISPERRASLPSRANALRAPQLADCSLIPGEKRCSASAWIAQQFRMLKEVNNLRVFPPMEERRTLTPQEREDLIRKLSRQKTMSFNSMRTLLKLPKEAKFNLEEGKRKTLQGNELEATLNKAFGAKAWDSFDEEKKHDIRYLLSEEEDPQVIADAAKQWGLSEEGQEEIAKFKPSGNHLNFSAKAMEILLPYLDQGLDEVTAIIQAREDGNLEKTEEDEEHNLLPPTPEHPNPNINRCLHQTRKIVNALIRKHGKPEKIVVELARDLKMTGKERDRAITINRDNETLRKAAKDWYEKNGRPNPSRTDILAYRLWLEQNNICVYSGAPISAEDLLAEDDRLEIDHILPRSLSLDDSYNNKVLCFTHANRDKGQKTPYQWKAETKPDEYEEMIVRIQHMPMMNKNKRNRFFQEEVDPNKVIDRKLNDTRYASREVAKYLNALYPVQERTGQKRVQTSPGMVTAILRRQWGLNYILSEDGKKNREDHRHHAVDAVVIACTERKHVKALADAARLVEQGHGEPEIETPWPDFFHTVKYIIRDRKQEWQLDGETITTDGLLVSHMPMRKLSGSLHKETNLGIPRAYLHQLDNASGTQFGPAGKFRKRVKVENLSKKNIKAEDCIIDKTIRQIIIDHCREQGIDMESNAALPKNWWEGLTMPSGVPINKVRIWEPLNQPLLLAREKDGEIYTAVHTGNNHHMEIIEVTDKKGRKKWVGIPVTMLEATRRARIEKKPIVQRDHGPDKKFVMSLARNDAVFLKIDGKYKLHRVQKMDVSGKIVFRPYTYAGLMKDSDKPPLIVRRNVGVLKGEIIKVSVNFIGEIGRCND

SEQ ID NO: 7077 - protein, 971 aa, unidentified
  REGION 1..971: note = Description of Unknown: Cas Enzyme sequence
ARSRRRSTDRTARRMSKLAVNLQIAGLLPDGDMHDPEARHEIINELDKKLESPYVLRRRALDEKLEPLELGRAIYHLGQRRGFKSNRIAPVKDDEDGGKVGKGISELAEEMKARGSRTLGEHFANLLEASDGLCRVRAKYTSRDMYYSEFAAIWKSQSRFHDSLDSDLRCRIARAIFLQRHLKSQKDLIGNCELEPSRKRAPKSLLISQRFRYIQTVNNLKVQDERGRYCDLTDEQRTALLESLETEGDKTFGQAKKLLKIPGTRKFNLELGGEKKIAGNRTASALIKVFGKGRWHSLSKEEKEEIVHDVRSMRSHRALGRRGVRVWGLTPPEAKAFASIALEKDYFNFSVQAMMKLLPKLEEGLTVPEAKKEVYPDRFERGGEPFEKLPPVKSEYIQELRNPMVERALTEVRHIVNSLIDRYGKPDNIRIELGRELRQSAKDRQNTSTRMKKNQDERKKAAKTILEELGLQNPSRNDILKVMLRDECGGFCPYTGKPIKLSALIGPTPQFDIEHIIPFDRSLDNSYVNKTLCDAEENRNVKRNRTPWETYGGNEERWLEILDRVKNFKGRLAHVKLRKFQTTSEDIETMMESFTERQLNDMKWASKAAKQYLGLLYGGVTDDGIDESGRRCVQATSGSITAFLRRLWGIEGILGDGPGKTRDDHRHHAVDAVAIALADQKWVNRLNKAAALAANRSDRLFESIDPPWEGFRRDVEESIGKIITSHRLDRRVRGALHKETFYGVQRKDNKGKIYLHSRIKVDDLTDKRVENIVDEAIREAVEKRLAEVGKSASKAFSDGNHPTIIRGDGKEITINHVTIRENLQELVEVGSGHAKRLAKSDRNHHMEVVETTDKKGRRKWDFHVVTLMEAYRRKKAGEPIVKRDFGPNVKFLFSIAHGDIIELNDPDKGHSLFRVTSVPASKQIVFMAINDARPGTSVPKKGRTAMPAGLLNAHCRKVVVTPLGEVRYAND

SEQ ID NO: 7078 - protein, 1021 aa, unidentified
  REGION 1..1021: note = Description of Unknown: Cas Enzyme sequence
MEERIFAFDIGTGSLGIAVRKGIEMLESHSLLLPEDFASTKDQRDIRRQYRTRKAHKAREKWLREQCKHAGIEVLHGRKPGNRKKGISPEKGDPRLEREFARPGDDTIYTSCLLRILLLRGEKLEGWQIYKALHSAIQRRGFDHDVPWKHRDRKKKDDDDAENRKGTGQFIEDLKRITNGREEYQFPCYYDAIMMGLFDPATGELKYSQGNTAKRARGYIAPREQVEKELRALIEKAAEQYPALRGKTDFILYGPAEIPYASFDPDIRNEYGLKEGGVSDWQGALAQKIPRFDNRIVDKCSLIPRYNVCRASDHLVMQVTFLMKLMNLRFRDEHYEEFSLTPGDIKSIYEQKVKDATELKRTLKNDGDNSGNHLDKLAKCYRLTKTQWKTWLKKNKGFFPLPNHEDVEAPKYSGRSRFCRPALRIMRDLVLSGENPHDFHARKVAAISNTDPGKGLVPGDYDFLLKIPDDWTRIHIPQVSLAEKYLSDHSDTEKGIREIIGRQKDPVVRHRLDVFHRHLVRLADTYGNPDRVVIEFVREDFMSQKKKNDYLRIQRENRKKREDARAKASELGAEGKDAVLKIQLLKQQNYRCVYTGENLSENDLHLYDIDHIVPRHGKYSGSDSIINKVITKAATNREKADRTPHEFITGREEWGAYCERVNACHTTLGRKKVRLLTAEHPEELDEKYMSLAETAWIARTARDIACLAFGWQPGDPGERQRATVVSGGLTARIRRHYKIDSLLAGDDVDDPDEIMKKNRADKRHHALDAMVLSFVHGKNPKLLEGVTREYFEEQIQTVVPRYIAFGKPALEETIYGERWLHEKGKPKTIYVKREDIREFGYKNGKFNARNAMKKATSILDDSIREQIVAFLETDPDDQQWKNFCANLRQSPDGGALVRKTALNISDAPEYIDLSKNDGRGQYRRGTKSWGQYVYRDSYGKIGVRQVYVFESRGKIMDDLASQGCEILGFFTAGCLVEIERDSEFSGRFIPAGRYILGSIWSTGFVKLNSSLPTLQNPVSIK

SEQ ID NO: 7079 - protein, 997 aa, unidentified
  REGION 1..997: note = Description of Unknown: Cas Enzyme sequence
MTKNILGLDLGTNSIGWALINEDFENKQGEILGMGSRIIPMSQDILGDFGKGNSVSQTAARTGYRGVRRLRERFLLRRERLHRVLNIINYLPEHYASQIDFEKRFGKFNEETEPKLAYNKDGFVFKNSFEEMLTDFKNNQPQLLENDKKIPYDWTIYYLRKKALSQKIEKEQLAWILLNFNQKRGYYQLRGEEEEKNPNKLVEFYSLKIVDVLADEPQKGKSDIWYSLVLENGWVYRRASKTPLFDWKDKTRDFIVTTDLNDDGSIKTDKDGNEKRSFRAPAETDWTLVKKKTEQEIDKSHKTVGIYIYEALLQNPKQKIKGKLVRTIERKFYKEELRKILETQKSFHPELQNDDLYNDCVRELYRNNEAHQLTLSKKDFVHLFIDDIIFYQRPLRSQKFSISNCTLEFRKYKDENGVEHTQYLKAVPKSNPYYQEFRVWQWIYNLNIYLRDDDSNVTEEFLKTTKDFENLFEFLNSRKEVDQKALLKHFKLNEKIHRWNYVDDKKYPCNETKTMISSRLDKVENISEDFLTREIEQRIWHIIYSVNDIIEYEKALKSFANKNNLDEVSFFEAFKKFPPFKSEYGAFSEKAIKKLLPLMRLGKYWNYADIDKYSKDRIQKIINGEFDENIKDKVREKAVHLTSENDFQGLQLWLAQYVVYGRHSEASIIGKWNSTDDLEEFLKEFKQHSLRNPIVEQVITETLRVVKDIWIKYGNGAKDFFNEIHIELGREMKLPADEREQLTRQISENENTNLRIKALLAEMMNDNSVENVRPYSPMQQEILKIYEDGILKSDIEIEDDILKISKTAQPSSSDLKRYKLWLEQRYKSPYTGQIIPLNKLFTPEYEIEHIIPQSRYFDDSFSNKIICESAVNKLKDNYIGLGFIKQFGGTIVECGLGKNVKVFEVDEYEDFVKKHYANNRGKRNKLLLEEIPEKMIERQLNDTRHISKYISGVLSNIVRVEDGSDEGVNSKNIVPGNGKITTQLKQDWGLNDVWNDL

SEQ ID NO: 7080 - protein, 991 aa, unidentified
  REGION 1..991: note = Description of Unknown: Cas Enzyme sequence
PKVCPKSSPLFQEYKIWQKLNDLEFKNIITKEKQSPELELKELLFEELNIREKLSVIQILKFTNLKAKEGWEINFKNGLDGNLTNAALYAKFKQIAEISGHEIDWSKLSAKQTTASLTDVFSTLGIDAQILQFNTDLEGKAFTQQPAYQFWHLLYSYEGDDSKTGDEKLIAKLHEHFGFEKEYGKILASVVFKDDYGSLSTKAMLKMIPHMKAGHDYYASAKLAGFNHSKSLTKEENDNRPLEDALELLPKNSLRNPVVEKILNQLVNVVNAIIEHYGKPDEIRIELARELKKSAKERAEMTASINKATTKHDSIREILKGLHPFSRGVRITRKDLIKYRLWDELRSNGHKTLYTQTPIPLEKLFSKEFDVEHIIPKARLFDDSFSNKTISTRSFNEMKGNKTGIDAVTEYLGEERKEVYLARIEKLFKDGKITKAKYIKLKMTESEIPDGFIDRDMRNSQYIAKKAIELLSRICKDVNPTSGGVTDKLRQDWQLINVMQELNWKKYEKLGLVSYEKTKDGNEVRKIEGWTKRNDHRHHIMDAITVAFTRPSHVQYFNYLSARYDEKHKEHFKIKGIEDKETIQDKNDKRIIKPPIPLDEFRAEVKKHLENTLVSFKAKNKVSTRHKNKTKRKGKVHTQDVQTPRGQLHKETVYGKKRRYVTKEEKIGSKFDAEKIQTVANKRYRAALLLRLEEFEGNPKKAFTGKNTLLKNPIWINAAHTDQVPERVKLVELEEYFTIRKEVSPDLKIEKVVDKGVQAILEQRLAEFDGDKKKAFSNLEEKPIWLNKKQGISIKHATITGVSNAEPLHFKKDHLGKNILDKNSAPIPVDYVSTGNNHHVAIYRDTEGNLQDNIVSFFEAVVRRNAGLPVIDKSYNAHLGWQFLFTMKQNEMFVFPNLETPINLNEINLNDTSFYNRISSNLYRVQKLSRVSYGNSVVREYVFRHHLETSVEELVQLKDITFKKIKSLSYLKDIEKVRINHLGQLVKVGAY

SEQ ID NO: 7081 - protein, 1078 aa, unidentified
  REGION 1..1078: note = Description of Unknown: Cas Enzyme sequence
MPTHGCNAAPYTLGLDIGIASVGAALLAEDHIIALHVRTFDKAETAKEGESLNKIRRDSRLTRRRIRRRAHRLLRLRRLFKREGLLTDNLPELLTIPDKSPWDLRAEGLDRLLTPQEWAATLYHLVKHRGFQSNRKSEAKADEKAGQMLSGVTRNKVLMQEKNYRTIGELAAKDQSFAAHKRNKDGDYSHTFARADLEAELARLFTDQRQQGNLHTQENFEQAIHDLLMARKPTLSGDNLLKMIGKCTFEKAEFRAPKASYRAERFVWLSKLNNLKIAFSGETRPLTNQERQQLINLPYTKSKLTFKQVRKELALPEHARFNLLSYRQDTKGKDKDPEDTAFFEPKHYHKLRKAYEDAGLHTQWQRDAFDADKLDTLAYALTCFKDDTESRGWLAAAGIEPAVIDAALEISFDQFIQLSQKALKNLLPFMEQGQRYDEAATSAGYNHSKPDGDQVRGRYLPAPDKSIIINPVVYRALNQARKLVNALVREYGPPAAINIELARDLSKPYDERRKIEKEQKEFQEEKAKSRAAFVTQFGFEPKALDLQKWRLYREQDSQCAYSLKPIDTHRLFDVGYTEIDHALPYSRSYDNSQNNQVLVLTAENRNKGNRTPYEYLDGASESERWQRFEAAVMANKKIRLAKRNRLLRKNFGAEEAQEFRDRNLNDTRYICKEFKRMVETNLAWHPQAEDNERCVVLAGQLTALLRARWGLVKIREDGDLHHALDAAVIAAANRKLVKRMADHSRRKELEHVRDQHFDPETGEVLDLAALRQIEDRFPTPWPDFRQELLARLGPEPTMALSAWSDYPLKDITPVRVSRAPTRRGLGAAHQETIRSVRGNNESAVKTPLQKLTLKDIPNIVGFERDTALIDAIRERLEAFGGDGKKAFDAKQPALRKPSKDPAKAPIIRSVKLRDTQKSGLPVRGGIANNGSMIRVDIFSKGGKFYPVPLYVADAAKAELPNRAVVAYKPEEAWPVMDDSYVFLFSLHPNDWVALYYKNAPTREGYYAGLNRATGAIDIWLHDRNQSQGKKGMLEGNGIKTASSIEKYHVDFLGKLHKVHQEQRKPLHQPHLHQTRKGG

SEQ ID NO: 7082 - protein, 1074 aa, unidentified
  REGION 1..1074: note = Description of Unknown: Cas Enzyme sequence
MRILGLDAGVASVGWALLEVESEDGPRPARGAIVAAGVWMFDPAEERTRGGRRSKSAMRRAQRSQRRTLRRRRQRMNEIRRLFHRHGLLPAANRNALHRPGLDPWKLRTRALGRPLSPVEFAVALGHIARRRGFKSNAKSVAGPRDCEETSKMKQALSASRAKLARFETPARLISEDEGFRVPGSTARRFRNRAGDFARLQHRDDLAQEVGALFRAQRRLDAPHATAELEAAFSRAAFFQRPLGDRFADLGPCPFEPDQRRTSKHGYSFELFRCLARLDRLGIDDGGAPRRLTAREKAKATQGFGETPGLSYADLRRVLDLAEGAGFPGVARADEARRDVVARGGAAAGTHLLRREICAAGGEGAWSELLATPERLDAVAEALTFRASSESIRGALQVIGLTKQSTQALLTAAEAGVWDVFTGAGRLSAKAARNLIAGLRQGLSYDAACRAAGYDPASSRERRAFDVGAHGKEALRRIIAQERISEALVGSPTARKALIEAVKQVKAIVERHGVPDRIHVEMAREIGKSAAARRDIEYAALRRAAEEARSGELFREIFGRAPRGGDAGAEEMLRFELWREQKGRCLYTDAPIEAALLLDRNNRVQIDHILPWSRFGDDSYANKTLCLSAANHCKRDFTPAEWFAREKSCAEWRDFAARVNALDLTPAKKRNLLLGEADATASKFRERNLNDTRWVCRLLAEALQTLYPPAESDGAAVGVRRVFARPGALTARLRRAFGLQSFKTTPDGARRADDRHHALDAIVVAATSEAMLQRATRLLQRLERDGGGGPRFSLPWPGFREAALRALDQVVVARAERKRARGKAHDATLLQIAVRDGKTIVYERKNVADLKLDDLDRIKDPERNAAYVATLRAWIEAGKPAAAPPRSPRGDPIRKLRLATTERVNLPISTGNPARPASANRGEMARVDVFRKAGPAGAWRYHFVPVYRHDVVAKAPPEKAMRCGDEADWPRLDASYAFLWALHPMSLIEVTKPDGETIRGYFRGLDRGTGALSIGEIANAAAIRRGIGARKLLRFRKLQVDRLGGVFAVEKEPRLWRGKIWEERDAAPESPHSR

SEQ ID NO: 7083 - protein, 1525 aa, unidentified
  REGION 1..1525: note = Description of Unknown: Cas Enzyme sequence
MNTLGLDLGTNSIGWAIVDEGNKNIVDSGVRIFPEGVEPNTIGSGDKEKSKNAARRESRQRRRHYFRKRWRKVKLLETLIRYNMCPLSYEELKPWKNWDPKEKSEGRQFPDSKKFIEWLKLNPYELRAKAVHEDLTMMEFGRILYHMIQRRGFLSSRKDKDTGAIYKGDDDKAGINETLAKKGDRTLGEFLNEIRPKDNQPFQLITDQDGKEERVRARYTLRKMYIEEFERIWQRQAKNLNLESKTATYTKTRYLEGYAKNNRNKFKIDYLQKTKGSDNVNVKETDIDGATMTEVKTMEEIPLKEFLGGKIWWEDGEIKFKSNESVLFWQRPLRSQKSLLSKCSIESREFFDKSKNEWITIGPTPSPISHPDFERFRAWKFINTVDIASVKSDPLKTTLTDDQRQKIYEVFNQKQKKKFSEIPKKLELTFDKFNYSDDTPLPQNKTISQLKPLFDEKTWNNHYQDIWHCFYFYDDNDKLFKKTTKDYGAKVETPEELDKIKLEDGYAGVSLKAIRNILPFLEKGYKESTAVVLGGVKNAFGDRWEYFETSHDEIENRVVGILRSPENKEGEAIEKIKQFLSDEDNGFSFKPNDKAFNKLYHHSQQVTEKVKHYKIPEVENLRNPIVQHAVNELRRLVNELIDKYGSFDHIHVEMGRDVKAGKAKRQEMTFQINENRKKNDEAREKLTEFGLSHTRDNVQKYLLFKEIQDKAGNVVCPYTNKTVSPSSLLGLENAFQIEHIIPRSISLDDSFANKTLCDAKFNQLKGEKTPYQFYKENSDPNLWGGAKSWEEVAYRAFRVLPYGKAKRFTAKKDFESTDFIQRQLNDTRYISKQAKDILSKICDDVRVMPGSVTSELRHLWGLNNVLQPVKEVKLDVKTNEKEAVPHYAVLDEYKKVKYALPVYNELPQVVEDDLTLAGYITKEKEFKSKYLEFSTAVEELDPGSYWAKLKVGNNPRLIKRYAGRPETDEEHIALLGQVNKEKFSHNSLAKNLPAVGLDGRKKYYANFKVLNKALEPAEDRNRPKAKKDELLLYGQVNGGQFKSYIYQCQTNLPDDAYWLKLKLDFEDVEFIPSETPKPEFDKDKQILISASVDSDGQLSTHVDQRFTLETSNDPGIYWCIFDIKKSPYDFTKIKNEPPKVSADEKLVEGNIWVDGNGEIRFDPKKNREDQRHHAIDAITVALSKQSYLQRLSTYYGNKDEQNRGNEAEKPTFEEPWGNFRADVEDSVAKILVSYTKQNGDLKKVTKSIIKDGYKRKSIGYAVRGQLHKDFVFGKRKPELKEEAYHIRKSLSAIQKPTHVDKIVDDKIREIIIKHLNGLGVDTNDPKYTIPKDAFFKDGKPMVFLPNKRGEPVPIKKVRIREHLGNAENVKPSKDINKYVNPRNNHHVLIYEDENGELHEDVKTLWEVVERRLNKESVYQLPPAKDLMHVPRRIVQVLEINDMFILGLSDEEFEAYKNDRSFLGKHLYRVQNISSKFYNFRYHLASTLDNKEEEIYIKSFGIGKTGWRNHNPIKVKLDRLGNITQA

SEQ ID NO: 7084 - protein, 1430 aa, unidentified
  REGION 1..1430: note = Description of Unknown: Cas Enzyme sequence
MTKLGIDLGSSSLGWTLRDGNEFKKKGVITFNSGMVKGQGGYTSPTRDRREARSKRRLIQARKYRKWELLKVLIGEYVPLSIIELEKWSKYQKGQTRKFPENENFKKWLSCDFTYLKNGNKYQNPYDLRVKSLDFNLTKHELGRVLYHLVQRRGYKDIGETDKETQNQIDRRDESGLKDALERNRTLGEALKKGFLEKGKRARNEYPFRNEYEEELFEILKSQNFNISKDENGTLTDDFVNNVRKSIIWQRPLRSQKGTIGKCTLEPNVLRSPISHPIFEIYRAWSFINTIKYFDENGVKKSLDKGVRNKLFDNLFLKKDRFKFEDVKKFLDKDFGKKQKYNYPIDSRTGKYETSVSGMPVCKEMIKIFGDKIKGYILNLDENTENDAPNFIKNYSVYDIWHAVFHFDEEYLEKLAKTNFKIGNVEVTRNKKKIEISPLVLLKKSLMLGYADLSLKVMRKIIPFLREGFIYNKAVLLAKLPELLDDKWDDNKDLIINVINDSNEKYNFQKTIVSIANKLIEKHKALEYPNNFAYKDFDYILDSSDENDICGACEGYFGEKTWESIANRNIYIQEVGLLYQEYFSDSKRAYRETQTLKDLVEKEFKELGLYLNGELYHHSMRKNIYGNPIKYNKSGVMIDVLPEPRIDSIRNPMFNKSMSILRKLINELIVSGDIDNDTEIIIEIARELNDNNKRAAIERFQNQRKSKREKYRAFLNEFKERENSSINVDQSISTFELWSEQIFDDKEGKNIKELRTDSILNEKDALKRYELWTEQKGQCIYTGKMISISQLFSNKIDIEHTVPRSILPDNTMANQTVCYAKYNRDVKKNKIPYDCENFSISTPNGSSIELRLDVWKQIRDNYKELFEKRRKPFGGEDENKKNKRIQEKHFYRMHFDYWRDKINRFEAKEIKDSWARRQLVDTQMVSKYAREFLKTYFKKVSVQKGQVTAEFRKMFGFQEEDEIKSRNKHTHHAIDAAVLTLIPVNSSKREEILKKHFEAKESGKKVSQMRPFKDFNSQNLIKNIENNILIVNYQKDKIIQQTKKVVRNRGEIEYLKNKKGDFILNEDGGKVKKTSQGDSIRSTLFKQTYIGKIKAIERDENGKPVRENGNWKYKTGDDEFIYTERKPIKEVLKKTIDIVDPDIRKLVEKQKGNDDIFDFQGNKMRHVRIKVRAGKKVKERINYRSKHEHKNHFYSASGSIPYAVMLHKNEEDTVERKMIPISSYQIAEVFRKTRKFDEVEFVKEYYPEYESYDKKLLKIGQKVFVLQDDEEYNQRIEKEFQRNRFYKITQFKYDGSKIMLQYHLEAQSKSDIDKSIKADKNDILMKYEKSLNIPLITLDKSIIDNNDRNKDYEKRLFDFNKRLKTLENKAGKDLMSKAKKEIEIFKTESSSILAEELTPPILGLSLKNWNFLYEDYDFSINLKGEIKWIE

SEQ ID NO: 7085 - protein, 1160 aa, unidentified
  REGION 1..1160: note = Description of Unknown: Cas Enzyme sequence
MSQRNLSLSFDIGYASIGWCVLDNTSPAPAAPEILGTGVVTFPTDDCLASKRRDLRRTRRHIRSTRQRIERMKLWLTHRGVLSRADLDKPGHPAPFLLAAAALQKHKTLSAWELWTVLRWYAHNRGYDGNSLWSRDESNDDDTEKETNAKKIMADHGTTTMAETVCACLELKPEDHSKRISSALPYKTLNAAYPREIVFNEVNELLRLHNDKINGLDGETVRFLIKQAGKELLTKPEKETLSAADIKLPRRYHGGLLFGQLVPRFDNRIISRCPITWATEYDKAIADGKIESEAQKIAEKFAKVPNSKSAEFLEYRFARILANLRANGEPIHPELRLTLLELARKQGRLTATDLDREIKTYYGKVKTNVRDYFKLHPDSAEALVLDPIADEVRKATDSRAKLSPIWSLLTEETKSDIIAAWQKGKSISLAEIIHLNGDHETLENALQPAFAKANKPKQGKTKYADFDQYLNKTTIAPKIPSGRAPYARPVLKQVVTEVMAGNDPTRPAKSPTHPDGEAKDHDGILYQLSDPESRTRTLQSERPLDQLTNNHLVRHRLLIMERLADDITAEFVTSDRVVSRIIVEVARELKEFSGKTAKEIASELNSRLKDFKATIKYLEKNAPNLQLNGSLIRKARIAMDMDFRCPFTNDKYDITDITKLEREHIIPYATRNTNALNALVLTWPEVNRMKGKRSALQFITEDGGKNIPGRENLSLFSLKPYEAFVDKLKISGHDDDRRRQKARKALLMTSQMEEKDLGFTEGKLTQTSHLMKLAMRGLKKRFPTAAIDPIPGAVTAEIRKSWNLTGTLSLVCPEVIFTDENGVEKTRPKDEIRGLTHMHHALDAATIALAAHYFPLQKRGQNQSGKLWRALLKRNRNEEEQKLLASTGLFKAYQKTRHDHQGSPTETKTELRLTDLPKDLKQSLRLSLAQARVMQHLPADRSGAKTELTTWSIVCQDKDYTIILQRPNRTTFNTIKTENAIKWEDLEFKKDAQKLLANYGQHLSERQIRLVKRGLLKLARERTTKLLGPHPTTAKSKLQPHGKSRGAQVIEENFAIALDPSPCLIPFHNVSTTLQTLKSANSNKSVRLIRNGTRIRVKKGTWSGTWRVTSVKNSDAYGISVDLAPLHGIKLAKGNAKIPNMLRDGLEILPQRYTGHRLTE

SEQ ID NO: 7086 - protein, 1081 aa, unidentified
  REGION 1..1081: note = Description of Unknown: Cas Enzyme sequence
LRLGLDIGTNSIGWWLYATDEEKITEVIDGGVRIFSDGRDPKSKASLAVDRRVARAQRRRRDRYLRRKAALMKRMAAVGLMPADPTEAKALELLDPYALRAAGLDQALPLTHFGRALFHLNQRRGFKSNRKTDKGDNESGKIKDATKRLDEEMAIKNARTYGEFLHMRRTSATDPKNVPTVRTRLSIARRDNAEKEEAGYDFYPDRRHLAEEFDKLWKAQAGYSPDVLTDELRDEISVIIFHQRPLKTPEVGLCLFSGSHGVPKKDKRIPSAHPLNQRRILFETINNLRVAARGEPARGLTRDERDAIVHALDNKAHTKSLSGMSMKLKALGKVIKLRPEQSFTLQTANRETIACDPVRASLSHPDRFGPRWSMLDADAQWDVVQRIRAVQSEAEHDALVKWLMATHGLDRDHAESTAKAPLPEGYGRLGLTATKRILAALEADVIPYSDAVKACGWHHSDGRTGEVLTELPYYGQILDRHVIPGTYNESDDDVTRYGRITNPTVHIGLNQLRRLVNKIITVYGKPDEIVVELARDLKLSEDQKRDVQRDIKKNTDAAIARGAKLSEMGVPDTGANRMVLRLWESLGDDVMTRNCPYSGKRISATMLFDGSCDVDHILPYSRTLDDGFANRTLCLKEFNRQKTDKTPWEAWGDTPAWATIEANLKNLPANKAWRFAPDAMERFEGENDFTSRALKDAQYLSRIARTYLDALYDGADGKSHVWVVPGRLTEMLRRHWGLNSLLPDKDGAVKAKNRTDHRHHAIDAAVVAATDRSLIQRISKMARKDEVNGAEEVARSVPPPWEGFRTDIETQLDRIIISHRADHGRIDPAARKDGHDSTSGQLHNDTAYGLGEGNSVVSRKPLLSLKSNDIEVTTKGANIRDVDLQRHLERITRGLDGKALEAALAEFAATAKLPDGTDNPYYGLRRVRLEETLQQGARVEVKDRNGKPFKAYKGDSNHCYEIWRMPDGKVVPQVITTYEAHQIDVEKKPHPAAKRLLRIFKRDMVAIEQDDKAIIGYVQSMHVANGLFIAPHTEANADARSRDKSDSFRLIQMSAGPLVKANARRVYVDEMGRLRDPGAPS

SEQ ID NO: 7087 - protein, 1170 aa, unidentified
  REGION 1..1170: note = Description of Unknown: Cas Enzyme sequence
MKIKSIEQKKFYENIKESLNGKEYKLWIDLGVGSIGFAIVSLDDNKKADKIILAGSRIFKPSEGNETRRLKRLQRNVHRHKRERLFKLWQLLSKKGLSLKAPDKLEKEDPLKGDTSIKRFPIEVLSKNVYELRYIAINEKVDLKELGYIIYHLANHRGTASLRTFEEFEESKKKENKEMQQKANNSFKLIKEKNYRTYGEMIYKEKIEPYYEKIKNKKEGEIIEMPKIRNRKNSVDFIPTRDLIMKELDEILNKQKEYYSEILTENYINQIKEIVNFEYEKMVPEPGRCPYFPNEFKLPKAHPIVEERRIWEAINNSRVFEPIIDNNEIKTFKEREFTNEEKEKIFSYLMKNKNITPSKIIDLLNLPNKTEIILQGRDKKNQEIKGYRNLELEKMDFWKRFTDKQKDQFFYDWLLIPDDFSLKKKIKEEYKLSDEEIKLAIEKIEIPKGYSPLGKTASIIINEYIKKGLSFTEAIDKAVEDGKISLKEHKIYDLLPYYGEVLDDYTQSIICKALSEKFKDRNYKKPNINKDEERFGRIPNPVVHQTLNELRKLINEIIQATGKKTYEISMEVSRELKKSAEEREKLSNLQDQNEKKRKEIYEKYLKGRNDVKNGYLKFQLFEEQSGICPYCGEQINADDIYNSRVDIDHIFPISESFDNSKNNLVLAHNKCNEEKGQRCPYDAFVGTERYNKILSYLDKTPGMKSKKWRFMEGTYEEFLKNLPVKKRFETDTSYISKAAQKYLNCLFESKTKVIPYKGGVTAQLRLAWDLNKILIPYIKEGLYEKELEDFTSISSLDVKLRMDNRHHAIDAITLAYASIGYSNLINTLAAKGYHINFDKKNYLSSILKPPFEKFSDYVKEKVKDFVVSIKHDHNPNGELLGETFYKVYLLNNKYCLVTKRQVINIDADNLSDIEKELTKGKREIENSNNQELKNILQKNLRILENIKNNINRAKQILEEENKKAKDEGKKISEISNKKIIKKVLEMVKGVYYDISPNKEKGKFFILKEPQVNKAGCGYDTGDNLCIDLYHNKSGKLCGEIIRKVDALNKNFKPNYLKNGFKLYERIYVGDIIELDKSDEKIALKSKVGNSPENRVFVKVTTFTELPRYYKGKLDQIQIYFINITRDQNKPDDSLYISSMKKYKPRKVILTPLGAIKYRSKILGDLNVENN

SEQ ID NO: 7088 - protein, 1087 aa, unidentified
  REGION 1..1087: note = Description of Unknown: Cas Enzyme sequence
MRVLGLDGGVASIGWALIEVEDIGEVPESRGKIIASGVWMFDPPEEKTQTGSKLKSEMRRNFRGQRRVLRRRRQRMNEIRRMFACHGLLPRDDRDALKQLGLDPWRLRVEALERVLLPVEFAVALGHIARHRGFKSNARNVNSVPAAFASSAMNKAIAATQEKLTRFLTPAHMLCADESFLVSDTPVRRLRNREGDHSRTQLRGDIEGEARALFRAQARLQAKHATTEFEAEFTKTAFFQRPLQDSEHMVGRCPFEPDQRRSPRRGFSFERFRCLSRLRNLILLERSEERFLSADEINAAMIDFGASAKFTFAALREKLKLPESVVFVGVSSEREQRLDVVARAGEAAAGTHRLRSVITDALGAMTWSALLASPERLDRLAEIISFRNKGELIRLDLLENGFDEALASALVNAAKDGALDLFVGAGHLSAKAARNIIPGLQQGLSYDRACAQAGYDHTVSREREAFDVGIFGKEALARMLSQERVSRELVGSPTARKALIEALKQVKAIIESYGVPDFIHVELARDVGKSIDERRKIARRFEARNKQKDELRQGFTEEMGRPPRDGGAGAEELLRFELWREQSGRCLYSGARIDAYQLVAGDNSVQIDHILPWSRFGDDSYSNKTLCVTQANQGKKGRTPFEWICVDKTPQEWEVFAARVESLGIAGLKKRNYKLKNVQEAAEKFRARNLNDTRWACRLLAAALKQLYPDDERNANGEKIRRVFARPGALTDRLRKAFGLQWIKKNEKGERIPDDRHHALDVIIVAATTEPLLNRATRQIQRIESDGLPYGLTGVSPPWPDFRKACLDAVEKVFVARAERKRARGKAHDATLRQIVTRDGEQRVYERKNVGDLKIADLERIKDSDRNIAIAQILRAWIEAGKPVDMPPRSPKGDPIRKIRLAAKGKVNILMDTGNPNRPAAVDRGDMARVDVFRKANAKGILQFFLVPIYPHEIAMLDAPPMRAVQGGADEVQWPLMDSSFEFMWSMTQMTLLEIVKTDGAVERSYFRSLDRNTGALTVSNASNALAPKTRIGARTLLGLKKLHVDRLGRVFEVEREQRTWRGKLCSGAGKRICMSRGDESLGGKTN

SEQ ID NO: 7089 - protein, 1048 aa, unidentified
  REGION 1..1048: note = Description of Unknown: Cas Enzyme sequence
MKTGYIWAFDLGKGSIGEAVRKGDQFVHKASLLIPTEFAETKTAAGRRRMARTREAHKAREHWLDDVMRQAGIEPLQGRRTIKVDGKWQAAPETEAQRKSRELLEREFAKPGDSTCYTSCLLRIKLLHGEKLEPWQIYKALHSAIQRRGYDPNIPWKTRSQRKAKPGDENDDEAGTQARMQQFEKELAAMSPGKPEFQFPCYFDAWRMGLWNPDKPDELKDRIDCRAESTRNQIVPRKLVEKEIAALMDSAARYYPKLKGKAKFLLYGPTETAYASFDAKLRKEHKLKEGGVSDWQGVVGQKIPRFDNRIIGKCVLIPRMNVCKIRTDEGGEIHPQSRLAAEVPFLMKLKNMRVQRGGQSAGLTAGEIKSIFENYALENLSITESAWKKKVCVSLGAIPLPGHECVEAPKISGRSRFCRPALDILKRLILSGQKPKDFHRAEVVKLNGNTNPIKGLVEADLKFLSQMGETWEGIYIPNQKLDALVRNSDNSSEAIRTLIGSQNDPIVRHRLNLFVERLNYLEKEANGKGFGEPESVVLEFVRTDFMGHKAKLEYNKFLKDRAAERVKAKKEAAEAGASESAAGFKLELLQAQRGICLYTGEGLVPTSLDEYVIDHIVPRAKGGPDAAVNYVLTTRRANDEKADQTPYEWLSTKKGWDAYVNRVRERLTSLRHKKAQLLIAPDAATRVEKYTALAETAWISKLAQAILDLYFGWRNGNDSLGRKRVMVISGGLTGRIRRKYGLNRILNPDAKDEEEAEKKNRSDDRHHALDAMVISFIPTWARDTKKTGFFKFPDGVNKDLFAQEIKQVIPQNICFERPALAETIYGARDQGGDKIIVQRAEVVALAQKPVAPGKTKFDLEYAKKQIRAIRDAHIQQQLSEFVEKGPTEISWNEFCQGFCLRRKDGSLGSPVKFVRVNVGAPDEYKDLSKDGTGAFRRAFQGHKGQFVYLDTKGKPRVRPVYAFESDQKVRAELAETVGQAAIKGFFQSGCLVEIEKQIPHSSTPLSPGKYKLNTILTDGRAKVTDSSGKMSLPISLEKMFAAGFKRAD

SEQ ID NO: 7090 - protein, 1218 aa, unidentified
  REGION 1..1218: note = Description of Unknown: Cas Enzyme sequence
MKRILGLDLGVASIGWALINVENDIPNEILNMGSRIIPLSTDDANEFSTGNAISKNQKRTERRTQRKGYDRYQLRRKNLTNFLRKCNMSPTEELIKLNALELWGLRAKAVTERISLIELGRIFYHLNQKRGYKSAKSDDIDDKKQRDYVANVNNRHKTIKGLGLTIGQYFYDQLQKDNHYRTKEQVFPRAAYIEEFEAIWVLQTKYYPEVLSEENREIVRDEIIYYQRNLKSCKHLVSLCEFEMKAYKNKDGKTVYDGPKVAPRSSPLFQVCKNWESLNNLVLKNRKGSEFEFTIEYKKALFNHLDNNEKLTLNDLYKILGIGKSDGWWGGKAIGKGLQGNTTKMQISKALNGIIDYQKLLQFNLKNADTKLVDTETGEIVQQISSDFEKEPLYCLWHTIYSIHDKEELANVLRKNFNIEEPEVIEALYKIDFVKAGFGNKSSKAIRRILPYLQDGLMYSEACLAAGFRHSESLTVAENEARTLLSRLPLIKKNDLKQPIVEKILNQMINLVNAVINQYGTIDEIRVELARELKQSKDERNAADKNMRLREKENDTYAKRILLDYGLTASRTRIQKFRMWEESRQKCFYCGQTVNVHEFLQGFDVEVEHIIPKSLFFDDGFSNKVCACRNCNSEKGKQTAFDYMKSKAENEFESYLIRIEDYFKNGDISKTKKERLLTPKEKIPTDFIDRQLRETQYIARKAKAILSQVSRNVWATSGSVTDFVRHTWGWDRILHDLQIDKYRIYGQTEIVEYIHKNQKHNEERITGWSKRLDHRHHAIDALVVACTRQSFIQRLNNLNIERDAMWQELKNQSEAHQEKFSLLEKWLHEQPHFPKEHVQNKVAQILVSFKPGKKAASTGKRIKYANGKKIVLQEGIIVPRGALHEENVYGKIKTLEEKKFPKYLFENCHLIFKPYIKELIENRINEHKGDIIKAFASLAKNPIKLKDGVNLEYATCFKEEYILKYPLKSITAKDINSIIDKQLREVVKERLNKFNNNEKEAFKDLKNYPLWLDKNKTIQVKTIRCFTGLSAVVPVKRNEFGEIIGYVKPGNNHHIAIYTDKSGKKQEHAVTFWNAVERKKYGVPVIITNPTEVWDIILDKDLPESFLNNLPLFDWTFELSLQQNEMFILGMPEDDYQTAIDKKDYALLSQYLYRVQKIASGDYVFRSHLETKLDGSNVSKDIKIFYRTRSSDSFYSLNPYKLKIDNLGQINSLMLNHL

SEQ ID NO: 7091 - protein, 1106 aa, unidentified
  REGION 1..1106: note = Description of Unknown: Cas Enzyme sequence
MGEIMNKEKVVLGLDIGVGSIGWGLVKITEEEYCDEKDDGTIDKKHRITDGTIIDTGVRAFQIPQDRQKKSLALQRGTARRSRRTTRRKAQRLKLLIKLAKEFNLIDNNFYRDEILKPKKGDKECDWDIWFIRKKALEEELSDAELFRVLYHIAKHRGFYFHTKSEEIQEEDKKSETGEVKKGLVRIRKKLEDGGWETVGQMFCEEFKQTNKENKRKRNAQDKYGNSIHRSLLKEEIEKIFEKQQKLGNNKTKEELKKRYIDEILMYEEGIDENKLRKMMSHCEFTGDLCAPKESYTAERFILFNRLNTLELVDTQDKDRHLLLDDDKQRKKIEALAYKNSKVTFAQIRTELELQDNLHIRFNLCSYSEKTPEYNKKLVCNIKDGRPDFEEKHKVSIVDIYTGEVKVLDAEIKNIFNRKTLMPNSKKIYVYYSDIRKQLKLSSDFRFKDLSGYTKSAVEFGSEAKYVKQFENDTFIELKGYHKIKKAIEDKCGKEKWEHISSNITKLDTIAESLTYCKSDETRTEYLHQHNIIDKEIIDAVLKINMKQVASYSREALEKLLENMEKGDLFQEAKEKANFPKSEYEKRAILKPYSGFFENNPVVARVISQARKLVNALVRKYQKQYLINQIHIEVATELANSEKRKNQIAQGQKRYKDDKEAAEERCREFNLDPEEGQNLLMFRLAEQQLNKCPYTGKTITFYPTAASNEVYIKDCEIDHIIPMSRSFNDSLNNKVLCSPEANQNKTNRIPFEWFEETYGKNSQRWAEFENTVKKMYGMPYPKRKNLLRKSWTDKDKEKFLSRNLNDTRYAARHIADYLRKYFDFSKSKRDEIKEVNRIQLRSGGVTAFLRHMWGLNKNREENDLHHAIDALVVACSTYGHVYLVSNLAKEIERKGKNWYKHFGRDKFKPWGNIREDVQAAVDKVFVSRMPRHTVTAAGHEETIISKEKISKNRTIKIRGGYAEMGDMVRADVFVDNVGKNYVVPIYSVDIFSNKPLPDKYLHKNDAPYDQWPSVKESKLKFKFSLFKDDLISINGQMYYVDYIRATRSKISVKKTDGSFIDNIKEEKTKEIGYKNMELKKYSVDMLGNYKEVKQEKRLGNRFKSGV

SEQ ID NO: 7092 - protein, 1195 aa, unidentified
  REGION 1..1195: note = Description of Unknown: Cas Enzyme sequence
MAGYILGLDIGTNSVGSATVDIEKRVIRMGVSVFPAGVEEREDKRGAPKNQDRRSKRQQRRSIERRAKLKRRLRQYLLEKGWVPKEKDELRKWESNPIFNPWLLREKALHEELNQYEFGRILLHFAQRRGAWWFDEEPEESEKSKKPKKDPAEILGTVEYTKRIMSQKGAETFGELMAIEYRNRITKTANNRIRNERVRNKNSAFGEKESEFVADRHMILAEFSKIWEAQKAFGGHLAKELTEEVKKEIYNPQKTDTWRCQGVLFSQRKTYWDTGTLGRCDLEPTDEKCPKADMYAQEFLVLTSINNIRITPPMQEIRKLEDGERKKVVDAVRKQITASETTIRRALGIDKGANKTLYTLNTDGDKFTVNGDWFYSQIACGVFGEDKWLSFDDKKKESVNNAILKFDPNEENDESKTRAGCKKWWGLDDEKTENFIAAWKKRPKKSERVNLSKKAVKNLLPYLREGWTVTEARDMYAEDASNNADDLTRRHYSTKEVLVNKRIRQFFKKHPDLLPPVSDGISNPVVRKSIHEVRRHLIEHLSQFGVPDRIVIELAREARQTERVISRRIQKNKAIEDLRREIINTHNLDDPHITSTQKEAKIKRIRLCRQQKEMCAYSGATITDKTAADGTGLEIDHIVPRSKGGDNSISNLVLCYSTANQGKGHRTPIDWLSEEQFDKVKKVFKHLHREKGEKGKGAITKDNVDMVDEAKWKNLNRRTPKEGFTEEQLCSAAYAAKQTADWINKVLYGDKDRDKRYVFASNGNYTGILRRDWGLFFDEDGQRSEKGRKNRGDHRHHAVDAAIIAMTPKCLPKIKQSFIDFEEQKENKQIKPEWKTIEQPWEGFSEQLAEEYKKLKISHRAYNKQIAGYLHKDTIYGPAVIYERYKKDDEKKSIKKGDVKIGKDGRSILKEGMYIKSISVIGIKQNHLRMPIGWDELKNDYSNATEPKRKAIRKKMLSLEDVPPGKSGVIRDIELRDKIRDWLKNHEFSDMVKAKEFLKENGLIINGTPVRKVRLLWKLNEVVEIARKGFDYKNSSPERTRKSLRVYQTQNNHHIEIREKTDKKGNVKWAGEVITNFEAAKRTRTEKTDIVDKTENKNGKFVMSLSKGEIVHMKLPDKKEADYYVVFKIDPSKAIHFTPHTDANPASSKKKGVKLREDIALVPNDLRQSIILNENNVPEKIKISPLGEVRVLAND

SEQ ID NO: 7093 - protein, 805 aa, unidentified
  REGION 1..805: note = Description of Unknown: Cas Enzyme sequence
MKVENIKEKSKKAMYLINHYEGPKKWCFAIVLNRACDNYEDNPHLFSKSLLEFEKTSRKDWFDEETRELVEQADTEIQPNPNLKPNTTANRKLKDIRNYFSHHYHKNECLYFKNDDPIRCIMEAAYEKSKIYIKGKQIEQSDIPLPELFESSGWITPAGILLLASFFVERGILHRLMGNIGGFKDNRGEYGLTHDIFTTYCLKGSYSIRAQDHDAVMFRDILGYLSRVPTESFQRIKQPQIRKEGQLSERKTDKFITFALNYLEDYGLKDLEGCKACFARSKIVREQENVESINDKEYKPHENKKKVEIHFDQSKEDRFYINRNNVILKIQKKDGHSNIVRMGVYELKYLVLMSLVGKAKEAVEKIDNYIQDLRDQLPYIEGKNKEEIKEYVRFFPRFIRSHLGLLQINDEEKIKARLDYVKTKWLDKKEKSKELELHKKGRDILRYINERCDRELNRNVYNRILELLVSKDLTGFYRELEELKRTRRIDKNIVQNLSGQKTINALHEKVCDLVLKEIESLDTENLRKYLGLIPKEEKEVTFKEKVDRILKQPVIYKGFLRYQFFKDDKKSFVLLVEDALKEKGGGCDVPLGKEYYKIVSLDKYDKENKTLCETLAMDRLCLMMARQYYLSLNAKLAQEAQQIEWKKEDSIELIIFTLKNPDQSKQSFSIRFSVRDFTKLYVTDDPEFLARLCSYFFPVEKEIEYHKLYSEGINKYTNLQKEGIEAILELEKKLIERNRIQSAKNYLSFNEIMNKSGYNKDEQDDLKKVRNSLLHYKLIFEKEHLKKFYEVMRGEGIEKKWSLIV

SEQ ID NO: 7094 - protein, 980 aa, unidentified
  REGION 1..980: note = Description of Unknown: Cas Enzyme sequence
MNSYTLGLDIGSNSIGWALIEIGKNPSIINMGVRIFPEGVVRDTKGLEKSKNQTRRESRGARRTHQRRNLRKERLLNILQTVGLLPKDESELRSLFHTNPYQLRKNGLDEILEPYEFGRVLYHLSQRRGFKSNRKSGKAREDGVIIKGANALQTVMDTKRCRTIGEYFAGLNPGKKRIRSQYTFRSMYEKEFDLLWAKQAAFYPEILTDELHRKIRDEIIFFQRPLKPTDELIGKCELEPGEKRCPRGDWYARRFRILQDVNNLKIQNSDGTESKITKEQRSFILDELSKKKELKYEDIRKKMGLMKTQVFNLEQDGKVKTLKGDVFSAVMRSKNIFEPKFWDAMNEKEKIKLNEWFVELEDDQLREKLRSEYCFDDKKIETVLKISIPQRYMSFSRKAIIKLLEFMEQGALTSEAITLSYRDKGKDKDSSDVCDRLPLPEDLRNPIVNKALFEVRKVVNALVREYGKPAKIKIEMARDVQGSRRQREELHWKMRENEKINENARKRLREDIGINNPTRHDVIKYKLWEECGKRCPYTGKHISQTAIFGSNPEFQVEHILPYDRSLDDSYMNKTLCEVHENIHVKKNQTPFEAYSHNPEKYEQIKQSIKVLPWPKRQKFLKQEINIDNHINRELNDTRYICREVVEYLKKLGVNVRGTRGKITAELRHQWGLDGIFDELGTRRNADHRRHATDAVVVGVTENEHLQKLARSKYSVTGVSFYPPWHGFREDVREKIDQINVSHRVCRKVSGKLHEETNYGPTKNKGLYVFRKELKNLTLPMVKNIVDPVVREIVKKRIEEKGSDFWKEPLYMKTTKSNKKVPIKKVRVYNVAENVIPMKDLSGQIYRYVETGSNHHIEIFEYKDKKGNIKRDGKVVTMFKAVQRSQHEEPVVQTNHGADKKFIFSLAINDMFNLELEDGSKILHRVQKIDKNNRIILRPHTYSGKVSDYDKPPSIQRKSASTLLGCKVTVDPLGKIWPAND

SEQ ID NO: 7095 - protein, 1005 aa, unidentified
  REGION 1..1005: note = Description of Unknown: Cas Enzyme sequence
MNSYTLGLDIGSNSIGWSLMDMGERPAIIDMGVRVFQEGVNRDTKGLEKSKNATRREARGVRRTHQRRTLRKQQLLSVLQSKGLLPNDESKLVSLFHTSPYELRKKGLDEKLEPYEFGRVFYHLSQRRGFKSNRKSGKAREDSVVIKWANALQTEMDSKKFRTIGEYFAELNPDEKRIRGKYTFRTMYEKEFDLLWAKQAEFYPEVLTEDLRKKVRDEIIFFQRPLKPTDELIGECELEPGEKRCPRGDWYARRFRLLQDVNNLIIQNPDGTEEKLSNQPDHRKILLDELGQKEKLTFDKIRKKLGLLETQKFNAEYKIGRGGKTVESLKGDNFSAGMRSKNVFGPKKWDEMDEQEKMKLNEWIVELEDDQLREKLRGEYGFEDKQIEAILKISIPQGYMSFSRKAIINLLEFMEQGAITSEAIDVAYRDRKTTGGENDLDKLPPTEDLRNPIVNKALFEVRKVVNAIAREYGKPARIKIEMARDVQGSQRQREELHWKQWENKKRNEGARKRLREDIDISRPTRDDVIKYKLWEECGRRCPYTGRHISQEALFGPNPEFQVEHILPYDRSLDDSFLNKTLCEVHENIHVKKNQTPYEAYSHDTEKYEQIKQNIKVLPWPKRQKFMQSEINLEKHIERELNDTRYICKEVVKYLKRLGVNVKGTRGKITAELRHQWGMDGIFDELGVRRDDDHRRHAVDAVVVGVTENEHLRKLARSKYSVTGMFFDLPWQNFREEVREKVRHINVSHRVQRRVSGKLHEETNYGLTGKKNEKGQDIYVYRKPLDGLTIPMIKDIVDTVVREIVKNRLLEKGIDLNAGDRKIPKEVWKEPLYMRTKKSDKKVPIKSVRIHDVKTNVILMKDNTGKVYRVVEPGSNHHIEIFEYTDKKGNVKRDGKVISMFDAIQRGQRGESVVCKDYNDGKNFVCSLAQNESFMLELDEDSTELHRVQKITQSGNNITITLRPHTYSRKVSDSDKPPLVQRRTPNTLKGHKVTVDMLGRVHMAND

SEQ ID NO: 7096 - protein, 1064 aa, unidentified
  REGION 1..1064: note = Description of Unknown: Cas Enzyme sequence
MAGYVLGLDLGPTSIGWAAIKLDKRGKPFGFVDLHDGDSLFPAIGVRIFPLIVENYGQGKMREAPKNKKRRESRSRRRMLRRKRARRLKLIKLLQSKELAPIESAKLESIQKKNPYELRAKGISEKLDPYDLGRIFLHFAKRRGFKSNRKKPEKPDDSGKIKDGIKKLKRELGHKTLGEFWYNKLSKKSHEGIRNKNAYNWVAEREQYRDELARIWKTQQPFYPNILTHQLHDKISKILFDQIPFELSNRKKKKVIGTCTLIKGKLRCPLSDRKAQEFRFLQKVNDLRITRKGREIESWKVKRPELIQKLSISKELKFNQVRKILGIDESDRINFEYEANDKLIGNEIDNKLKILFGEKVWLKLAEEQKEAVWKEILNFFNDEKITLKQIEDKITAVFDLNFIKGKNIENIELPKGYIRYSKEALEKILPFMRDGKDLYTAIHEAGFKRSWRSLKNLQLPDKNHGFSINNPTVGAVMFQLRKVVNSLIRELGKPERIVVEFARDLKSSKERRAEIIKEQAGNQKERENAENAIRQHHNWPEDVEISPFDVDKYRLWKEQNHYCPYRGCLIPITKLLSRETEIDHILPRSLSLDNSLNNKVVCFADENQQKGQRTPFDWLGENSERWKRVQHVIDHWNPERKKRGTQNEINKTYDEKGENLKPNKQKWDRFFITSEQISEEYTPNHLLNDTSYISREVRNYLKCLYSPEKAESSVKTTKGGITAELRRWWDLNRILGSANNKKSRADLRHHTIDAIVIAVTDTSMIKNITNCLKKAWPQRRPKEIYVNRPWEGFELNIAAVIDYVNVSHRVQRRVKGGLHKETNYWKEENGPHAGKFITRKPLDGKFTKNLSEHICDETVKKLVFEKLSEYDYEPKKAFAKPIYLKNKSGNTVPIKKVRVWKESNTMKKIKSNIWIEPGDNHHIEIFSHQHNEKKEMLCKVWSTFDIAQRIRNKQTIISFKHPDKGFEHAKFLMSLSKGESVILNNKSGQDVIARITGISGNPDDARKIDIDLCEIQIGDITKLDKQDKKKLRQELRIQSFSDFAKRNVRKITVDPLGRIRWAND

SEQ ID NO: 7097 - protein, 1071 aa, unidentified
  REGION 1..1071: note = Description of Unknown: Cas Enzyme sequence
MAHGLSEENDYILGIDLGSASLGWALVALSESGDPTGIIKLGVRIFEPAVSGDVEKGQDESNSVARRGARLIRRQRRRRAARQAALFRLLQKQNLLPGTTGVERDSSAQRHVILNELDSALSLKWRQRDSENGFVDLPIYHLRKAALYHALDPFELGRVFYHLSQRRGFRSNRKAERIEKKGEDQGAVKTAISELDEAIRAAGAQTIGEYFAGLDPHTQKVRRIWTGRSMYEEEFGKIWAIQSRFHPTLLTEELHREIWRLLFYQRPIKAQKNLIGECELEPGERRASWATLEAQRFRLLQKVNDLEIIYPGKLMGVALSADQRQHVYRLLDEHGDQTFKAIREHLGLDKNIGFNLERGGERSLKGNIVQRRMIEAFGPRWQALADEEKRQVVDDWRSIESPESLQRKLIAKWRLVPEAASRLAKSSPPSGYCMLSRKAIRRVLPLMFDGKRFMAARQEIPEYVPKLEAPLDRIPPVLDALRNLRNPAVERALTEVRKVVNALVGEYGKPSEVRIELARDLKKPRQERARATDLNRKRQRERDSVKERIVREGGLERPSRDDIEKVLLWEECGGICPYTGKSIAFASLFGEHPQFGVEHIIPFSRLPDNSFQNKTLCDHEQGRNVKRNKTPFEAYPNTEEYDAILTRIKAWETPNLGKQKRFELRTLEELEGFSTRQLNDTRYSSRLACDLIAKLYGGRVIETETGTRQVVFASSGMVTATLRKGLGLEAVLCEASGSSNGETRGKSRTDHRHHAIDALTIALTRQSMIQTMSRTASLEPNWAITSRSLRTIPSPWSNFIDSVRPHVQELLVSHRPEHRLTGALHDETNYSKPRKVNGKSVVHIRKPVNGLSANDIENIVDPVIRDAVRRKAIDLGGDLKRCNPNAGVDDWPQLVTKTGKHVPIKRVRISKSLEVETIATGNRTRYVATSSNHHLAIFAQIDSQGREKHWEPRIVSLYAAMDRKRKGLPVVQRFHPETGDFTFKFSLMGGDTVLLHKDCDHSKGICNASVWRLRTIASNGQLSLVRINDARLKADIQKAKEWWSPATDSLRKFSAIKVSIDSLGRLHGAND

SEQ ID NO: 7098 - protein, 1180 aa, unidentified
  REGION 1..1180: note = Description of Unknown: Cas Enzyme sequence
MDRYILGLDLGSASLGWAVVGLNDQFEPYELKAAGAHVYDPGVEVPPTIKIAKDEAILQGQDRSKAVGRRIARQMRRQNHRKSARQKALFHLLQEKKLLPSYPEFAGEVLEAKRHHTFNRLDKELADALCGERRIRGLDGVMLEADQALLYVLRKEGLERELKLYELGRALFHLSQRRGYRPSASDDRAEEEAAETEEQTDTKRGRKRKATEEGGDEEKKENAKTVEAEIQRLGTKMEAAHAATLGSYFASFANNNPHIERIRHRWTSREMYRNEFDLIWKKQSEFYRDSHPGLLTDELKEKIEHWLFFQRPLASTEHLIGRCDLEPKEPRAPWASLEAQRFRLLQNVNNLAWFSRRTTKEEPLSPEQRTILSNELQSRGDLSFAKVRELLELPPNTEFNLQRGKKTKIEGNRIVPIMQRVFGDRWSGYSGAEQAEAVELWRTTEGMEERTKTAIERLNLDPLFARIWAENRPPSDYCRHSRKALTRLLEPMEIGVSYATARTTLYGNPFAGKEPLPLVPLINEALPSITNPAVMRALTELRKVVNAIIRKYDKPYEIRIELARELRKNRKQRHDATEANEKNHEQRILAASRILKECQKDRYDAQGRDAEGLVRERRDDVTKMMLLMECGGFCPYTGAPISAGQLFGGEVEVEHIIPQNLMVDNSFGNLTLTFRNTNLEKLGRTPWEAFGGEGKEDQWAQIMDRVKKFKNREKLGRFQQRTPAEALAFANRRLNDTRYTSKLAGRLLMSLYGGRDVAPPEAQDEMEEFKDQTGRRAIFVSSGMVTGLLRNAWCLNLSGIIGEDALKCLQGPGEEKEARTRRSESKKKDRSDHRHHALDAVVIALTSEKVIREINTRAARLYLERRRPLTYRDVMRSIPQPWINFVSEEFRNLFRQMVVSRKPEHKLSGALHDATFYGKIRGYEKNGTPVRHKRVAISNTLTDAQIKNICDGGIKRAVEKLGDAIGGYKKWSVEKHGWPSIPNLNTGDFVPIRKVRIRDPKNARPLDIGKRQKAFGKGHPERNVEEGEIAYASFFTVQGRKGTEWKWDIVKLFDATQRVRNLPKDERGLKRVSETHPDFPEAIFRFSLMKGDLIELIHEGKPIIFVVRAFEADKSRPESGGRLSVAPINAASKDADLKDSGMMPRLGFSKFLTMGAGDDNVPRPVTIDLLGQAHYIKLRA

SEQ ID NO: 7099 - protein, 1081 aa, unidentified
  REGION 1..1081: note = Description of Unknown: Cas Enzyme sequence
MTEVSQKNSTYVLGIDLGSASLGWAAIALDQNGMPTALLRAGVRLFDPAVTGDIQKGQDESNAVARRTARLVRRQLRRRAARQSELFRLLQGYGLLPPYEGAEADASQQRHAVLNALDAKLAATWLKQVTSGVRTAIELPLYLLRKTSLDSPLEPFELGRVLYHLSQRRGYRSNRKDQLNDKKPSVKSKKTDELGAVREGIKELEDAIRSAGARTLGEYFASLDPHLQKVRGRWTGRKMYEDEFAAIWEKQTEFYPALLTEELHHKIEHLLFYQRPIKAQSHLIGDCELEPRERRAAWATLEAQRFRVLQKVNDLEIILPGNVAGIALTSEQRRTVLDLLENTPEATFKKIRKALGLAENVGFNLQRGGETKLKGNLTNSHMAQVFADRWPAMSEADKKQAVEDWRTIENEESLIRRAIDYWKLDETGAEWLAERQAPNGYCSISRKAINKLLPLMIEGKRFKEAEKETYGSRLTGGQVYDRIPPVREALKSLRNPAVERSLTELRKVVNALIREHGKPVEVRIELARDLKKPRHERAKTISYNRDREKQRTTAKEKMLKEIGSGFEHPSRADVEKALLWEECQGECPYTGRRFPFASLFGENPPLQVEHIIPFSRIPEDSFQNKTLCYHEENQKKGNRTPFEAYTDHAEYEAILNRVRNWRTPNPGKQRRFELRTLEELEGFSERQLNDTRYASKLACELVGTLYGGRDIQTESGSNQLVYASSGMVTATLRKGWGLEAILREAAPSANGQNRGKPRTDHRHHAIDAITIALSRPKLIAALSRYNSEAPYWPRDGRSAPRIQSPWKDFVASIRPHFEQMLVSHRPEHRLTGALHDETNYGRPRKQGGKDVVHIRKQVVGLSSGDIENIVDPAVREVVHEKAAQFGGDLKKWTPKEGNEDWPLLRTKTGKDIPIKRVRIKKALGVEAIGKRERTRYVALSSNHHVAIFALLDDRGREKRWASEIVSLLAAMERKRQHQPVIQTKLVAVPEAAFKFSLMWGDTILLHKDCNHERSICKPSFWRVRSIWESGTLTLVQIKDARLLSEIRAAKDWLLPSPDTLRKLDATKVVIDSLGRIHQAGG

SEQ ID NO: 7100 - protein, 999 aa, unidentified
  REGION 1..999: note = Description of Unknown: Cas Enzyme sequence
MAKVLGLDIGTNSIGWALIDDEKSKIVDTGVRIFQEGVNRTTSGSEESKNADRRIARGIRRQNARYRSRRDDLIVSLIKLQMYPKEKDEEANFYKIDPYEIREKGLDEKLTLLEIGRALFHINQRRGFKSNRKTATKEKGKIYDGKGEIAGITETAKAISEESYRTLGEYLAYLDPKEKRRRNRYTLRSMYSDEFNILWEKQRQFYPEILTDDAKNCIYDAIFFQRKLKSQKHTIGYCTFEPKKRCAPKSSPVFQYYRILEQVSRLTITTDNRFGEKLTDDERFLLTNELNERSELKFSRIKKILKLPPDSYFNLEQQKKLLGNRTGYEFAKAFGKKCWFSFSPEKKHEIWHTLHFSNDDEWLKKYASEKWGLDSNSVEKLMKVSLENGYARLSSKAMKNIIPFFEEGMAYDKAALEAGYHHSQTFKNRGNMEKLPEPENIRNPIVQQALYELRKVMNEIIEKYGKPNVIRVELLRELKLPKEKRENILLDNRRREKKANEIRARLKEELGFLNPSREDIQKYLLWEECNKICPYTGKQISLAGLYNGDFEIEHIIPYSRSLDNSMANKTLSLKELNLEKGNKTPFEAFSGDSERWDEIKQRVKKNMPWKLKKFTIEDAAEEIDDDFFHHQFTDSAYIAGEVHKYLKYICEKVQVAKGSATFQLRHLWGLDKILSGDINIKNRDDHRHHAVDALVIANITPGFLKKLSTYSKFGYEATHEKFPVPWENFRKYAGSSINNILVSHRVNKRVRGKLHKDTFYGKIRLRNGKETYVVRKPLKSLTPNMIKNIVDPVVRKTVLKRLRSMGLDTNKKYSIPKDAFTETLTMQNSSVSIKSVRVAITSGNMIRLYPDRNLYVEPGKNHHIEIFENETTGKRDGRVVTLFDAVKRKKEGLPIVDKNPLGKGYKFIMSLAINELVLIDLNYKNINWNDQTSSQELSKKLYRVQKISESTQITFRHHKVAVRKDEEGNEPGICSFVPNTLKGVKIKISPLGKIRMADD

SEQ ID NO: 7101 - protein, 1052 aa, unidentified
  REGION 1..1052: note = Description of Unknown: Cas Enzyme sequence
MKKILGLDLGSASIGWAVIGEEENVHDRTLSTRILGMGSRIIPYDGTEGKDFETGTGESRNSQRTKARTVRKGYDRYQLRRKYLVDVLVKNNMMPGDKERQLNKMELWKLRSKAVNQRVSLQELGRILLWLNQKRGYKSCRSEANMDKKDTDYVAAVKSRHQQLKEAKLTIGQYFYNKLKDNEYFRIKENVFPRDAYVEEFDAICKAQKKFHEILKDNLLEKIRNEIIYYQRPLKSQKGLVSVCEFEGFRLKKTVNGIQKDYFVGPKVAHRSSPLFQVSKIWENINNIKITSRIGEETDLSHEQKQKIFEHLDNNDKLTQTDLLRILGMKKGDCLINKQLTKGIQGNVTKTAIRKCFEPKNEYEHLLRMDLKVVEGGGKGYLYDRKTGEVLNEKTIQYIDRSVEREPLYQLWHTIYSISDIEECNKALQSRFKIDRATAERLSKLDFTSQSFSNKSVKAIRKILPYLMQGDRYSDAMSYAGYDHSNSLTKEQNIARELLNRLEPVPKNSLRQPVVEKILNQMVNVVNAIIDKYGRPDEIRIELARELKQSKEERNRTEREINQREKENKEYAERLAEYGLRATRNNLIKWRLYQEISNEDKKLNALCIYCGQPISLTETIKGTDVDVEHIIPKSRLFDDSQSNKTLAHRKCNSTKGDRTAYDFMRSKPEQEFTAYVERVNNLYENNIINRAKRNKLLMTETKIPDNFIDRQLRESQYISRKAREILQTICHHVWCTSGNVTAELRRLWGWGDVLMNLQMPKYREFGLTEVIESEIGHYGNTHKKEVIKDWTKRDDHRHHAIDALTVACTKQGFIQRFNTLNSNKTREDMFAEVEKRSNEFRERLSLLEKYIIAQKPVTVTAVEEAVSKILISFKSGKKVAVRGTRKVGRPGSMKVVQTGIIVPRGALSEESVYGRIKTTEERRPVKYLFENPHLIFKPYIRELVEERITRYNGDSKKALASLKKEPIVLDENNNTELKYATCYKEEYVIKYKVDTNFNKVEKVIDRKVREILQKRLEKFGSKATEAFKDVKRGDEPAIKWYEDEGLLRPIHS

SEQ ID NO: 7102 - protein, 966 aa, unidentified
  REGION 1..966: note = Description of Unknown: Cas Enzyme sequence
ARRSRWTIRRKAKRLKQLIKLAKEFDLISNNCDPYEILKPNKGDNKKEKWDIWRIRKEALERKLTDEEFFRVLYHIAKHRGAYFHTKAEFLPEEDEKKLAEDKKQEESKEEQEKEKVKKGLRKIEKMLKNSGFNTVGKLFYESFKNARKRNAPDKYEHSIHRELLRDEITEIFKEQKKFGNEKADPELAKRYIKDILMKEYDIDEKKLQNMMSRCEFTNEICAPKESYTAERFALFNRLNTLETIDTENKNKAIFLSSEQRGKIENLAYTNAKVTFAQLRNELKLQDKLHIRFNLCSYAEKNPEYNKKLICEIKNEQVQFEGKHRLPTIDTDNSDINILDDEIKKIFKAKKLWPKAKSIYVYYSDIRKQLNLSEHIRFGYFDKKDGAIKELKGYTKSASELGSEANYIKQFEDDTFVELNGYHKIKKSIEEKCGTEKWKQISKEAIKLDTIAEALTYCKSDKTRTEYLQQHNITEHGIVDAILTINMKQLATYSKEALSNLLKYMDKKEEWMFFNDAKEKCGYGKIDYKKQMILEPYSGAFEKNPVVARVISQTRKLINAIVRKYNSIYPIDQIHIEVATELANSKKRKAKIAEGQKRYKDDKLEAERRGREKGLDPEEGQNLLMFRLAEQQRQLCPYTEKHITFQPTGATDEVYLKDCEIDHIIPMSRSFNDSLNNKVLCASEANQNKRNRIPFEWFEERYGKNSQKWSNFENRIKKMYRMPYPKKKNLLRKSWTDKDKEKFLTRNLNDTRYAARHIADYLRKYFDFSESERDDIKDVSRVKVRSGGITAFLRYIWGLHKEREENDLHHAVDALVVACSTDGHVYLISNLAKEIEKKGKNWYKHFDFIRNKFKPWATVREDIQSKANNVFISRMQRHKVSAAAHDDTIRSFKELSENKRIIKVNKGYAKIGEMVRADVFMDNESKNSVVPIYASDIFANKPLPDKYVPDDRLLPYENWPSVFDKG

SEQ ID NO: 7103 - protein, 1052 aa, unidentified
  REGION 1..1052: note = Description of Unknown: Cas Enzyme sequence
MNSTKALRYVLGIDAGHASVGWAVIELDAHDEPIALHSAGVRRFDAGVEGDIERGRDESLSKKRRDARGPRRQTWRRQWRLRKVFRNLQSAGLLPDSSGDDHNARHELFLQLDKQLRDEIPLSGDRVFNHVLYYRLRALALDKPLPPHAIGRALYHLAQRRGFLSNLKASRDSDERSTVKKGISELDQVMEAAGARTLGEYFSMLDPEQQRIRGRWTSRKMYGDEFHRIWQAQQPHCELLSDELKVRLEEAIFNQRPLKSQRGLIGRCELEPTRRRASIACLPFQRFRVLQRANDLEVTCPNYDKRLLDPSERATLLAALEREGDLSWAAVRTLFGMKKSRQYGRKYEFNFELGGDKKMVGNRTAAKMYAAVGDAWQSLSTAKQTELVDDILSFESEEQLIKHLQGRWDVSEQHALAAAELRLEDGYGSLSRRAIRKLMPCMEKGTPFATCRKQIYGEVLETKEARHTLPPFSTVKGDVRNPAVTRTMAELRKVVNAVIRRHGTPQLIRIELARDLKHSRDRRKRMTEDRDRNTKSRDAARERLLKERGDRYATGRNVLKIRLADECNWQCPYTGRSFGMEELVGDQSHYDIEHIIPFGRSLDNSFVNKTLCYHEENRRRKQGRTPFEAYGQSSHWPEILDRVRHFQGDCAPRKLRLFQTEILPNADEFIARQLSDTRYLSRAAAEYVAVLYGGRWDVDGKLRIQVSPGRVTGYLRRVWELNRILGHPDNKNRADHRHHAIDAFVIGVSSPKIVKRLSEAAEQAEARGLDDLFVEVEPPWPGFAWTHVRDVIDAIYVSSRVNRKLGGALHEETILSKPQPALDKKGQPTTVHHVRKPLANMSVGEIAAIVDPVIRKSVQDKLAQIGGDPKKAFAEPNNHPYLMSRDGRLIPIHSARIVKPDTTIAVGKGARRRYVCPGDNHHMEIVAVLDKEGKHKKWEGHIVSRFEAVRRWKDEEPIIRRDHGPTREFLFSLTNGEYVLTPDGDDPANRRLLRVTVISGNNLEFVLHSDARPITLRKKEKGRIYYSVSTLGKASADKVVVDPIGRIEFARD

SEQ ID NO: 7104 - protein, 1694 aa, unidentified
  REGION 1..1694: note = Description of Unknown: Cas Enzyme sequence
MRKKMILPIAIDLGAKNTGVFSAVYHHGTDVAQVDSKMGKVYELTKDSYTLLMDSRTAKRHQRRGLDRKQLVKRLFKLIWTEQLNLEWHDYTQQTLSFLLNRRGFSFLEEKHDAELLKHFPNDAISYLPQTLATDNTDNRDYDLNAKILELLEDDSFAEVYSEIESNIKEVKREMVIASTIALINSAIETRISANTIEITKANKLDKLERVSNWIVEFLISQNANINKLIVEEKSYSCDLLSYISLLEDDELYSLKQSLPLFNEKALKVSVWNFNISNFNLDSDANIKKLEEGDVKTHIHHLAFALHNIKKELDEGSRHRSKYFEEVASVLLTTNHQEQYLKNFCQNLHNCKYANLTVKKLINLIGNISNLELKPLRKYFNDKGHIEADYWNEKSFAETYCRWVLGEWRVGSKDKDKQPNAKYDYKSLCNDIKQKVGTTKNIQHSVVNFMLDLDPCRTIPPYQDNNNRKPPKCQSLILNSNFLDNNYPNWQSNLVSLKKLDSIQGYLETFEQDLRDLKTGKQASYFVEQKNTNKQIASGQRDYKDLDAKVLQFIFDRVKATDDLLLNEIYSLAKKVKQNASTNSEKTEYASKLLKAIDNSNLPNSLKSKHKLCKHFDKLSELDSAIYDKLNDSDVFEQGTFLHLVCRYFKYRQRAKDSRLYIMPEYSYDKKLDKWNNTGRFDDSGELLTYCNHKPRQKRYQLLNDLAGALQVSPTQLMKSVEDRLRQAQSSSSLSEVEMMKKSQDEQILEWLKTFRIGGYCKTAVEMQKQYRGTLKLAIDKARFREKIESIRKNKKSTDDEKIILEKYNNTKAPTVDETKLVKLVDNIEKSATKIAESLGLELAHAEKFNSIFSFAQIQQIVFAERSGNASTCAVCSVDNAHRMQQTKLAEHSRSELQSNSVVTSTGSVTLDRVSTKAQRLPAISTRVIDGAVKKMATILARNIVDDNWGNVKQALENNEKLSIPIITESNAFEFEPNLADIKGTKKKDTTTKEELFAKKENRIKAFAKGRSAYSGKPLNENTELDHIIPRSSKKYGTLNDEANLICVSRDDNQNRGNTVYSLSNLANNYKQLQFGTTDSQEIESWIAKTIWDDKKQDFKFGNYRSFINLTADEQKAFRHALFLVDDNPIRQAVIKAINNRNRAFVNGTQRYFAEVLANNFYLRAKKEKLDTSKLDFDYFGVETTNTAGRGVTDVRKLYENLDKDIKAYAKGDKPQDSYSHLIDAMLAFCVAADEHKNEGSIGLKMGNKYGLFPTPNNYDTNTGEVLTWLDDDIFKQIKVTDNEFEARVLARRKATEGFNTHRQMTRDGIYAEKYLPILVHKSLDEIRKGFSWDNSEEIKIFKGKIFDKQQLINIVFSLEFAGLTTNSNNHINDVDELREILELKGVSSTDDYFYINLQIQKVHEYYVENYNTALGYKKYSNEMNFLRSIAYRTEKKNIKSIDDVKAILAKDSNFKSGKVCLPYKQEWQRLYDAWLDTSIKDDILFLRGYFGVTNQTKYHNKIRKDFSLPIKSIQGNYIFRRKSWDNRNIYQIMNNSDPRKDDVQAYVPVFDIISNQRSKGIIDAFVSDNIFMLSNDDYASCDDSNIKLLDRSKWYLVEISDDIKEIGINKIHYRVDDNSRPSIKISYKNISEDNIETLCNSALIKPNVVKDLKEQLEKVSYFEGFIYKGATFSNTTNNALNNALKAYYETFNN

SEQ ID NO: 7105 - protein, 1370 aa, unidentified
  REGION 1..1370: note = Description of Unknown: Cas Enzyme sequence
MKRILGLDLGTTSIGWAFVKEAENENEKSSIINTGVRVVPISTDEENDFKKGNSITINADRTLKRGARRNKFRYQLRRKALIDELKLINFINEKTKLTETGKNSSHELLSLRNNAVSEKLKKDEFARVLLSINKKRGYKSSRKANNSEEGELIDSMDITKKLYDHDLTPGEFSFTLLKDGKKSLPDYYRSDLENEFNKVWNHQKKYYPEALTAELFKEVEGKNKNQTWKICEKPFSIKGIKIDGSKADKKLETYKLRKLALSEKIGLEYLAIVLQDINSEINKSSGYLSEISDRSKELHFNNMTVGEYQYKQIAKNPHNSLKNQVFYRQDYLNEFQKIWEKQAEFYPELTNELRDKIQNEIIFYQRRLKSQKGLISYCEFESWEQEVIIDGEKKNKIVGHRVVPKSSPLFQEFKVWQNLNSVRITNVKTNEVYHIEEETNKELFQTLNWIDKLTDKQFLKELGLKPNEWKINFKTVEGNRTNYNLLKTYKEILRIEGYDNIDYSKIDAEDLIEILKKCFDEIGIDKGILEFTSTLKGNPFSKQESYELWHLLYSYEDDFTRTGTESLEQKLKSTFGFKDEHLHSLINISFQDDYGSLSARAIRKILPYLEDGKLYSEACELAGYNHSNSITKKQNEERELKPKLEILKKNSLRNPVVEKILNQCINVVNAIIEDSEMGRPDEIRIELARELKNTKEQRSEMTKAIGRATKDHEKYRDEIKSKFGLPHVSRNDLIRYKLYKELETNGYRTLYTDEYIKPEDLFSKKYDIEHIIPKSRLFDDSFSNKTLETRKSNLDKGDETALDFVGRKYGKEGLEKYRKRVEELFKAGKIKYSKQNKLLMSLNDIPEDFLNRDLGTSAYIAKKAAEILLDITRRVSLTSGKITSKLREDWGLIQVMQELNWDKYEKVGLTYYKENKEGKKLPRIKDWSKRNDHRHHAMDAITVAFTKPGIIQYLNNLNAKSNKEIYKLENTYTYKDEKGKRKFIAPFPTIRKESKEQLSQILISFKTKNKVTTKNKNKINVEGNNKFKYQTVETPRGQLHKETIYGKSQYYETKLEKVGSKFNQEMIGLVASKTYRKALLKRLGEFENNSKIAFTGSNSLTKNPIYINGTQETVPDKVKMAWLEGRYTIRKEVTPDLKLDKVIDDGIKAILKKRLKEFNDKPNDAFANLDKNPIWLNKEKGIKIKRVKITGVSNAEPLHHAKNHINQELKDKHGDSVPTDYVSTGNNHHVAIYKDDKGNLQEEVVSFYEAVTRKNIGLPIINKHHEKGWEFLFTMKQNEMFVFPNEENSFNPNEIDLLASSHQSRISGNLFRMQKFTNRDYFFRHHLETNVDNIKETHHLSWLRTGLSGVGQIKKVRLNHLGKVVQIGEY

SEQ ID NO: 7106 - protein, 1001 aa, unidentified
  REGION 1..1001: note = Description of Unknown: Cas Enzyme sequence
MKAYTLGLDLGANSLGWAIVPDEPTAETGGLVTGVRVFPQGTEPRRTREQSRNKDRRDARQMRRQLYRRRRRRRKVQHLLVEGSAIPDTPEALAELRSYDPYELRRKGLDEELTPSEFSRVLIHMGKRRGFKSNKKAQGDARKEQSKVVGPAIDQLSAKMQAAGARTLGEYLAILRARGEKVRNYQGGAMYTSREMYQKEFGRLWRRQASSRPDLWTEDLKGSLENAIFGQRPLKRVSHLVGKCQLEPEEPRAPKASWFAEQVRLLQEVNNLKILSRRGDERKLTPDERERLLHELMTRVSDPALDTVKKKVLKLGEAESLNYEGGRRGKMQPNKIEARMRKLFGKEYEAKAGWLRETVWEALVHDEVEEFEEKALGEWGLTHEQIDALYKIDRPDGYSRFSLKALRKLLPHLEQARLMHEAIAAVGYKSPETEERGWLPPVKAGDFRNPVVIRALSETRKVVNAIVREYGKASRIVVELARETRGTITSRQERLKFNREQEAYHTRIAAELKDQGMTPSRRLIEKYKLADECDWVCPYTGRSIAFHQLFGANPEFDVEHIIPYPRSLDNGFMNKTLCAKSENQRKSNRTPYEAYNGTPQYDEILVRIRKLPYAKQRRFTMKEVPDDFANRQLVDTSYAARSCAEYLQQLGVPVETTRGAITAELRWQWGLNSILGVDEAVKARDDHRHHAVDAIVIALTSRKHINKLRRKYEFWREERFAAPWEEAGISKEAFRQTVRASVEAINVSHQPLRKLQGRFNEETNYGALDVEKGEYVYRVPLKTISPAKAAKIVDPVVRELVAKRLREHGIEPGKGSSSVPAAVFEKELRMPGDGGPRIETARVRVKATNMVPIVDETGNAYRYVEPGSNHHIAIFEYRDKKGHLRRCKEMVTRFEAARRKRAGEPVVRRTHPDHPEGKFLMWLCSNDMLLFEKDGTARLYRVQKMSDLKGSESANIWLREHRAATLDRPETAVHVTSLKADKFKAEKVTVDVSGRIHPGND

SEQ ID NO: 7107 - protein, 1026 aa, unidentified
  REGION 1..1026: note = Description of Unknown: Cas Enzyme sequence
MIRYTLGLDLGTNSVGWAMIARDADTFENGRRMLAGVRIFPEGVPHLNDSKEQAPGQTRRKKRSQRRVLYRRRQRRRLLRQILTTAGLLPQDADRFAALLQRNPYELRAGGLDEPLQPHRLGRALYHLCHRRGFKSNRKTESQDDNKVTKDAALLQEEIEQAKCRTLGEYRAKCLENEDAASGHRERVRGRYTLRCMYEHEFEMLWSAQAQYHPHLLTDDLKAKVHKAIFHQRPLRFDRETIGSCELERGEKRCARAHWLAERFRMLQEINNLRVVRASGEMTPLTADERAQLADELGHRAKMTFKAIRKRLGFLETETFNLETEGKRDYLLGNRVEASLRHRTLRKWYEDLPDDTRTQVHDALAETQDPDDLRRSALEQWACTDKQAEQLLKTSLPARHLSVSAKAIAKMLPYLEPHHACDKRCRELCPDKDLDAGHVLSEAKALAGYELTQPVATFDRLPPAAHVIQNLTNPLVRRALTETRNVVNALVREYGTPAEIVVELARDMKHTKDQRRDIHFDNIRRRDENDDIRQRLQAEFNIPSPSRTDIIKYRLWAECGKVCVYTGKPIPKTKLFSPEIQIEHIYPLDRSLDDSWWNKTLCYGAEVNRAKGGRTPYEAYHDKPEYDDILQRAKCLPWKKRRRFTVKEVEFDHFANRQLNDTRYASRLATRYLRSLGCEVRPVKGQTTSKLGHYWGLYGVLGSDYSKARDDHRYHAIDAVVIALTTRSYLQRLSRVVGNAPKDAPMQPPWEGFWNEVREAIHAINVSHRPARSVGRRGGRRRHGKIVHPASAGSLHEDTGYGPTDTPNTYAYRVPVERLTAAMVGRIRDPVVQQVVRDRLADRGIKEKGSGKFGNVLTEPPLTMPSGVPIKRVRITTTEKSAIPVRSIKGKPAKFVKTGGNHHMEVYEKPDGTWTGRCVSRFEACERLRRGEPVVCRDPGDALTFKMSLCINDMVELTDPETGEMRLYRVQKTSSGDHMVTLRLHTAARIGEKETEGPSDSVNVLRKWNMNKVTVDPLGRIHPCHD

SEQ ID NO: 7108 - protein, 1535 aa, unidentified
  REGION 1..1535: note = Description of Unknown: Cas Enzyme sequence
MKKILGLDIGTNSIGWALLNHDYNSKQGEIIGMGSRTIPMPQDKLGKFDSGVSVSQTAERTGYRGIRRLYQRKTLRRERLHRVLHILGFLPEHYAAAIDFERHPGQFKDGTEIKLNYKKNALGVNEFIFKNSFLEMVADFKNNGYTEKIPYDWTIYYLRNKAISQEISREELAWIILNFNQKRGYYELRGKEQEDNENKLKEFCVLHVDQLIDSGDEVQEKKLFKIIFSNGWEYDRMTTQPEDWINKTREFIVTTSQTAKGEIKRTFKAVDSEKDWIAIKKKTENDLEESGLTIGRFIYQSLLKNPDQKIRGKLIKTIERKYYRDELKQILNVQVKYHNELQNMTLYKKCIDELYPGNEAHKNNIKDKDFTYLFLDDIIFFQRPLKSKKSTIAKCPYECRTYRKKVPHKTDGKNIYKDVEVTEGINVIPKSHTLYQEFRLWQFTKYLRIFQRERRDGEKKFLDVDITDQLIPNEDIYAKLYDFLNTKKEISQPQIIQFFVQSGMIDKNEKSNYRWNYVEDKKYPCNNTRTQFLTILKNIEGIDAIQFLTPQIENHLWHIIYSVKDKQDYEKALKKFANCYQVNEDAFLDAFKNFLPFDNDYGAYSYKAIRKLLPLMRMGKYWKEEDIDENTRNRIEKIINGEFDDKIRMRVREKSIDLTDILQFKGLPLWLACYVVYDRHSEIKDITTWNCPGDMEKYLNDFKQHSLRNPIVEQVVTETLRVVRDIWQYYGNGSDNYFDEIHVELAREIKNSAAERQKITSRIMKNENANLRVKALLLEFMNPEYNIENVRPYSPAQQETLRIYEDGVLNSDIEVPDDISRTINKFRETDIDKQPTRSEIKKYRLWLEQKYRSPYTGEIIPLSKLFTPAYQIEHIIPQSRYFDDSFNNKVICESEVNQLKANELGYEFIVNHHGEKVPLNYGKTVEVLSVTAYEQFVKEHYANNPGKAKKLLMDDIPDEFIERQLTDSRYISKLIKGLLSNIIREDGEEEAIAKNLIVCTGSITSRLKRDWGLNDVWNTLVYPRFERLNTLFSKDNENNNPFGQWEIKEGKRVFQTNVPIEFQKGFNKKRIDHRHHALDALIIAAANRNHVNYLNNLSSTKNSKIDRYDLQRLLCEKHKTDAYGHYNWIIKKPWETFTREALDQLQKLVISFKQNLRVINKANNKTWKWVHHNGQLKKTQVRQIKGENWAIRKTLHKETFAGAVSVREKKEVSFINGIKNWRSLVDKKLKKQIKSMIDQGMNEKQLLKHFRDNPYTANGNLVKRVEIYHFIENATAYRVELSDKFKRKQLDNVTDSGIRKILNNHLKNYVDEKGKEQFNLAFNREGLEALNKNISILNDGKNHQPIYKVRVYEKGSKFPVGYKGNKTKKYVEADEGTNLFFTIYWNEEKTKREYESIPLNKVVAHQKIEATLPKSERTPVPVDKEKGEFLFSLSPNDLVYVPSSEELENPRLVDFHNLSTEQAGRIYKMVSCSGKECYFIQHYVSSLIKKYDPISKIGEFGSMNKMETTINGERIKEICWKLSANKLGIVEHVIK

SEQ ID NO: 7109 - protein, 977 aa, unidentified
  REGION 1..977: note = Description of Unknown: Cas Enzyme sequence
MSYTLGLDIGSKSIGWALLTDKPKSSILDIGVRVFPEGVDRDTKGAEKSKNATRREARGARRVHQRRNLRRDELVKALREAGILPDDDEALQELLKKEPYQLRAKGLDEKLRLYEFGRALFHINQRRGFKSNRKSGDGKENGKIKEAAEKLQQEIEGAGCRTLGEYFAGLNTEDQRIRDQYTFRSMYEEELDKIWEKQSEYYPEVLTDELREKVRDEIIFYQRPLKPTDDLIGMCDLEPDERRCPRGDWFARRFRLLQDVNNLKIHSPDGTERGLENDERRIILKELDAHEKVKFSSLKKKLGLLETQEFNAEYEINEKGKKREKLKGDEFSASMRSKKIFGAKKWESMDEQEKIELNNACLELDDDELVEKMKVEYGFSKQQAQRVLKVPLPQRYMSFSRKAIQILLPLIEAGKRTDEALDEVYPDRNKMEETKEEDKLPLPEDLRNPIVNKALFEVRKVVNAIVREYGKPRKIAIEMARDMKGSSRERKELHFKMLDNEKKNKGVRQKLKNDIGIESNRDNVIKYKLWEECGRICPYTGKQISQVDLFINPIFQVEHILPYSRSLDDSYMNKTLCCVVENRLKGNKTPYEYYQGDKSRFEELKQRVNRTSMTYWKKKKFWQKEINTDKIIERELNDTRYICKEVVKYLKKICRNVTGTRGKVTAELRYQWGFIKDRDDHRHHAIDAVVVAVTEQKHLRELARSKYSVEGIQFKAPWTNFREELAEKIKHIDVSHRPNRKVSGPLHEETAYGPTDKEDTFVYRKKLEDLTGPMVLKIVDPVVRQIVQDRLLKNGIDPDRDKKIPKEVWNEPLYMRTTKSDKKVQIKKVRIQDIYKNLILLKDKEGKTYRGVKTGENHHIEIIEYADEKGKVKRCGKVITMFGAVRRSRKGEPVIQRDHGTNTKFVCSLCKGDMFILETNNEEKILCRIQEIWGSTNIVLRPHINAIEVRDINKTASKLKGHKVTVDPLGRIYPAND

SEQ ID NO: 7110 - protein, 1004 aa, unidentified
  REGION 1..1004: note = Description of Unknown: Cas Enzyme sequence
MNSYTLGLDIGSNSIGWALLKTDKKPAIIDIGVRVFPEGVDRDTKGLEKSKNATRREARGTRRVHKRRNLRREQLVKVLKSEKILPNDEKQMSELFKMDPYRLRAKGLDEKLDLYEFGRVLFHINQRRGFKSNRKKDNVKEEGKVAKEAGELQEKIDKAGCRTLGEYFYKIDPEEYRIREQYTFRSMYEDEFDKLWTEQCGFYPEVLIEDLRKKIRDEIIFFQRPLKPTDDLIGLCELEPEEKRCQRGDWYARRFRMLQDVNNLRVCNPDGSMASLTPEQRKSLLEELSKKEKMKFTAIRKKFGLLETQEFNAEYKVNEKGKKNEKLKGDAFSAAMQNKKIFGPKVWDAMDEAEKIKLNDWLVELEEDELKAKLAGEYYLDEGRIENVLKISLPQQYMSFSRKAIQKLLPLMEKGKRTDEALNEVYPDRNKTGAIDEKSKLDLPGDLRNPIVNKALFEVRKVVNAIIREYGKPTKIALEMARDVRGNARERRELHFKMIENENRNKETWKRLTEDLKIRNPSRNDIIKYNLWEECGHICCYTGKHISQTALFGETPEFQIEHILPYNRSLDDSYMNKTLCDVYENVHVKGDKTPYEAYSDDEEKYEQIKQRIKVLPWPKRRKFLQREISLDECIQRELNDTRYICKEVVKYLKQIGINVRGTKGRTTAELRHQWGLNSILYLAGEDMKNRDDHRHHTIDAAVVAVTDNKHLNKLAKSKYSTAGHSFTPPWPHFREELAEKVKHINVSHRVRRKVSGALHEETAYGPTGELDEKGQDIFVYRKRLEDLTGPMVAKIVDPVVKQIVTERLKEHNINPDKDKRIPKEVWNEPLYMKTTKSNKQVTIKKVRIQDVFNKMILVKDKSGKPYRAVAPGNNHHIEIFEYKDKKGQTKRGGKVVTMFEAVQRSQRGEPVVYRDYKNGKNFVFSLAQNELFMLELDDDSTKLQRVQKITQSGNNTTITLRPHTYAGKVSDSDKPPHVRRRSPNTLKGHKVTVDMLGRVHLAND

SEQ ID NO: 7111 - protein, 1559 aa, unidentified
  REGION 1..1559: note = Description of Unknown: Cas Enzyme sequence
MKRILGLDLGTTSIGWAFIAHDFEKKEGEIKGLGSRIIPMDAATISDFEKGNTISQTAERTKFRSTRRLYQRNVLRRERLHRVLNVLGFLPEHYAKNIDYEYHPGQFKNGLEPKINYRPSNTNGYEFIFKESFNEMVKEFKSCGHNVKIPHDWTIYYLRKKALTEKISKEELAWVILNFNQKRGYYQLRGEEEENEKERNKTEEFYSLKITGVKETDEKNTKGTWYNINLENGWVYRRQSKQSLNSWVGSKKDFIVTTHTEDDGTPKKDKEGNIRRNFRAVDSENDWIAIKKKTEQDIQNTEKTVSEYIFDTLLENPNQKIRGKLVRTIERKFYKDELKRILDNQAKFHPEFHDRILYMDCVEELYPKNEAHKENIKDKNFVYLFLEDIIFYQRPLKSKKSSIANCHYETRTFKKQFIATENGKTIKKESVVTEHLKGISKSNPLFQEFRLWQFLRNLRIYKHEAEIDGKPEIDVNVTNSFLPDEDSWVGLFDYLNSVKEINQNQLLEYFVNKSLLTKRDKNNYRWNYAEDKKYPCNDTKTQLTSRLKKVQGIDAEIFLTKEVEYHLWHIIYSIRDKKEFEKALKTFAKKHKIDVESFFEQFKNLPPFKNDYAAYSSKAIKKLLPLMRQGKYWDEEKIPAKIIERGNAIFERLKSIDFDSEKIDDNVADDDIPKPILKSFVKKGNENFYRGLNTYQACYIIYNRHSEISDLMQWKRPDDISNYLAEFKQHSLHNPIVEKIVTETLRVVKDIWEYYGNGAERFFDEIHVELGRDLKNPANIRSEISGKIAENENTNQRIREILLELKNDSGIHGEVRPWSPSHQEILKIYEEGVYQNPNASYESLSLDDVEKIRKNSSPSKSEITKYKLWLEQGYVSPYTGKIIPLSKLFTPNYEIEHIIPQSRYFDDSLSNKIICESEINALKDRRTAYEFLKDENGRIIELAGGKTVRLFTLKEYETHCNDYFKKNRTKLKKLLSEDIPESFIERQLNDSRYISKLVKGLLSNLLREYNEQEVTSKNLVPVSGAITSMLKNDWGLNDKWNDLIAPRFQRMNELTQSNDYGFWDEKIKAFRPTVPHSIAKGFSKKRIDHRHHALDALVVACTTKDHVNYITSLNTQRNNYSLVNKLRQVREKQYMDKRTGELKTRKVPEDYLLPWNSFPKDAQDCLGKTVISFKQNLRVINKANNKTWQWKARNGKLKKEQVPQTKGDNWAIRKPMHKDTVSGKVKVRIKKEVSFVNGIKTWENLVDKKLKRIIRKLKSEGKNDKALNQYFRNNPYMIDIKAVKEVEVYVYTQNATASRLEISDKFSRKHIDSVTDSGIRKILEKHLENYKDEKGNERFDLAFNPEGLTELNCNLTQLNDGKKHKPIYRVRIYEEGNKFRVGQTGNKKKKYVEAAKGTNLFFAVYWNEKKQKREYETISLIDVIEYQKWRATLPKEEQKITPIIPVNPENGKFLFSLSPNDLVYVPTEEDLINPGMFRFENLTPEQSSRIYKMLSSTGNECHFVQNHVASLIKSYDAKSKIGEFGSLNKMETDIHGTRIKECCWKLEFDRLGNIIKVYQ

SEQ ID NO: 7112 - protein, 1358 aa, unidentified
  REGION 1..1358: note = Description of Unknown: Cas Enzyme sequence
MEKTLGIDLGTNSIGLALKKGNEFEWFGVYTFKKGVGQDKSGEFSFAADRTKHRSSRRLYNARRYRKWETLKVLIENNYCPLDLKNLSKWKHYIRGIGRKYPIENNSFQKWIKLDFNGDGKPDYSSPYQLRRELIEKELDLGNKENRYKIGRVFYHIAQRRGFKSSRKLGANEKTAVYKGSSETNTIGRNEYESLLIECGSLGAALARLEEEGIRIRNRYTLRKDYKNEIDQIISKQKISDESFSERLIKAIFYQRPLRSQKGLVGKCTLEPRKHRCPISHPKFELYRAWSFINNIKFRNTDNGDCQQLPLDIRNGIFENVFMRLKSSFPFEDIRKYIEKKGDKNWELNYKKKADKVSVSGCPVSARFRAVFGENWLIFKKEIARTNKKGEPVNKTYDIEGIWHILFSSEDEEFIEEFLLSVLNLEEENVKGLMTLWNHFPVGYANLSLKAINNILPFLQEGIIYVESVFLAKIPEIIGDKTFNQNKELILSTLQTEIEQNRLEKAVVDITNNLISKYYLLDYNERFGWKNTDYKLDRNDKNDIIQCCIEHYGEKRWNNFMDVVLKNTILAGVESKYQTFFEDHKREHIKQPQLLDQIQQWIMANFNEVTEKQLSKLYHPSKIDIYPSIEGQTYLKSPKTGAFKNPMAYKTLHILRRVINHLIETGKIDQETRIVVEVSREMNDANKRWAIETYQRKRENENKEFAIAIAGLVQDQDFRGEADPSSEKDMEKFRLWFDQLDDSSTILKEINATKSDIDKYRLWKEQGCKCMYTGKTINLTDLFDTNKIDFEHTIPRSKSFDSSMENMTVCYADYNRNVKRNKIPTELPNYLVDTPEGNAIEPRLEVWRKKVDELKKQVEDCKFRSKIAIDKKQKDEAIKQKHLRTFDFDYWRNKLDRFTREDIPSGFKRSQLVDTQIITKYAFHYLKTVFQKVDIQKGLVTAEFRKIYEIQPKEIKKNRTRHHHHAIDAAVLTLIPPALQRQEILKKAYEYNEATGEQYHEKPFNSFNSNSIKDIEKTILINDMPNKDQAFSPGKKLVRKRGRVVWTKDSNGQVARDTSGKKIPKIAQGDSIRGQLHLDTFYGKIESLEKKGEFWMVGRKMVEDINLKSDAIIDKTLAEHIKKQVDEGVSLSLLVDLNGNRLRHVRCRVKAGRGFLATESVTVIKEQTYKSKHEYKNYYYTNSGDNYAFGLYVGANQRKIVPVNLFDASKINNYKHVDDSKELFEPLIFIGNGKNKVEAKLYHVFQPGQKVLFYNENKDELKDLGTEELSKRLYYVRTLADAKQGLIQFQHHLEARNDEQLNNDFPKDQFGAKGKNGFSIFSLEFVAPRLLLSAGNFNFIIENKDFEFTMYGSILFKY

SEQ ID NO: 7113 - protein, 1528 aa, unidentified
  REGION 1..1528: note = Description of Unknown: Cas Enzyme sequence
MNTLGLDLGTNSIGWAIVDEGNKNIVDSGVRIFPEGVEPNTIGSGDKEKSKNAARRESRQRRRHYFRKRWRKVKLLETLIRYNMCPLSYEELKPWKNWDPKEKSEGRQFPDSKKFIEWLKLNPYELRAKAVHEDLTMMEFGRILYHMIQRRGFLSSRKDKDTGAIYKGDDDKAGINETLAKKGDRTLGEFLNEIRPKDNQPFQLITDQDGKEERVRARYTLRKMYIEEFERIWQRQAKNLNLESKTATYTKTRYLEGYAKNNRNKFKIDYLQKTKGSDNVNVKETDIDGATMTEVKTMEEIPLKEFLGGKIWWEDGEIKFKSNESVLFWQRPLRSQKSLLSKCSIESREFFDKSKNEWITIGPTPSPISHPDFERFRAWKFINTVDIASVKSDPLKTTLTDDQRQKIYEVFNQKQKKKFSEIPKKLELTFDKFNYSDDTPLPQNKTISQLKPLFDEKTWNNHYQDIWHCFYFYDDNDKLFKKTTKDYGAKVETPEELDKIKLEDGYAGVSLKAIRNILPFLEKGYKESTAVVLGGVKNAFGDRWEYFETSHDEIENRVVGILRSPENKEGEAIEKIKQFLSDEDNGFSFKPNDKAFNKLYHHSQQVTEKVKHYKIPEVENLRNPIVQHAVNELRRLVNELIDKYGSFDHIHVEMGRDVKAGKAKRQEMTFQINENRKKNDEAREKLTEFGLSHTRDNVQKYLLFKEIQDKAGNVVCPYTNKTVSPSSLLGLENAFQIEHIIPRSISLDDSFANKTLCDAKFNQLKGEKTPYQFYKENSDPNLWGGAKSWEEVAYRAFRVLPYGKAKRFTAKKDFESTDFIQRQLNDTRYISKQAKDILSKICDDVRVMPGSVTSELRHLWGLNNVLQPVKEVKLDVKTNEKEAVPHYAVLDEYKKVKYALPVYNELPQVVEDDLTLAGYITKEKEFKSKYLEFSTAVEELDPGSYWAKLKVGNNPRLIKRYAGRPETDEEHIALLGQVNKEKFSHNSLAKNLPAVGLDGRKKYYANFKVLNKALEPAEDRNRPKAKKDELLLYGQVNGGQFKSYIYQCQTNLPDDAYWLKLKLDFEDVEFIPSETPKPEFDKDKQILISASVDSDGQLSTHVDQRFTLETSNDPGIYWCIFDIKKSPYDFTKIKNDPPKPATDEKVVEGNVWVDKSTGEIKFDPKKNREDQRHHAVDAIAVALAKQSYLQQLSTFYANKDEKSRGNEAEKPTFDEPWEGFRKDVEESVGKILVSYTKTNGDLKKVTKAIVKDGYKRKSEGYAVRGQLHKDYVFGKRKPIGKEEAYHIRKSLNAITKSTHVNKIVDDKIRQLIQEHLKELGIDITGKYDVPKEAFFKSGKPQIYLPNKNGEPVPIKKVRIRERLGNAENVKPSKDINKYVNPRNNHHVLIYEDEGGELREDVNTLWEVVERKLNGEPIYQLPPARDLMHIPKRIVETIEVNDYFVLGLSNREFENATNSIISEHLYKVQKVAGGDYFLEICFRMHRDGRKDKEAKSDYSYIKNFGTGKTGWHTHNPIKIKVDRLGNILK

SEQ ID NO: 7114 - protein, 1067 aa, unidentified
  REGION 1..1067: note = Description of Unknown: Cas Enzyme sequence
MAWRLALDLGTNSIGWAAFDLESEKDRLRPIRLAGAGVRIFSDGREPAADGRVGDPKALNRRLARGMRRNRDRRQGRIRDIAGLLIDAGLLPEEPEERQALMDTCCPYEARAQAARGPVCAYTLGRALFHLGKRRGFKSNRITDGDEETGGKLAEAQESLEAELGGLTLGQWQNARRAASKRRKEDGEAPRETHAMPRVRFRDGSSFYPTRGMYEAEFDAIKTAQENHHTLKPEQWAAIKDRIFYQRPLRPVDRGRCRFFPEDKRLFRAMPSAQRFRIAQDVTHLEWVDGERNAHKLNPDQRKAILEQLERQRSLSFSSMRKLKKDGTLLFPDAVQFNREDSKNKGLSGNATACDMRDTALFGDTWDRLSLDEQDEIVGLLFEADNEKPIREAAARYGLDQAETEKLVAKRFTRATASIGVTLARAAIPLMEQGKTYSAAVAAIEGPDGRPLHHSIEDDCATHETLPYYGELLAGNTVGGDPTKPKDATEAHWGRIPNPTVHIALNQVRTVVNRLVERFGKPDQIVIEVGRQLKNSAAERARIMSEQARFEKENAELAKEARELGIAIPSRADLNKIRLWRELGEKALDRACPYCGATISASQIASGEAEIEHILPFARTLDDTRANKTVAHIGCNRDKGNRTPHEAFGSTALWQGISAVVERLPKSKRWRFQPDAMERFNRNGDFLARQANDNAYIARLARRYLRALTCDTWTTTGQLTAWLRTMLRLNAPELGLGEAPHPWKKNRHDHRHHAVDAITIGLIDRSLLQSVNTQRASDGRVRIRFEKAVADRAWIVPQARDVLARILVSIKPDHGIEGPFFQERAYGTLSKEQMDATHPDKPLISRLRFTELKETELPRIRDPRIREEVVAWMKEQEADNRKIEEKLAEFASEWERREGKPLHSVRILYTPRGAREIPSAPYKVYAADAYAFVDIWRVPKGRRGNWSKVAHTYEGSFMSYYDAARPGFAPKKDLKPHPAAKHEMRLFKGDTVTILEGSNVVTMRVAGFSTTNNKLDLHPLNSANPPGHNYISINKLIGGLGMRKLLIKPDGTARNPVVLQKPRELEA

SEQ ID NO: 7115 - protein, 1419 aa, unidentified
  REGION 1..1419: note = Description of Unknown: Cas Enzyme sequence
MTKNILGLDLGTNSIGWALVKQDFENKQGEILGMGSRIIPMSQDILGDFGKGNSVSQTAERTRYRSVRRLRERFLLRRERLHRVLNVLNFLPEHYSSQIDFEKRLGKFKAETEPKLAWENNDGQFSFLFQTSFNEMLGDFKANGQDLKIPYDWTIYYLRKKALSQKIGKEELAWILLNFNQKRGYYQLRGEEEEENPNKLVEFYSLKIVDVLADEPQRGKSEVWYSLVLENGWTYRRSSKTPLFDWKDKTRDFIVTTDLNNDGSIKTDKDGNEKRSFRAPSENDWTLVKKKTEQEIDKSHKTVGTYIYETLLQDPKQKIRGKLVRTIERKFYKQELKQILEKQKEFHPELQSDDLYNDCIRELYRNNEAHQLTLSNKDFIHLFMEDIIFYQRPLRSQKSSISNCSLEFRTYKDENGVEHTQYLKAIPKSNPYYQEFRIWQWIFNLNIYQKDNDENVTKDFLSTTKDYGNLFEFLNNRKEVDQKALLKHFKLSDKTYRWNFVEDKKYPCNETKTMISSRLDKVEGITDDFLTRECEQKIWHIIYSVNDKLEYEKALRSFAGKYHLDEISFFEAFKKFPPFKSEYGSFSEKAIKKLLPLMRLGKYWNYADIDKASKDRIQKIINGEYDENIKDKVREKAVHLTAENDFQGLQLWLAQYIVYGRHSEASIIGKWNSADDLEEFLKDFKQHSLRNPIVEQVITETLRVVKDIWVKYGNGAKDFFSEIHIELGREMKLPAEEREQLTRQISENENTNLRIKALLAEMMNDGSVENVRPYSPMQQEILKIYEDGILKSDIEIEDDILKISKTAQPSSSDLKRYKLWLEQKYKSPYTGQIIPLNKLFTPEYEIEHIIPQSRYFDDSFSNKVICESAVNTLKGNYIGLEFIKKLGGTVVECGNRRSVTVLKQDEYEDFVKQLYARNRGKRNKLLMEDIPEKMIERQMNDTRHISKYISGLLSNIVRVEDGTDEGINSKNIIPGNGKITTRLKQDWGLNDVWNDLILPRFERMNQLTKSTDFTAWNENHQKFLPTVPIEFSKGFSKKRIDHRHHALDALVISCATRDHVNLLNNQSAKSDLKRYDLQYKLRHTEKWIDKDGRERDKFTEFKKPWEHFTVDAKNNLEKIIVSFKQKLRVINKATNYYEKYEESDGLKTKEKIKQTGTNWAIRKPMHKDTVSGKIDLPWMKVPKGKILTATRKNLDISFDLKSISSITDTGIQKILKNYLNFKGSSEIAFSPEGIEDLNKNIEKYNDGKPHQPINKVRVFELGSKFQVGQSGNKKDKYVEAAKGTNLFFAIYEDENGKKTYDSIPLNEVIERQKQGLPTVDFKDKKGIYLSPNDLVYLPTDDEVENIGGIDFNHLSAERKRNIYKVVSFTGSRLYTTPFQVATAIVNKVEYTQLNKIEFTKEKESCIKIKVDRLGNISKA

SEQ ID NO: 7116 - protein, 1205 aa, unidentified
  REGION 1..1205: note = Description of Unknown: Cas Enzyme sequence
MNEYILREPDRKPLAEEWLNHEFYRSAVVLGIDIGLEGIGVYLRRGPQEIFARSIMLELPEAEALAERRQKRAWRHCRKNRKRRLHRLKLLFAKHGLPWLDADRISRAHPFRERYRAINNGVASKEALSICIRHCVVHRGYDYGGTEEGTFPWGESPLLSKAAEWLATAYVTPELKEQIEQLAPGLVPGKNEEEQRNKFAELLRERLEWSQQHDIARVLAEHVKGGHDNLRTRARGYNFPRQKVWEHLETIVRKHAHLIDDVEGFLAVLGLNPNRAANAKEAAKARKRAIFFYNRKTRFDMERHWEKKVNRCPFAGKLGGNPDERCAENGDLNVRRWKALEFATTRRVEIEATEGKGATKKKRRCLHSLSASATRKLIEFIEKHHGAASPATAPKWEEGKAIILDDITAVHGEKAKPVAEKQSEWNKSYFTQLKDLLTPTIANRKKRASLSAFAAGQLFNIATADGSDFTPENVVARLREARFYDWRRNASVDFNPFPQVELLLGRRIKHGKRRGELSPTCQGLLRRIFAEHREALGGATAPDYCVIEVIGDPPRNAQQRAERQKEIEANREKHEKLFEQYGIEDSGVASKRRRIMLYEQQRGKCPYTGKDLPSNPLDPSLEIEHIFPAEMGGLSVDDNLVLTWRSVNAEKGKRTPLQWAGERFDAMLANTRDMRWSARKREIFAWGTIREDKPDKPSHYNADGTLRVPDFGNTTRTAQLARQLRAEIMRWMQVDDKPDEAARRIGTPSGWLAAQARKSWLPAEEYEKVRNNVTHHLIDAAILAHIPPREGMNSVPCKGIFYVESVPVRDPVTGDTTYRLETKALPELSPLPRLKHWLPDNGEYDVCPVWKPRRQSKTQSLGDSTFWKQVRPTEATVAQRTALDADSLTKLRIVDGESLHAHLCRMGIQATKIPNRDALQKWLDEATAATKADKDKPIAPLKLTDGTPVKNLWKFDSKGSFSSPVGWSGKRNPDGKLRELRTISLKYDRLELWLGYDHQKAERARRAKQPDWEQAGWVYQKRLIPDARALRHVKQMGFSFARDKRHKAPAFMQNKPDKPETHQTLRDLVLGGRLLPFSHKVGEIRKGDVFKLHLLPDGSIRKRTPVGQPEPAAALSTFYVVTALKHGRGNPVVELTSQLFKDKEGTPMERFAGDVLSKILSTADDLAYVLGLPPAAEEAQKHGWRIPTSPPPPAAAAKETDGNLL

SEQ ID NO: 7117 - protein, 1044 aa, unidentified
  REGION 1..1044: note = Description of Unknown: Cas Enzyme sequence
MGKIYAFDLGTGSLGSCVREDKEIKDLSVELLPNDFATLKEARERRRQIRTRIAHKKREEWWKEQSQKAGIEVLETGHLDKNGNFIKPDDKISRQFPESGDDAIYNSSLLRIAILQGKKLEGWQIFKAIWSAIQHRGYDSNLPWIRESKRNIDEDENTEQINKDEKENQEAVKKYNNALKDVFGDKKEYYYPCYYEAYKMGIWSPNEPNNLNKKFSANPNPARNKDGKVDLVIPRDLIEKEIKDMLLKIGESYPYIKENLDLILYGPGKSKYAAYKAKEYRKYLGKDWEWQGLLSQKTPRFDNRLISKCALIPRLNVCKAKDELNKEVVFLMKLKDVRYYKIDGGEEKYLTNEEIKNIYEKFKDKLKITERQWTKYLKENLQGSPNPSQPKIEPSKPSGRSRFCRPALRIIKEIILSGKSPDLLYKELVENNKNTDPKKGLVKEDYSFLLKMPEKWENFHIPDNRMDESKLDETERKNLIEEIFSKTSNPIVKHRLKIFYDKLIEYKNKFGEPEKVIIEFVRDTDDGFYGKIKKKKIIAEQNKNRKESDLAFKEAQTLGLKGGESILKIKLYREQGGFDLYDGKTIKDTEIDNYEIDHIVPREDGGPDSYINKVLTSRKNNDDKGKRTPYEWLSKSDNWEEYFERVKKLPKDSKKKKDLLVSANAKELVEKYTQLAETAYIAKLSQKICHLFFGWEQGTEGSKRKVIVANGGLTAKMRNAYDLNRILHTGLSDAEYKELCKSGEIDKKNRDNPRHHALDAMVISMIPEIKMNDRKKDFFPIWFNPDYCREKLEQCFPKNIRYEKPKLAETIYGLREIIDDRGNKKYVFVSRLVGDVKNIEGYYDIKTAKKYLDKIFSDKIKKDFKEKLDSNPSNEEWKSFLDNYFAGGKPKKILLKVSNEYNYDEIKDFLDGKVKNCGEFIKGKLPGQYLKQKKEAYGYFIYKNEKEKWIRDVIYSFDSLFNKMKEIKSKHKEAYFFRSEMLVEVQKDFNIKLKGQDVIIPKGKYYLKTIGDNNFCKIETIDSSKEFLINIKYLMEDGLMKPIS

SEQ ID NO: 7118 - protein, 1102 aa, unidentified
  REGION 1..1102: note = Description of Unknown: Cas Enzyme sequence
MEQKESYILGLDLGANSIGWALLEAHPDPEEKGRLKAHGIKQIGVRIFEAGVEGEIEQGKDQSRAVDRRDARLARRRLDRISRRLSHLFYLLMSAGLLPEHPAYKTELGKKKSAKERKQERDLKAKARHEVINQLDQDLVKKWREKEPLAKETLPYILRAKALDEKLELYELGRALFHLAQRRGFLCNRKAKAKDDEELGKVNQGILELEGKIEGAGARTLGEYFSKLNPKEERIRSRWTSREMYLKEFEQIWNAQEKHYPKILTPEFKKKIWRCIFYQRPLKIQHHLIGECQYEKGKKRAPSACLAFQRFRMLQQLNNSYLISPDGEILNDGRLTKEQRERLIEVLEKKAELKFSKAKKILGLTKEYRFNFEKEDGKGEFLGNETAEKLIKVFGEERWSRFSEQEKNEIVQDLISIQHKSGLVKRGKNKWGLDDENAEEFSKINLEEGYCGLSRLALSKLIPLMETGLTYMEAVKQVYPDRLQNEAFDQLPMVINQMPELKNPVVKRVLTELRKIVNAIIRKYGKPEQIRIELAREMKKTRQQREEIWKKNKQNEEKRKQAAQAIIKEAGENPKPADIEKYLLWDECNGICPYTGKSISLKQLFSGEVDVEHIIPYSICLDNSYFNKTLCFHDENAKVKNNKTPWQAYGSDEKKWNEILERVKRFKGDAAKEKLKKFQIKDLEELDDFISSQLNDTKYASKLAKKFLGLLYPGQEALSRVQATKGGITANLRDVFNLNSILKDGDSVERDGYEPKKTRADHRHHAIDAICIALTEPSTVKMLSEASSRALKERKRRFGKVQPPWENFWEDVKKAIDNTIVSHRVSKKVNGPLHQETFYSPPKEVQGKIICHVRKPLENLSAGDIEDIVDPVVKKKVQEKIKELGGGDPKKLFAGSSTLPPEKLPCMTAKDGRVIPIRKVRIKCVMTPFQVGDKGRERFVTSDTNHHLEIFETKDKKGNVRWDGAIVSQYEAMRRLRAGEPIVKREHGKGKEFKFSLALNECVKLLDEKGQEIVCVVKGISQLSAGPIVITLRHICDARPTSEYQKQIKMRKELKKNYDKKLAEEIEKMLPVFIFKGPDSLREAKGQKILITPLGEIRTAND

SEQ ID NO: 7119 - protein, 1001 aa, unidentified
  REGION 1..1001: note = Description of Unknown: Cas Enzyme sequence
IKLNPYELRAKAIKEKLSLYELGRALFHINQRRGFKSNRKYDITDKDEKGKILTASQKLKDKIAEYGCKTIGEFLWKRYKNGETVRVKMKDGQYDFYPLREMYEKEVDIIFKKQIEFYPEILEKAEKEIKEIIFFQRDLLPQEKGYCEFEKNEKRIAKAHPLFQEFRIEQDVNNLDTDGRMGEYLSEEQKNKIKQILNNCEIAPNKNNFEISFSKIKTQIGLNKNVKFNFESDKRKGLKCNTTNFLLSSEDCFGEEWYKLNDEKRAEVVEWLISDKKDFEIKNYLKKEFNFDDSKSEKVMGTILEDGYASLSKKAIEKILPYLKQGKIYSEACKNAGYHHSDHKPDKILPNLPYYGEVLSNKVMRDNKNCNDTDSPEKKYGKINNPSVHIALNQLRKVINALIKKYGHPDEISIEMARDLKLGTKALEEIKKEQEKNQKDNERIDEILKRNKLPVNPENRLRYKLWEELSDKPQYRQCVYTGKQISVKDIWTDKFEIDHILPFSRTYDDARSNKILISREANRVKGNMTPFEAFGKTDKWPEILKRIERLPDNKKWRFGENAMKRYEQEGGIIARLLNDTRYMARVAKEYLSFICAPNKIDVPPGQLTAILRNVWGLNFLKDKNKTKSYRMDHRHHAIDAFIIGCTTKSMLQKAAQCSEKAEEMGGHFKGRIKLFKGKFLPFEGFNKNIRESFKKMIDNIIVSYKPDHKDVQKAISNYSTIGPLHEATAYGPTNLKSKKPGYIIVSIRRDLKDINEKDLDNIADKGIAKELKEILKIKDIDKRKKLLEKYSKDNNIKKVTCYEEKDENVLIPIYKKKSDGTYYEKPYKYYIGGNNYCIDIICLRPDDKREPEKAGKWKGEVISNYNAHKPNFEPKWRKEHPTAKRIMRLFINDMIVLTFNKKDKNDFPKNIKNFILEEFNKTKKNEVDMVFRIKKISTNGTFFITPHFIVKDEKDKFSWGASVSGIFIYKARKVYVDELGKIIDNGFIQGWEKNVKCVRNK

SEQ ID NO: 7120 - protein, 1036 aa, unidentified
  REGION 1..1036: note = Description of Unknown: Cas Enzyme sequence
MRAPYRIGIDIGTNSLGWCVLDLDRSEEPRAIRRIGVRIFSDGRDPQSGTSLAVARRMPRQQRRRRDRYLDRREKLMAALVRHGLMPADPAARKALQGLDPYLLRARGLDAPLALHELGRAIFHLDQRRGFKSNRKTDRSGDEKEVKGMKGAIATLDREIRESGARTFGEYLWKTRRSGEDGTPLPVRRCRPVRARRRGVGAKAEWDLYPSRAMYEAEFDALWAAQAQHHPSLTDMAREEIRGILFFQRKLRPVDPGKCALDPTDRRAPWALPSAQRFRMLQQLADLKWVGVDQVEHALDAHQRRRVLEKLERAREMSFDAIRRRLGFGSEIRFNLENEKRTRLDGDETGARLAKKTAFGARWWNFELAERDAIVERLLAEEDERRLQEVAVREWRLDEEAARVVSELSLPEGYMRLGRRALAKLVPLMETGMSYSDAAAAAGYHHSDWRTGEILDALPYYGAALERHVAWGTGEPGDPEEARFGRIANPTVHIGLNQLRKVVNAIIGLYGPPTEIVVELARELKLGKEQKDRISARQAREQKKNEERRAKLAELGLPDNGENLMRLRLWEELNEAEPHNRRCVYTGELISIERLFGPEVEIEHILPFQRTLDNSAANRTVSLRRANRDKGNQSPWEAFHARTGYDWEGILLRASALPPNKRWRFAPDAMERFEAERGFLDRQLTDTAYLARVTREYLAGVCDPNRVWVVPGRLTEMLRRKWGLNRLLSDHNLKNRTDHRHHAIDAFVVGVTDRSLLQRIARAADETRDRLIEDMPEPWEGFRDELGERVRKVVVSHKPDHGTAGKLHEETAYGIVADPRREGGATLVARKPLDQLNENEIERIRDPGLRERVRAVAAACNGDKLALRRALSEFGEREGIRRVRLLKTEQSFVTIRDRNGAPYKALIPGENHHVDIVELPNGRWAGRGVTVFAANQPGIGSEIDDARLVMRVHKGDLLKMEHDGEERIMRVVKLAPQNGRLVLAEHNESGNLEKRHADPDDPFRWAFVSFNQLKARRARRVGVDVLGRVRDPGPPR

SEQ ID NO: 7121 - protein, 915 aa, unidentified
  REGION 1..915: note = Description of Unknown: Cas Enzyme sequence
APGGATPPAWEIPRRRAVGQTRTMVREEFEALWAAQAKHHPGLFTPELKVRIERVALAQRPSFFRARSFGQDDLEPGEPRALKAEWLTQRFEMLQLVNALRLEQGNQRGLDATERAKAIAYLESERHPTWAGLRAAIGLGRSDRFTHERGAKATIRGNATEAALRAALGPTWETLPEATRETIRAEIGRAWHRIEYRPTQGGAILEIRDHAGIAAERARLAERARAEWGLPAEAAAALARIDLPDGAARHSLAAMRKLLPHLEAGLPYMTAVERVYGARRDSGPPLEQLPVPNQSELRRIKDPWVRERMAALLAGIRNPTVLRTLGELRKVVNTLLRAHGRPDVIRLELARDLKQSAADRRETDRRQRERKRAREQARKQVAELGKTAEGPEGEENVLRWLLWTEQGKRCPYSGGMIGCTDALDASVTQIDHIFPVSRSFDDSQANKVLCFAGENAAKGRRTPFEWLSGDADRWAHLTTVVWPGMEKDGWPKGKHARCLKARLEDPEADGEAFTSRQLVDTAFVARAARPYLGLLFGGGEAGLHAVQPVPGRVTALLRRAWGIGLGRLMSAGEDGAKLREDLRHHAVDALAVALTTPRTVAELSRWWQMREAGARPPGFPLPWPGFREQAKAAVEAILVSHRVQAKLSGPLHEETRLGDTGRREPGGAAIYVKRKAVADLTATEILSTPEDGRDAWIADAGVRQAILDHLAANGLVLRRKQRGAAADAASERRLKQLLTQEIRLKLTEKRRTHWEKEGIVAPQGPVIRRVRLHLRREAGVMRVHAAKNIHAELGPGTNDHIAIYRDGETVRFLVATRREAWLRVRNGKPAVLPEHPEGGRLVMALRPGDVLRRETENGPEVAVVRFAYGNGQIFFKPPWMAASPRPQVSKMPATWVREGWRKVTVDPIGRWRPGR

SEQ ID NO: 7122 - protein, 1661 aa, unidentified
  REGION 1..1661: note = Description of Unknown: Cas Enzyme sequence
MEDLKLKKVLGLDIGSNSIGAALVEVPEKNEEYGKFGRIIFTTSRIILTDTNLLNHFEQGEKLETPAKSRTAKRSMRRRIERYKLRRARLTMVLRHLGWLPQDFPPFESPSKIKNKLFEILNTPKELREHNINYYSLKISDFLKPSDESIQEFYQEFGIDYNISKEFKKLPDDWIVYYLRKKGLHKKLSYSELALILYMLNQRRGFKSSRKDLKDTEQVPYEKFEETIKEKPDSKIETKFATITKIVKVEPVYDEEGKPKISKGKTIYRINVDDERVEPWDDNFEKEPKIVGKEVTLVVTKKYDKGKITQLKPKEPDENNWDLCVVAQDNKMGLKHPGEYFFDEILRAYKDNKHVKIRQYAVYRAKYIKEITEIWKKQLELNPELATLNQNKQLMAELAQILYPAQSKIKAGKYLEFLNNDLFHVIFNDIIYYHRKLKSQKHLISECPFERRQAIKIDKNGKKILYDIRGLKCIPKSSPLFQEFVAWKNINNLKLYLIEGKYDVDVTEKYLTEDVKEKLFEVFKRKSEVKINDILKTINEVIPDSVNYIRNNKKKGEEYNVRINLVNKDGEIKGNQTVSHYLNLLSKITDKSNDIISDDEFIYKLWHLEYSQNASTLDDLKENLSKGLRKIAINYPEIVEKADELADLMSKSSLIGDKDYGGFSALAIKKMLIVMRCGKYWKDPDILIQEFKQKLNNETNKKRAKEITNFITFLEKVKEQAQNIKQRIDLIRNRTLKIEEVADDIVKKQVIKSFMEKENLEDFYKGLKEHQATYLIYDQHSEKRFQKYLSYEDISKSINELEKSAIKNPIVKSVIRETLLLIRDIWEKFGYIDEIHIELARELRASSEQRKQIAENMRNKEKERERARQMLIELVNKGYFKNSVIPNPNRNDDIRKFLIYEQQVKGFYNKPKDKEFLTYAAWLEQNCISPYTGKTIPLSKLFDGTLYQLEHIIPRARYFDNSLSNLVVCESYINKAKGNQLAAVFIKNSNGRCKDGDKFYDLLTYDDYVAQCKNLFYYKNKAKYKNLLAEEVPENFISRQLNDTRYINRKLAEMLRPIPRDEQGVIVTTGSITDMLKRDWGLESLWKDMMVPRFKRMERILENELDKDDISDEKRKYLEEKLALIKKNLYFITKHNDTIIEEPELAPNEKIDIKRLDHRHHALDAIVIALTNRRHIQLINTIHAMDESKKPSYNNNNDDFGKIYKYLEKEDKIKYTLPWINLPFDTKNALDECMVTFKAKNKFITKPVNKILKWVEQNGRLEKAFVSQEKNPRWMAVRCQIFKEQPFGPIWIKYVEQKSLSDAIKIELKRKIEKASHLEVGYVYDKHAREVIKRFIDEITNEVGFQKIEDYSNLILKQIPKKGKNYILDGIEYEKIPVAKFELNKAKRKALSKEMNIKYLRDKVPYFFLDKEIFEKYRDSYPKVYQKYLNSLEDKKNTIAYELILEHLIQYNDDASKAFSTEGQEELNKRALANPKFQKTINAVTILDGELDKKMLRYNSYFETDTNVYFTIAEDPKTKERTNNKSIRIIEVLDSKLNGKPLFEIEDGKKLLVFKPYDIVYVPTKEEIEQIKSGAEINEVIDWNNKKKIIERCYYLASTAENTFKAKILTFANFLIKPEKGFSGEVGWENKTKVALDEDTDIAKNCIKLKVNRLGNFEPIL

SEQ ID NO: 7123 - protein, 1056 aa, unidentified
  REGION 1..1056: note = Description of Unknown: Cas Enzyme sequence
MSGENIETILGLDLGANSVGWALIECVDGKARRILGMGSRIFEAAIEGDLEKGQEEPRAVERRMARQMRRQHKRRVMRMIRVGELLQQAGWFPPGNLRDSVERDRILKELDKSLRQQYADRGFHLSGIDAIRGIAYFLRARALDEPLEPYALGRAIYHLAMRRGFLSNRKAPMKKDEELGAVKKGISDLESEMKQCQARTLGEYFYKVDPVHEKRIRKRWTARQMYKDEFDTILQQQVKLGAIRDDPKFFRKLRKAIFRQRPLKSQCGLIGPCQFEKNEKRAPWHNLLAQEFRLLQKINDLRLIDPSTREERPLNAEERKILYDWLMEHGEATFAELRKKLGFNPRDGQKFNLEAGDETRLKGNEVAARLIAVLGEERWRGITDQEKAQLISELNSDITEERLRYRAEKVWGITDPERVDKLVKLTLPKGYCSLSKIALKKLVPLMREGKDYVTAAREVYGDLQYKNQTFDRLPPFLKVDRTLRSPVVIRTLSETRKVVNEILRVFGRPNRIHIELAREMKQSRIQRQKRYQTMRDREKMRNQARQSLQAELGWDPNDIKGRDIEKWLLAEECSWVCPYSGKPINYHNLFGEKAEFDIEHIIPYSKSLDDSFVNKTLCHREWNQKKGNRTPAQAFKNTPEWEAMLQRVRAFKPLHAVHMKKGESSKRNPKYDLFCMEEIPPDYVDNKLNDTRHAAKVAMGYLGLLYPKEERLKRVKAFAGGVTGELRKCWKLNSILGDPDSVEPKKNRADHRHHAIDALVLALATPGMVQYLSKAAAQQLACQRSIRGYQKFMEDPWPHFLEDVRKAVNAIVVSHRVDHRLQGRLHNDTLYSPPRVDENGKTYHVVRKPLDGNFKKVGDIEDPEVRRIVQEHLADHDGDPKKAFNDPDNHPKINDIPIHAVRVRDYVKPEKIGKDFCPRYALTDSNHHMEIIEEKDKKGNPRWTAIVVSRFEAMQRKIRGEPIVQREHGEGRRFVCSIASGDTFSYREKEDGPGIFARVRSIWKQNVEFVQINDARLKAEIKKENEWYVRSVNELRKMGFQKVSVSPIGEVYPAND

SEQ ID NO: 7124 - protein, 1010 aa, unidentified
  REGION 1..1010: note = Description of Unknown: Cas Enzyme sequence
HNAASTQQVVFPGDRIEAELLLLAQNAATQLPVLDHAYKKVIGEFLNDRRARIENINQKRAARAQARNQAPRLLSTENLPHAKNFAELFVYGPAGKPNLPNGYRNIALADASIARALVLRPGTDFDHQSAIGQKIPRFDNRILAHCALFPRFHVCKATPKIYPDNSVDADSLLPCEVTFLFKLKNLRVSRAGQVTSLTPQQIQTIFHHVRNTALSQLGAAQEPSAKALASKFSLTKTELTKWGKKPGMAFSLLPTQQEIEKPKFLGRSRFSKPALKIIKEIILSGKSPQQIAQELKAPNSPLAQQLQLKISPQSPMQGLTHHDLDILTKCGDSWDNFHIPDTTTDFLLSTNQNSSYPNQSDKDTLIKKYIATSNNPIIRHRLELFYERLRLHLEKYGKPDFIALEFVREDFLGEEAKKKIQKIQNENKKLNSQAAEKVEELKLAGRQSILKYKLWQLQGGICLYTGKPIAQTEIESHEVEHIVPRNHPQTQGPDAQWNLVLTAREINDRKANRTPFEWFQQDPIAFQWPMGQPDASIPSQEKQRLWEAYCDRIKQRKKNLGNKRVKLLLSDKAPELVERYETLATTATIARMALRITDILFDWQNGNDAQGNKRVRVFPGGRTAAIRRRYLLNTLLGADSDQKLKTITDLQSEISQIKAQWPSLQGEEHKPTRKAYYQKRRQLAELIEGTKKDRSDARHHALDAMVLTFLPTWAQHPNKDEFFRFPPPLDNPYPQRPDILKVHQFFRDALNNVIPTPLAFEKARLAETAYGFRIINNKKKIAQRVAVEKLAYPGQEQKFDLAYLEGQIPSIADEKIRSMLTEIYNNIKSKTLQEAEQTWKDECAKLRLKTRDGSPGPFIKKVTQITDFHREYKDLSKDGTGAYYKGGDRHQGQFIYRDARGEFTVHPVYVHESIPQVKKALIEQNKTICIFVNSGCLVKTAQPIDPANYRKIIYENNKPKRITPEHPLPSGIYKWRTIIESSTSVTLENVFGEEFAINFCHLCKAGIQRL

SEQ ID NO: 7125 - protein, 1011 aa, unidentified
  REGION 1..1011: note = Description of Unknown: Cas Enzyme sequence
IPWPLASHRLLSQKFSTSKRLQTSSTSPSRVPPAPRLPPDHQQLKTPALDPLPPAPASRFLATLETATTPTPVTQPPPSTSQRSLTTLVTFPIVSPMPSPTTIWAFDLGKGSVGEAVRDIETNQFLHVAALLLPPDLARRGRADQTGTPASRYRAWKVRLAHRERERWLDTVWLAAGLTPLQKREVWRNPATGRWELKHPADYRLEREFAPALGEKTKDGAPSDAAGANLCYTSCLLRIKLLRWKRGDPPLEEWQVYKALRSAMQKRGYGRVPWAVNQARAQGKTPEELEAEEQKQLEQADPRYREAAGKWPEFKRAVPAEFHFPCYYDAFHMGLWSPDQPDQLRLRPDHRAASTRNVRFDRADVRKELIALGNNAAAMLPQLQQAFARWQRDGWTFRHPVTREALTKPVRARTFGEFLCDGPAGQPDETSFEAFLNQRREAGIRIGTFEEWMAALGQKTPRFDNRIVENCALIPRLHVCKVAPRWRRNQNGDKELDPRSLLAAEVTFLLQLKNLQVDDATAGTVRYLNTDELNEWWKHACEKAANVPLSDTWERDVLDCFKITRAEWRRWCVSKNLLPVARERSEAAALAGEIATQSAEAASGDSGAEERSRGKSQDVVQAPKPTGRSRFCRPALAILRHLLLHREKPQDFAARLRNREPALLDALDFDVLDTAPAEERPTGNGKALKRYRKQQRTWLLTGDLDFLDHVWKATDRDGNPRDFEPHQLRIPDMTLRDLRKRHDLTETPYSDLLRQNSAELERRDKAILELIGQQKNPVVRDRLTRFWQRLKHFQNPVVPSDPKKQKPGLGLADPACLVLEFVRDDKDNSLEGRKRTEAIQQALRENEQRRDKARKALEQCGLPTTDDMVVRWLLREAQGGVCIYTSNEIRPADLPNLQIEHIVPRSRGGPDAFWNWVLCDENANAEKGDRVPYVWFKEEKTDEEWADYKRRVLARAAHLGRRKVDLLLRPDAAELAGEKYTALAESAWIARLAQTIARLHFGWPLDDEPGE

SEQ ID NO: 7126 - protein, 1026 aa, unidentified
  REGION 1..1026: note = Description of Unknown: Cas Enzyme sequence
MSKTIFGIDLGSNSLGWALLSANEHGQVDGIIDLGVRIFPKAVEDKTPTPKNQHRRTSRLARRTIQRRSRRKSRLLNYLVKLNLLPNELHGHLQPEGILNALGDPYELRARALDHDLKAHELGRVLLHFAQRRGFLSNKKTLLGRDMLDDPDVLTVLGDEDQDETDTSEETAFKADISLLRSEISAGGFRSLGEYLASKPVHECKRNRHDEHIRTDRRMYMEEIALIFSRQSGCNPVLSEDVQSEIEEIIFFQRPVKLKKDRVGKCSLETSKKRSALARLEYQRFRYHQDINNLSYFCENSDQWININDTDKDKLRVLFEATDTLTFAKIRKEIGLQRGSRLNLDTGVKHLKGNTTAASIRGALPSWDGLSKQDQLDLVEDLLSINKKSALKRRLMTHWSLSGEDALMLCLVELEPGYGQVSLKAINRLMPHLEAGMIYSDARVAAGYGYEPRLISVQATLGMPPELPNPIVNKGLHELRRVVNALIAEHGKPDIIRIEMARDLEMNTKRYKNFIAQQQKNDTMNRRATEAFRGSQTSINASRYPSRDQKIKYRLWLDQNHCCAYSGKTINLATLFTAEIEIDHILPYSRSLNDSYMNKVVCFARENQIKGQRTPKDAFGGDENKWNQITQALKKLPRELSTKRDAFYKVDSDLLENDFIGSQLTDTRYMSKVAAEYLKPLGSEITFTRGVMTSWLRKQWEFNGLIGSTAEKERTDHRHHAIDAVVTACIDRPLYKTLVEISRGLEKQRSGLTMNDVYIDPPISNFKEKLTGFLDTMIVSHVPLRKITGALHEETGVGFVENVGTVYRQRLDQGFTLKKAEKIIDPVVKELVQGHLEKHNGNAREAFAPNFKLTHRDKITLIKRVRVVQAKTTKEDLEKNKFSVKDKSGKVFKWHAYGNLHHVEILQNRSTQQYRSAFVTAAEAAARARGVNRVRQSIVTREHGDDWQLMMVLYINDLVEVTIEGKDNTYRVQSLDQDSSRLQLRLHTAATVTNSDEGIRKSVNTLLKDYQLKPLRLNALGKYRDD

SEQ ID NO: 7127 - protein, 952 aa, unidentified
  REGION 1..952: note = Description of Unknown: Cas Enzyme sequence
MAKKLGIDSGTNSIGWALIENNTILGMGSRIFPEGVVNLGEGEGREISKNASRTEARGQRRQIFRRRLRKRYLLKELAKNGLCPIEPSMIKNWNGAAIFNERKLKEWFQLNPYQLRAKAIKEEISLVELGRIFYHMIQRRGFLSNSRSAGADVKETSTIFKGDAKIGKTGISETLKSIEQHQTLGSFLHAIYPKENEPYSGELERIRNRYTTRQMYINEFETIWEFQKKYHTELNFNLKTILGGRKKDNYKEDGVLFHQRPLRSQKHLIGYCTFEPKKTKCNISAIPFELFRMYQWLNTLSYDLNGVKQNITTEEREKIIALLLAKEKPSFKEIRKTIGKLDPSYQFNYKDNDQIIGSHTISNLSNKKFFGTQWFEFSEKEQEDIWHVLSFFDDREKLKEYAIKNWNFNEEKAKGISKFNLKEGYSNLSRKAILTILPFLKKGFMYDVAVGFAGVKNVLGENWEQHKHFVFDNLPEIVRSNLKGGYIAPLKNMLQKEFNCTEKQLEKLYHHSSAIDIAEVLEKLPIGINADREIQKIKNPVVITALFEMRKLVNEIIDTYGKPDEIKVELARGLKSSKSNRYKTRKQQQVLEKENDRIKSELEKIHQNINHTNLLKYKLWEECNHTCPYTGKIITISQLFTGEVQIEHIFPWSRSLNDSFNNKTLCFADENRAKGNRTPFEYYSIQGDEKWEAIKLQALSCFKTKANYPNCYNKFKHFVQKKHDEDFISRQLNDTRYISKEAKNYLSKICNNVLVAPGQMTATLRHHWGLNSILNREDDTKTRDDHRHHAVDALVMACSTRSHLQELTQRNRYHKNHELKDFPDPWLNFRSDAEKAVEQILVSHKKQKNLLTVRTHSTKKNGIVYKNIGVAARGQLHKEFVYGSREAPNSNKAFHIRKPLESLTTEKHLGKIVDDAIRQLIIKKINQIGGFVKGKIPKETFFIIDENGEKKP

SEQ ID NO: 7128 - protein, 1252 aa, unidentified
  REGION 1..1252: note = Description of Unknown: Cas Enzyme sequence
MPVLLGLDIGSNSVGSAWTDTEKREIHLAVSVFPAGVDEQENKRGAPKNQDRRQKRSQRRSLARRAERKHRVRQLLTQHGLLPVQPEELGGLFNRNPWELRRRGLTEPLSRHEFGRVLVHLGQRRGALGVTTDPEDPDEGKVKDGIDRLDVLMEERNARTVGQLMADLMDERSQKIDPGPDTVCSRRTVQRRRNRTDHTKKGPIRNRQYRMPESDQLYADRKRIREEFDILWDRQKSFGGELAALLTDDLKRRLDDPRQDDTWRHRGLLFGQRHTYWDTRTLGRCDLEPTDRCAPRADRHASYFRVVETVNNIRIETRGEPQRPLTPDERDKLIRFLRAPLGQRKQKGKLVPKESASVTDIKRALGINPRDKSVKLNIETDKDREINTDWFHREIVHGAFTEHRWKAMDERQQESVNRAILKFDPDLDEDGNKLRAGAFQWWSLDEQAADRLVEAWKRRPKLEKRLNLSRRAILNVLPYMEKFDTHNERWPTQIEARKAHAKVLQERFEQSGECAYELAARRYATGALGLTAADRYYMRQQKHDIAPGIPALPPAPMLSNPVVRKAIHEVRRHLIAWIHKFGRKPDGIVIEFARGVKDTAKRRNAQLAANREREKERKQIEEDLRAWGIPESNWDRAVLRVRLCREQNGVCPFSLTGPNANRTISERMAAERADVEVEHIIPQRLTGRTMAFNNLVLCFREANRGKGMRTPLDWLGPDGVKAMLQRLENAPIKDNGIKWQRLQAPTPDEGDFRNSQLTDTAYTARQVAAYLADGLYDGQGLPERGGERKIFTTKGEFTARLRADWGLHESTVDRTHGLEAPPSPEELRADPHLEQASRRARKQPKDRSDHRHHAVDALVTACIGPELLTQVGRMARDDREYRERTGFWPRRQALPQPAPWLSIQDFHQALLAAYENVIVSHRPVKRRLVGAFHEDTHYGPVIGPLPGHRTEDIDTLFTNRISADRLTPNHLRVPEGWDALSAKLDDPKIAEGEKRAIRRQLAAMKDPKPGKSGIVRDRALRDRLRKCLRADAVNADDFKAADIKKLVAERRLTQASAVPIKGVVLLRTNTDPVILPRKRWDAVTSKMVVDDDPRTARVYISGKNHHIEIREDTKTVRWSGRIVTTLEAARRVRIGKGDAVNRCDIDGRRFVMSLAEGEMIHARRKDRPEEPPNYFVVCKLDKPATGQPRIHFAPHWDARKAPPSGKKKRTLQHQDRWDVTPADLQNCGPMPGEPPYKVRVTPLGEVIPLSDD

SEQ ID NO: 7129 - protein, 1035 aa, unidentified
  REGION 1..1035: note = Description of Unknown: Cas Enzyme sequence
MEGISSYVLGLDLGVSSVGWAAISQEDSGRPGRFLRSGVRIFEPGMEGDISSGRAESRNKKRRDARLVRRQIDRRKRRKQKLLHCLQKLDLLPPGEPAEFMPGLDRRLLEKFIPAGSDAVRFAHMLPYALRKHALDAKLEPHELGRALYHLAQRRGYNSNRKADAIEDTEERGKVLSGISELDQKIAHAHARTLGEYFAGLHPETDRIRSRWTSRKMYIDEFNAIMDAQSAFHPTLSPEVRNELFHCVFDQRKLKSVSHLIGKCELEPGQTRGPWLRLEAQRFRLLQKLNDTRIIYSDGTASDLTREQIDLLKNVLERQETLKFTQARKLLKITDRSAKFNWEEGGEKEFKGNTTAAKLCKVFGERWFELSDDDRRRIVEDIHSFENDAALEKRGRERWGLSKEAAVLFSKVSLEPDFCRLSLKAIRKLLPMMEDGVPYATALKETYGEFLRRTSLYNELPPVQQFFPSLLNPVVNRVLTEVRKVVNGIVREFGKPAAIRIELARDMKKTKKQRQEITARNRKNETKRSKARDAVIAEMGIAEPARDDIVKFLLAEECEWECPYSGRKITPRLLFGEHPQFDIEHIIPFSRSLDSSFVNKTLCYHEENRAVKGNRTPWEAYGGNSAAYDTIIQRVKNFRGDAAREKQRRFLLQDAGDIDDWASEQLNDTRYATVLAGKYLGLLYGGREDDTGKQRIFAAKGGTTGYLRAVWKLNAILSDGNEKSRDDHRHHAVDAIAVALTTPETIRMLSTAAANARLEQRHLFARTPEPWPGFWQQAKDAIASVKVSHRPRRKVSGPLHKEQICTCPRPDGNGKQCVHIRVPLSRLTQKQIENDDIVDPAVREAVRLKLAELGGETAKFTEAANHPVLRSKDGTSSRPIHSVRVRQNVAVLRIGPDDHTRYAASGSNHHMEIFDCKDDKGRPKWDAEVVTMFEAMRRLKAREPIVRKDHGPGKGFVCSITSGDMATIQDGGEEKLMVLSSVWVEQGGSKRVQYYSHTDAAAKKKMPKPSLSTLREVRFQKVTVSPLGEIRPAND

SEQ ID NO: 7130 - protein, 1110 aa, unidentified
  REGION 1..1110: note = Description of Unknown: Cas Enzyme sequence
MSEAKKIPYVLGIDLGANSIGWAVLDCEVKEDDQPEITDIRRAGARVFEAGTEGDVESGKDESRAKKRRSARLIRRQLNRRAMRTFDLYQRLQKKGMLPAIKPEEESLDAQRAARDPALAKLDREILKRWTEKLKKKGADEDAIRLLAKKLPYILRARALDEKLPIHELGRALYHLGQRRGFQSNRKAGKKDDEESGKVKAGIKELNEQITGARVRTLGELYARTNPEEKRIRQRWTSRDMYKHEFEEIWKAQNKYYPELLTDDFKKEIFDTIFSQRPLKSQSHLIGKCEHEPGNKRAPIASLTFQRFRILQNVNNLRITSEGITRGLTDSEKKKIISALEEEGDLTFGKIKSKELLGLKKRDKFTLEKGNQKGLIGNRTSLALKGIFKEKWEKLSEDEREVMVEDIMSMEDDDALKRRAMKAWGLNEPEAKDLSELELEPDYCNLSKKAMKKLIPLMENGNPYMTAVAKVYDPPPPEPEDSLIPVRNALKELRNPVVERSLTEMRKVVNAVIREYGKPEMVRVELARDIRNPRKRRKELNEQNKKNQKAREKARDEILKAIKNLKVSRRDELKYLLAEECNWECPYTGKKINVNSLFGMNPRFDVEHIIPFSRCQDNSFMNKTLADAEWQRNVKGNKTPWEACASDEEKYDRIIERVKKFSGDAKDAKLRRFLMKDEELKDYLSNFSSRQLNDTRYASKLAVKYLSRLYGASGLFKTEDGKMTVMGVDEKGRRRVQVCAGGVTAHIRNELGLRTIWNSILEEAYPKIDEEDETEESLQKESFEKERIDHRHHAIDAIAIGLASPSMVKKLADAAKRATKEKRRLYAKMDAPWPSFLDDFREQSNKIIVSHRASKKVTGPLHQETYYGKPRKDEQEKLYVHKREKLETLSAKDVENIVDPIIKQTVKKKLNELGGDAKKFKETANHPFLKTKDGRKIPIHKVRIKKYVTTEKIGTGPKERNVIPGSNHHIEYFEIKDKNGKPKWEAVIITTRDSMQRLREKKPIIGKDNSKGGEFLFSLSQGEIIELDEMDANGNKSGTRGMYVVRSMSYVRQGGKLYPNIAFVRLNDARLKKNIEKTGDFKTGLPEPLRKLNLKKVSIDPIGQIRAAND

SEQ ID NO: 7131 - protein, 995 aa, unidentified
  REGION 1..995: note = Description of Unknown: Cas Enzyme sequence
MKGFTLGLDIGSKSIGWAIVGNGKKQSIIDIGVRVFPEGVDRDTKGSEKSKNATRREARGARRNRRRRNLRREQLVKNLRADGILPDDNKALEKLLEKEPYHLRANGLNEKLELFEFGRALFHINQRRGFKSNRKTGKAKEDGKLAKEAGELQKKIEAAGCRTLGEYFSSTNPEENRIREQYTFRSMYEEEFDKLWSKQAEFYPDVLIEDLQKKIRDEIIFYQRPLKPTDDLIGECELEPGEKRCLRGDWYARKFRLLQDVNNLRIYNLDGTGQQLSPEQRATIVETLEKKKELKFDDIRKKLNLIKTQEFNLEQGGKVKSIKGDAFSAGMRSKNAFGPKTWDAMDIAEKIKLNEWMVDLDDDELIEKMISEYRFTEEQADRVLKIPLPQRYMSFSRKAIQRLLPYIEKGAITSEAIEQAGYKRDTLSKEEGLDELPLPEDLRNPIVNRGLFEVRKVVNAVIREYGRPAGIVIEMARDVKGSLREREEIQWKIRENEKRNEVARTRLIQDMNILNPSRDDIIKYKLWEECGKRCPYTGRVISQTDLFGSNPVFQVEHILPYSRSLDDSYMNKTLCCVNENRIKGNKTPYELYSGDEEKYEQVKQQIKVLPWPKRRKFLQKERNLDECINREMNDTRYICKEVVKYLKLLGVNVRGSKGRITAELRHQWGLNSILDLSSSDMKNRDDHRHHAIDAVVTAVTKNEHLRRLAESKYSKTESSFSEPWADFREELAEKVKHINVSHRVRRKVSGQLHEDTSYGLTGEKDDKGQEIFVYRKKLEDLTIPMVAKIVDPVVRQIIECRLTEHGINLSKNQKISKEIWNKPLYMNNTKSNKIVTIKKVRIRDVFNNMIFLKDKEDKTYRAVAPGSNHHIEIIEYANKNGNIKRDGDVVALFEAVRRNKNREPVIKRDHGIGKKFICSLAMNEMFMLELDNGERELYRVQKIIQDGRIVLRLHTYAGKVGDYDKPPIIQRKSPNTLKGHKVTVDMLGRVHLAND

SEQ ID NO: 7132 - protein, 993 aa, unidentified
  REGION 1..993: note = Description of Unknown: Cas Enzyme sequence
MSFYTLGLDIGSHSIGWAILDTGKKPSILDIGVRVFPEGVDREKGQEKSKNATRREARGARRVHQRRNLRRDQIVKTLRSAGLLPKDDKELNEFLNEKNPYELRKKGLDEKLDLYEFGRALFHINQRRGFKSNRKTGSLKEEGQIAKSAGELQSVIEEQGCRTLGEYFAGLDPEEQRIREQYTFRSMYEKEFDLLWAKQFEYYPEVLTDELRKKIRDEIIFFQRPMRWDPDTIGDCQLEDGEKRCPRGDWYARRFRILQDVNNLKICNPDGTIETLTPEQRKIILDELNTKKEVRFSTIRKKLGLLETQQFNWEYEINEKGKKREKLKGDEFASTMMGKKVFGRKKWEDMSEGQKIKLNNLFLESEDNDELCTALASEYKLAEEKAEIASKVKLVSGYMSFSRKALQKLLPLIEEGKRTDEALDIVYSERNKTNEANETDKLDFPEDLRNPLVNRALFEVRKVVNVIVLEYGKPKKIKIEMARDVRGNARQRKEIHFKMLDNKRRNEQTRKRLIEDMGIANPSRDDVIKYNLWIECGKVCPYTGKAISQEALFGPNPEFQIEHILPYDRSLDDSYMNKTLCEVYENIHVKKKQIPYETYSGDTERFEQLKQRVNRTAMPYWKKQKFWQKEIDTDKIISRELNDTRYINREVVKYLKQICSNVSGTRGKTTSELAHQWGFIKDRDDHRHHSIDAAVIAVTCPEHLWQLGKSKYSNGTVSFQPPWPHFREELAERVKHINVSHKPRRKVSGALHEETNYGPTGLKDNKGQDVFVYRKKLEDLTVPMVSKIVDDTVKGIVKSRLVEFGIDPNKKGKERNISKDIWAKPLYMKTKKSKNKIPIKKVRIMEVLGNPEGIKDKNGKTYRYVKLGSNHHVEIWEYTEGEKKGKRESVVVTMFEAVRRSRNGEPVVQRNHGPGTRLVCSLAINDMVMMKNKAGGTDLYRVQKMDANKMVRFRHHTAATIDKKETYIDKTAHLFDGYKVTVDPLGRIHPAND

SEQ ID NO: 7133 - protein, 1153 aa, unidentified
  REGION 1..1153: note = Description of Unknown: Cas Enzyme sequence
MNKERIILGLDIGVGSVGWGLVKLTEEKYYDERTDGTSQERYRITDGKIIDAGIRVFQLPQDKEGKSLAAKRGLARRSRWTIRRKAKRLKKLLNLAREFDLIGNNFNYDEVLKPKKRNNKDEKWDIWRIRKEALERKLTDTEFFRVLYHIAKHRGAYFHTKAEFLPEEDEKELKKNKTKEKEGNKKENEKEKVKNGLRKIKKMLRDRKYKTIGVLFYETFKQANSKGNNRKRNAPDKYEHSIHRELLCDEIVEIFKEQQKYGNTKAKEELRLQYIDNVLMYEEPIDEEKLRKMMGKCEFVPGADLAPKESYTAEKFSLFNRLNTLAMVDGHNKNNLQTLDAPQRDKIIALAYENAGGVTFTQIRTALELEDKLHITFNLCYYAEKNPEYNKKLKCEIKNGQLQFEEKHSLPIVNIDTGEVETLDKEIKDIFIKKFNPKYKKIYLYYSDIRKQLNLSDNFRFADLKGYTNSIAELKRENEEKNKNKKNKKPFNGEVEYIKQFENDTFIELKGYHKIKNAIEKNCSEEKWQQIRENTVKLDTIAEALTYCKSDETRANYLREHNINDKEIINAVLTINMKQLARYSIVALSNLLKYMESGALHNDAKEKCGYGKIDHKKQTILEPYKGFFEKNPVVARVISQTRKMTNAIVRKYNDKYPIDQIHIEVATELANSEKRKNEISQGQRRYKEAKEAAEERCKEYGLDPEEGQNLLMFRLAEQQNYFCTYSSKKITLHSTGAVNEVYIKDCEIDHIIPMSRSFNDSLNNKVLCAPEANQNKRDRIPFEWFEKTYGKDSQQWRDFENTIKKMYGVPYPKRKNLLRKIWTEKDKEKFLSRNLNDTRYAARHITDYLREYFDFSISERDDIKEVSRVKVRSGGVTAFLRYMWGLHKDREANDLHHAIDALVVACSSDGHVYLVSNLSKEIEQKGKNWYKHFDFIRNKFKPWATVREDIQSKANNVFISRMQRHKVTAAAHEDTVRSLTEVSENKRIIKVNKGYAKIGEMVRADIFTDNESKNYVVPIYATDIFANKPLPDKYVPDNRLLPYEQWPGVFDKGLKFKFSLFKDDLISINDKKFKDKKFYVSFFESTTTNVNVKNIDGSIFPDKKNAIDPKTKKITYRPKRGKCILKKYSVDMLGNFKEVVQEKRQCNRFERRL

SEQ ID NO: 7134 - protein, 1172 aa, unidentified
  REGION 1..1172: note = Description of Unknown: Cas Enzyme sequence
MKILGLDIGTNSIGSAWIDTDKKLTEMGVSVFPAGVEESETKRGAPKNQARRSQRQQRRSIERRAKLKRRLRRYLIKKSWIPTEKNKLQEWQNLNPWILRKDALHRELNELEFGRILLHFAQRRGAWWFDEEPEETEESKKKKKDPTETPGTVEYTKAIMKRKGAETFGKLIAIEYENRKTITVNNKTRNDRVRNRANAFGEKESEFVADRHVIIAEFLKIWEVQKSFGGQLAKQLTDDCKKEIYNPKKTETWRCRGVLFSQRKAYWDLGTLGRCDLEPTDMKCPKADMYAQEFLVLTSVNNIRITPPMEAGRKLTKEERGKVINAVRKQKTATESTIRKALGIDKGANKTLYTLNTDGDKFTVNGDWFYSQIICGVFGEEACLSFDDAKKDSVNRAVLKFEPNEDSDIEKLTAGCNKWWKLNDKQTKNFIAAWRKRPAKESRVNLSRKAIKNLLPYLREGWSVTEARNMCAGDASNDADDLTRRRYSTGEIVINKRIKHFQKKHPNLLPPVTEGISNPVVRKSIHEVRKHLVEHIKQYSCPDRVTIELAREARQSEKVIADRMRKNKAIDALKKEIVETHKLNAPDISRTQRERAIKRVRLCRQQREMCAYSGITITDAMAADGSGLEIDHIVPRSKGGDNSFSNLVLCFATANQGKGGRTPIDWLSEEQFGNVKKVFKHLHREERKKSREAVTKDNVDMVNEAKWKNLNRKTPKEGFTEEQLRSTAYAATQTTEWIKKVLYGSEGRGKRYVFASKGNYTGILRRDWGLYFDEGGERSEKGRKIRSDHRHHAVDAAIIAMTTQCLSKIKQSFVNFEKQKENKNIKPQWKTIEQPWEGFSEQIAEEYKKLKVSHRAYNKQIAGHLHKDTIYGPAVIYEKHKKDKNGNPILRKGLYVKSIPTIGIKQNHLRMPNGWDKSKEEYKNATTKSERKAIRKRMLALEDVPPKKAGIIRDIELRDKIRDWLEEHNFSDMEKAKAYIKENGLIINGTPVRKVRVLWKLKEVKEIPRKYFNFETDKIVKDDNYKSLRVYQTQNNHHIEIREKKNKKGVVKWSGEVISNFDAARRARARKKPIVDRNENKNGKFVMSLARGEMVHMRHPDTKEANYFVVFKIDSSKAIHFTTHTDANPAKLREDIPLVPDRLHQYIIFDENGVPKKVKISPLGNVKVLVRD

SEQ ID NO: 7135 - protein, 987 aa, unidentified
  REGION 1..987: note = Description of Unknown: Cas Enzyme sequence
MSSYTLGLDIGSNSIGWALVETEGKPSIIDMGVRAFPEGVDRDTKGLEKSKNATRREARGSRRIHRRRTQRKEQLLKTLQNIGFLPVDEHELRSLFHSNPYELRKKGLYEKLERYEFGRALYHINQRRGFKSNRKSGKAKEDGVVIKEATALQKEMDAKGCRTIGEYFAGLNPEELRIRGKYTFRSMYEEEFDLLWAKQKEFYPEALTDELRKRVRDEIIFFQRPLKPTDELIGDCDLEPGEKRCPRGDWYARRFRLLQDVNNLLIQDPDGSERKLSEDERKILLESLSNKKEIEFNKLRKLLGLIETQKFNLEQDGKIKKLKGDGFAAAMRSRKLLGPKVWDEMPEDEKVKLNEWLVELEDDELKEKLSSESKLNEGQIETALKVELPRGYMSFSRKAILKLLPFMETGAITSEAIKEAGYKRDDGNIREAVETLPLPQDLRNPIVQKALFEVRKVANAIVREYGKPGKIKIEMARDVHGNRRQREELHWKILENEKRNNEVRKRLIEDIGITKPSRDDVIKYKLWEECGRICPYTGKQISQEALFGKNPEFQIEHILPYDRSLDDSFMNKTLCETHENKDVKRNQTPYEAYSHDTDKYEQILERVNKSQMPYPKRKKFWQKEINLDEGIKRELNDTRYICRETMGYLKQLGVYVKGTRGKMTAELRHQWGLDGVFDELGTRRDDDHRRHAVDAAVVAVTENEHLRRLAQSKYSVSGESFEPPWPDFREEVRENVKQINVSHRVQRKVSGRLHEETNYGPTEKQGLYVFRKKLEDLTLPMVEKIVDPVVSGLVKGRLLEKGVNLSGGGKPPKEVWKKPLYMKTTKSNKKVFIKKVRVYNVAENVIPMKDRSGQSYKYVEPGNNHHIEIFEFTDKKKKTKRDGRVVTMFEAVQRKRRREPVIKRDYGDGKKFICSLAINEMFMLELDGGAKELYRVQKISQNTQIFFQPHIFGGDLKNHSPISKMPNQLKGYKVTVDPLGRTYPAND

SEQ ID NO: 7136 - protein, 997 aa, unidentified
  REGION 1..997: note = Description of Unknown: Cas Enzyme sequence
MTSYTLGLDIGSRSIGWAIIDKINKPAIANMGVRIFPEGVDRDTKGLEKSKNFTRREARGSRRSHQRKNQRKKQLLTMLQNAGLLPKSETELTALFRYNAYQLRKKGLNERLELYEFGRILYHLSQRRGFKSNRKNRKSKEDGIVIKAASALQTDIDNKGCRTIGEYFAGLNPEEQRIRGQYTFRSMYEKEFDLLWSKQKEFNPELLTETLRIKIRDDIIFFQRPLKPSDELIGSCELEMGEKRCPRGDWYARRFRRLQDINNLIIQNPDGSENKLTNDQRNILIGDLCQKEKMSFDKIREKIGLMETQKFNLEQDGKIKFLKGDIFTAKMRSKNVFGSKRWGQMDEQEKIEINTAFLEFEDDKLIEKMKTKYGLDEKQIDVAMKVSLPRGYMSFSRKAIIKMIPFMELGCLTHEAIEKAGYERNRSTNAESVQKLPLPSDLRNPIVQKALFEVRKVVNAIVSEYGKPEKFVIEMARDVHGSRRQREELHWKMRENEKINEQARKRLIEDIKIDRPKREDIIKYKLWEECGKTCPYTGKHISQTALFGTNPEFQVEHILPYDRSLDDSYMNKTLCEVHENIHIKKGQTPYEAYSNNPEQFEEILERVNKSMMPYPKRKKFWQKEINLDQQIARELNDTRYICREVVSYLKQLGIYVKGSRGKITNELRHQWGLDGIFDELGSRRDDDHRRHAVDAVVVGVTENEHLKKLAISKYSLTGVQFEQPWENFRDEIREKVKNINVSFRVQRKVSGALHEQTSYGPTGKKDENGQDIYVYRKSIDALTVPMVQKIVDPVVRAIVKNRLMEKGIGIDDGDRKIPKEVWNEPLYMKTKKSDKIVLIKKVRIADVFKKMIPIKDKSGNPYRYVAPGSNHHIEIFEYKDKKGRTKRNGNVITMFEAVRRSQRSEPVVQKDHGPNKKFIFSLARNEMVMLDIGDGKEILHRVQKIIQDGRVIFRPHTFGGKLSDSDQPPSIQRKSASTLKGYKVIVDPLGRIYRAND

SEQ ID NO: 7137 - protein, 1069 aa, unidentified
  REGION 1..1069: note = Description of Unknown: Cas Enzyme sequence
MKRTQHAPARSGNLVLGLDIGAASVGWALVEYSNGQPTGLKAAGVRTFPAGVEGDAGAIASGRDVSRAVKRREARSRRRLLARRRHRLTKLARILQGAALLPAGDLDSADALGSYFPALDRQLFPLDARRANPHLLPYKLRARALDEPLSPHELGRALYHLAQRRGFLSNRRVKPKPAGVKQSDEEKEEGIVKAAIGELAERIEDAGARTLGEYLSRLDPEQERVRNRYLSRGMLLDEFEAIWTAQRAHHPAILTDDLKEKVHRAIFFQRPLKSARHLIGKCDLEKGKRRAPLACLSAQRFRLLQKVNDLQLFLPDGEVRDLTPEERARLLDALQREGDRTFGAVRRLLKLPRGSKFNFETEGEKGLIGNRTARKLADVFGEDRWAAFPPEERERIVNELRSLHNRDALKRRAMKLWRLDEEAAERLASVALEDGYCNLSRQALAKVLPLMEEGMQYATARKQLYGDQPGPRRLLALPRLETALEVRNPAVERALTELRRVVNAIVREHGLPAYVRIELARDLKRNRKDRKEISLRNAKNRKGREEAARKIIAEAGIPNPRRSDIEKWLLADECGWQCPYTGKQISVESLFGDHPQFDIEHIIPFDRCLDNSFMNKTLCEVAENRTRKGNRTPHEAYAHDEENRERIIARVKQFSGRSGRVKLERFQSETVPGIDDFATSQLNDTRYASKLASEYVGLLYGAAADGVDPDGTRRVQAGRGAVTAFLRDEWGLNSILGGGEKTREDHRQHAIDAVVTALTTPAAIKRLSDAAARAPEARRRRFAPVEPPWPGFLEDVRAVVGGCVVSHRAGRKVAGALHNDLSWSPRRRDSEGREWVHQRKPLARLSPREVASIVDDSVRQCVQAKLDELGIPDPKEAFKSENDHPALLSTPKRESGPRPIPIHSVRIRKPDPTVMIGKGVRRREVMTESNHHIEVIETTSPDGKPKWQGRVVTVLDAMHRLRSGQPVVQRDHGAATQFKFSLTRGEIIELDAEQGKKELYVVQKITTRGKGKGERCTVGIVGINDARPSTGKDKHHVRDLQEPSPDVLRKRRCRKVLVTPLGEVRRAGD

SEQ ID NO: 7138 - protein, 979 aa, unidentified
  REGION 1..979: note = Description of Unknown: Cas Enzyme sequence
MSYTLGLDIGSKSIGWAILRDTPKRSIVDIGVRVFPEGVDRDTKGAEKSKSATRREARGARRTHTRRNLRRDTLVKTLRENSLLPERDEDLRKLLSERDPYQIRARGLDEKLELHEFGRALFHINQRRGFKSNRKSGKAKDEDEGKVAKEAGELQQHIKEAGCRTLGEYFAGLNPEQQRIRDQYTFRSMYEEELDKLWKKQSEYYLEVLTDKLKEKVRDEVIFYQRPLKPTDELIGMCDLEQDEKRCPRGDWFARRFRIMQDVNNLRIHNPDGSEAKLSQEQRQILLKELVQKKEIKFDRIRKILGLMETQEFNLEQGGKVKSLKGDVFNASMRSRNVFGAKRWDSMDEQEKIELNDACLELDDDELREKMIDEYGFTEEQAERVLKIPLPQRYMSFSRKAITKLLPLMETGALTPEAIENAGYKKAKQSKQSLDKLPLPEDLRNPIVNKALHEVRKVVNAVISEHGKPGRIVLEMARDVKGSKREREEIQFKMRQNEKWNDEARTRLIQDMKIRNPSRDDIIKYKLWEECGNTCPYTGKHISQAALFGPNPEFQIEHILPYNRSLDDSYMNKTLCYVYENIKVKGEKTPYEAYSHDEEKYEQIKQRIKVLQWPKRRKFLQKEINLDECINRELNDTRYICKEVVRYLRELGVSVRGTKGRITSELRHQWGLNNILDLSSSDMKNRDDYRHHSIDAVVVSVTKNEHLRKLAKSKYSKVSSSFPQPWPYFREEVEEKVKHIDVSHRVTRKVSGALHEETNYWKEENGPHAGKFITRKHLDGNFTKNFAEHICDETIKKLVLERLTDHEYEPKKAFAEPIYLKNKAGDPVPIRKVRIWKKSKTMEKIRGNIWVEPGSNHHIEIYEYTDGKKKGKRDGEVITMFKAVRRKRDGEPVVNREHGPDKKFICSLSINEMFMLEFDNGEFDLCRIQKMSQNKTIVLRPHTFAGDLKRQKPINKSPNSLKGYKVAVDPLGRIHRAND

SEQ ID NO: 7139 - protein, 1017 aa, unidentified
  REGION 1..1017: note = Description of Unknown: Cas Enzyme sequence
LSLFDTVTKLFSKTHVRKFSACEHSKTGASLNKPRRLYRGSLRNTDRRQYRKKHIRKLLAAYIPAKLRDYKNLYDHYELRVAALDRSLFNFEARIVLAHLAKKRGFKSSRKDKKDEAKETGGTEVKKEVVGKDGKPKKPKKMIEGADYLGKAVKASKYRTLGEYLYHQPRRKNHPEHYDFTIHRSLIDEEIDKVFAAQRKFGNEYFSKELQEKYKTAFHWQHPLPSHYDKLGKCPYEPDTIKAPKYSPTAELSVVYQDLNKIRLVDMFYNKTQLTDDQRQQVLDALYKNKSGISFTRIRNLLKIPNDQSFNVITYTASKKLRASKKNGYPTPDEIQKECEKKSFGMLKGWHAIKNAITEADTSYWETIKDDFKLLDEVANVLHFEGEDKGVIESLHDFGIPLTVVMELVKVVHLSDTSGLSLKAHYKLLPLLKRGVAYATATKEVYPPVDRQFQDLLPVFDKTNNPVVDRAAAELRKMLNAFIRDNGMPDEILIRMDRDLPRNKKLRDKISKENTNRRKEKDDLYQEATNFFGRRPTGEDFEKYQLWLEQDKKSIYTGKTISEGFLKDPMKTEIDFILPISRSHNRTWDNKILAVSGDNRFRNDKTFYEAFHDTKDWDVIVKMAKTLSVEKARRILIANFDERVYRDWQQRHINDSRYAVRHIKEHIEKHLDVKVDTRKVAALSEIKWAWKIETNRSDIDYAMDAMLTAASDKKLVHEIACYNKYNNAKEPDLKRSVHIRTQIHNASTTALITHTPKRKMRGPAHKDTLMGIEKALGDKQGCGIKRIPLTQLNAKNIDSMVLATKNPSDPAYKLIRKRLEDHKGDGKKAFKDNPIVVPSKKGPGLPVHTVKVYTNDKTGLYLKDGRGFYANANILRVDIYKKDDRYYGSAIYGYQFAGKGGLPDTLEIKGKTLEANDYYCSIYPDEYIETMDYKGVVQRGYLKGGIDIETQQIRLECPYGSLIKQLIKGKNGNPDTYKYKKSQIRTGIKQAKYIKIFEETYSGEKFQRKSFTRDLQK

SEQ ID NO: 7140 - protein, 997 aa, unidentified
  REGION 1..997: note = Description of Unknown: Cas Enzyme sequence
ASRARKAKAKRTPLPENESEQQPAVASDDGKEDPKKVKAAITKLGQDMERAIPDPRFRTLGFYFARHVNPEEQRIRGPGRWTGRLEHYEPEFKAICDAQSAYYPALAENGDGRRELHDAIFFQRPLKPCGHLVGHCDLEPGRKRALQAIPLAQRFRLLQKVNDLAVIEPSGNSRPLRDDERARLLTELSTRDHLTFHQIRDLLQLQKARRRKDPKTGKMRVVDPGHTFNFERPPAKDITGHRTAAKIISCDEKASGIAQCWDDMSDRQREELVLALLDFEDDQPLAEHLADRYGFTDDQAAVLSRVQLEKSRCSLSRRAMARLLPFMEDGIPFATAKEQIREYRAKFVRQTVALDSLPRVLATDHKHVAERDGQNRAFKNARDLRNPAVTRALSELRKVINASIRRYGKPERIHVELGRELKGSPKQRQATSKRNAERRVDRDRARQQIVDAEVGWSDPSALPDSEVQKWLLGKEQGWHCPYCGESMPKASTDLQVDHIIPRSISHDNTMLNKVLCHAQCNSRKGKRAPCQAFDQEELHRIAKRTVSLPPGKRRRFQWTEDDIHDYYADESGGFTKRQLQDTQYASRLAGEYLALLYGGVIDDSGVRRVQVSSGGVTFSLRREWGLNAVIPSLPDSPAYTAAPEIRLDEKLRTDHRHHAVDAVVIALTNRKTIELLSDAARRVELAELHRQDVRDSQGRRRTSYAEMKAPWGTPESFFASVKDAIARINVSHRPERKLSGPMHDETNYSKPFDHGKRGEEHRTRRALKDLKKSEVEQIIDDGVRKAVQASLQGGEPKAVFTSESKLPVLGQTPDGKDVLIKSVRISVKAKPVVVRDKSGRERYVKPGSNHHITVVGILNPDGTERKWEQGEIVSRLDAMRRWRDKQQVIRTGSRVGTRHVFALQPGDMLQITRPNEPQRLFVIRSISNKRIEYVSANDARKKDASKTEDKKNTIKGAKEWFVMTTIDYLRQWHAKKVTVSPIGDIVLENKNHRSAND

SEQ ID NO: 7141 - protein, 906 aa, unidentified
  REGION 1..906: note = Description of Unknown: Cas Enzyme sequence
PFYRHFLAATTQTKHRVVVTSCYCSTYNRTAVIKNFFSLNIERDKEREINTDWFRREIVRGVFGEEAWAKMDDAKRESVNRAVLKFDPDSPADMERLRIGAAKWWGLVPGAADRFIEAWKTRQRLEKRLNLSRRAILNLLPYMREWGCGVTVARQLFAEDGENGATPEQRQRYALDGSVLTKAHRRFLQKHPDLLPPAPMLSNPVVRKAIHEVRRHVMAYLRKFSRKPDRIVIELAKSAKQTEMVRNKILAANREREKERKKIIEEFGLASKPLNQQRAAVERVTLCRQQKGVCPFSNLTPGSEAPHITDDQAKDGRDVEVDHIVPLSRSQDNYQNNKVLCYRQANRGKGNRTPKEWLTAEQFSLLEQHMAHWEKEFPRKWENLHRDPPPEQDFLASQLTATAYAAKQVGAYLVAALYGGERDGRRSVFFTKGTYTAMLRKDWQLFQTLKVPEGESDETAAPDPRKGGKPGMKNRDDHRHHAIDAVIVAMTGPEIIQDVARLAADREEYHERTGYWPKRIALPPPWGEVKDFRRQVLSQLFGTFDNANEDGTRAQGAESGTPLIVSHRPVKRKAKGYLHKEDLWGAVDEKEGVFRKRCPIADLKPKMLRMPVPETDSQARKRLAEDLHDKKGLALSEARKVARERVRRRDFERQSVDPALGKGGLVRDWELRRIIRECLTANGIDPDGFTEKQMKEFAKTGKVRMPHSGVPIRTVIIKGPISDPVKIAVRDPNTGLQAVNSRTGKPLFRYHISRNNHHVEIMQDKATAQWSARNRKCVTMYEAAQRVRPPKHRRGKGPKQPSAVNREDADGQTFVMSLSEGEMIHAKRPDRSEPAGYFVVVKLDNNRIHFASHWDARPESHAQPERKQDRWSVTYSALKNCGPDDNTPPAKVRVSPLVRVVQVHHD

SEQ ID NO: 7142 - protein, 1806 aa, unidentified
  REGION 1..1806: note = Description of Unknown: Cas Enzyme sequence
MKKILGLDVGTTSIGWAIVEATNDKKANEKTGEIAVTDINNDRIGIYKDAVGVRIISQDTERFDRGLTLNDPKGSTLTPTATRRKYRGSRRMKNRYKLRRDKLLYVLEAIGIKPDGSFKLEIYNEEKRRWKDEAKNSKWYSKEKEFFINSKGQKQRKKRREGDIGEQLYKLRNDAINNPIDLQDLGRILLHFNQLRGYSSDRFSKEEKPKFDYYIAEVLEADLDNKVAITEGDNKDEIKYYKVAVKLKFEEPFNIADEENKQFITEISGFTFKKDINFKPGDFVTIKKPEFKQDKKGRNIVAEYYKITFTTPDPIDWNYRYQELQKNLSEWCETGGTVGSYFYKFFYDDATPKEHRLNRIRNNVVNREWYERELDKIWNIQYNNNKVFFDNLSIEKIVKAAFKDYQPILNEVLKKDGLKEQLKYLIKDKIIYYQRPWQQAKNKGQCPFEKILIKKEAVIKGTGNKELVEEYVGRTVTPRSHPLFQEFKIWQQVNNVRLFLNTTDAKVDLFNNEEEFTKQTGKQIEEVKELLYNALKNSKTLSWRVFVKEQLGVQNVFDELEDQTNKRKPKKGVDTETGETSDAYFSVNFRKRKKDGTYEDIKLKGNTTKSELQKILYDKDDHWFNQIHSDKQSISNLQLLWEIIYDITNADETKVSEIIEKHFGFDKNICTQLANIKFDDAGMGNLSAKAIRQILPLMSNGQLITEKASKRIRSIIALNTIEKEKQTDERLEGLKNFIPDKKARLRLSKLQTEQDFKYLNYWEATAVVYGSHSVKNTQIQQEIKRVKSNSMNNPVVERIVNETISVVNEIYRTYDFDEVRIELSRELKASMDERQQMWEGMIDGATKNEWAKQMLREAKQALLEDNRNVENLDTEASNKNNIDKIKIIEDVVKYKKPEEYKNKSKKYKLNEPTKAELKKYLLWLEQNFKCPYTDQPIPFTDVFARGKVVEIEHILPRERYYLNSYANKVITWREVNQVKQNNGNRTAYEFIVSKRVENTVKVGNKEIPIVAASEWESHVKSMFPKGGKRANLLRKEIPEDPIERTLKETQYINKKLKEKLSELVGNEKVWVTSGAVTDILRDRWHLNNVMKELMRNRFENFEIPTGKKSFKIKTLEEQEDMLKQIHEGLTGEFKIFKIPTGKKYIEIKEVDELKKISDELENTIKENQSIGGKKVKAFEYSTSEETSETKNLTHVTKHYNSKTEKWEDVEVFEGYSKRLDHRHHALDAIIIACTKQNHIQYINTLNAINTADIEDDESKKVKYNSIKNDVCIGNSSKGFKTPWDENKFIPEIKKSLEEIIISHKNTRLLISPSKHRTAKEIQSGKIASIRGELHKETNYAKRNYFEGGKTDVVKLIPLLFKKRHENQLQTMVHQKSFEEIIKETVLKEKYQDILIPLFKKYDDILFNDKLVKESGKQVLREIQNDNLLLDIMTGEPIKWLSTYSEKDKSSRPLGLSMNLNNEKEVRNIADPRIKRLAEYRLNYVNEQIASIDKLDRDKKEKDSLKARAKELKLYSNAIYEVRVKKNENSFEWIELKYFNSSDFDKISYAKPETTRQVKEKLTKHGLSELKKTYFKNPIFLSEKPIEVKKVRQKSYFQNLFEVTPKRYVQIEETFMTYFFKEKQGGDSSKIKVIKFLKFIDAINIINALKPDSIDYKKLIEKEKSNEELQNGVEYDLIFTLVKNDLVYLPKAELTEEQIKEINWGDKKELVPYLYIVKDMNPSLNTIVFQQFYKADTIEISEADAKSIFKNPDLKKQVEEIKYGTVPMLQHCIKVFTDKLGKKIIPYWEFPNGCWDEDAAKRVGLIN

SEQ ID NO: 7143 - protein, 919 aa, unidentified
  REGION 1..919: note = Description of Unknown: Cas Enzyme sequence
MSKILGLDLGTNSIGWGVIDGESIIDIGVRIFPEGVENLGEGENEMSRNASRRGARQIRRQYLRRKLRKLMLLNELNRNGMCPIEKNEIQTWADTGKFPETPAIREWFKPNPYHLRSLAVSKPLSLHELGRIFYHLAQRRGFLSNSKSAAKDEGKIFEGEAKEGKTGINQTLNEIAGKTLGQYLASIHPNENEPYQKDLPRIRNRYTTRQMYVDEFEQIWEEQKKHNKKLTPELKETLGGRKKDGYAKDGIIFFQRPLRSQKYLIGNCPLEIKKTRCPASHPQFELYRALQFINGIECNGEKLSQSDKQKVLELLLRYAEPKFSKVRKILGKEDQGFHFNYQDDNICHGTYTTSQLSSKKLFGSKWFDFSEKKQDDIWHIFFSFDDAEYLAAYAKKHWAFDDEQIPALIKTWKNLDDDYSSLSRKAISNLLPFLKSGFTYDVAVALGGVKNAFGNHWDNLGDKNKEFIINKVVTLVRSATRGGFIDQLKEFLKTEFVFDETRFKKLYHHSVNIHASEIIPKLPVGKEADREIMSIRNPVVIQALFELRKLVNAIIDEHGSIDEIKIELGRDLKLNKEKRQEIRWEQTKLEAVNNYVIAQLREYGQRITHENILKYKLWEECAHRCPFTNKEIGVNQLFSGEVQIEHIFPWDRSLDDSYLNKTICFADENRKKGNRTPFEYFTQDFGADKWEEVKTRLIKIFYDNKTYDKNNPITYTPNRYRKYKRFIAEKFNDDFIQRQLNDTRYISREAKAYLQKVCEEVKVAPGALTANLRDKWGLNSILSDLDEKERTDHRHHAIDALVMACFNPAHLNEISKWNRYNRAYDLKDFPLPWKTFRDEAEKKVTRILISYKKSERVLTVRNTKTKRNGNVYINKGIAARGSLHRDFVYGKRTPTDYATAYHIRKPLESINTKTHVEKI

SEQ ID NO: 7144 - protein, 1039 aa, unidentified
  REGION 1..1039: note = Description of Unknown: Cas Enzyme sequence
MAYNLGIDIGIASVGFAGINLGNKNILFCGAHIFEAAENPKTGASLATPRRTKRGMRRVIHRRAVRKKAIRSLLAGHGLKDIEAIDAPEAAPPGKTVWELRKEALERKLTDAEFSRVLFHIAKSRGFQSNRKSAEPNDTEGKKALSGAKELQEAMTRANASTVGAYLAALPKKRNGDGSYERFVTRDLLREEIRKIFTAQRKFGNENASDKLQKEYAETAFYQRPLQSSEHLVGDCYLTGEKRAPKFSYTAELFILWSKLNNAKIRDMKGNERFLTQDEKNRLAEKAHALKSVSYKQARKELDLPDEERFNIGYRKIKDEDNSWGKIRDAAEKSDFLKLPGYHALKSALETGSSADWQKWAGKDRDKLDEIARVLSFYEDPKQIDEMLTTLELDKEQIKNLSTITNFSKTVDLSLKAIGDILPHMRTGMTYDKACKEAGYDHSRKENKGLGKVPPFDDIRNPVVNRALAQTRKVINAIIREHDMPETIIIELARDVGRNFQDRKDIEREQKKNQSYREEAKTHIAEILGIIPDNVTGEDILKYRLWKEQDCFCPYSGTYITPEALRDSVATQIDHIIPYSRSWNDSYMNKVLCLTDENQNKRNDTPVEYFKRTGKNLDALTAFSRQLPPRKAENILIEDFDEEKAKKWKDRALNDTRYMARLLKNHLEQSLALGEGSRVQTRNGMLTAHLRGAWGFPDKDRRNDRHHALDAIVLACSTQKQVQDLANWNKYEARVKNPAERPYPPKPWDTFRDEAKAAVGRVFVSRMPVRKITGAAHEDTIRSIRKSDGKIIQRTKLTDLSLKTLEDLVDKNRNIKLYNLLKERLDQHGGKADKAFAEPIYMPTNDPLKQGPRINSVRVVTNEKSGIKINEGLASNGDMVRVDVFSKPNKKGKSEFYLCPIYVHHFARKELPNKVAVSGGNENEWVEIDSAFDFCFSVHKNDLIRVVKKDEELMGYFVDMNRNTVSISIRAHDNDPSFGNDGVRGSLGVKSLLAFERYSVDYFGNRHRIKKELRLGLAQRDDSESGETESVERTVAAGE

SEQ ID NO: 7145 - protein, 958 aa, unidentified
  REGION 1..958: note = Description of Unknown: Cas Enzyme sequence
MKHIIGIDAGTNSVGWVLTKEEENIAEIVDIGSYIFPIGTIVDDQNQKEKTKNEQRRIFRGMKRNRHRYKLRRKKLRAILDTLEMLPSFSGQYRVKKKLQSADLYALRAKGLEEKIPLEEIGRIFLLINKHRGFKSNAINANEESGEDGKVKSGIDELQSLMTEVRARTIGEYFHFMHVKANELYKSGKWHNPNEPISESAKDENGEIILYNCKGVRRFGQYTARAIYQIEFDLIWDKQKEYYDQSFPEIFTGSAKEYNQIRQLKCNEKSAKLKIFKQTNYWKVRNNCIFYQRPLRSQKKFLSSCQFEKNKKVIPASSLIFQEFRIWKNLADLRYTSESQEKYNSALPIAWKKLIVEFLDKNISIVVNRSGKKKKAKKSEPQKVFIIDLIEEAPADTVFHTEDPETEKEIKGNKTNFALYQILGNEKHSELSSNDSLEKIWHHMHMAKDEEWLKDTLICKWGLQEEKAEKLVEYGLESDYGSYSAKVLKKILPYMKEGKDEYDALVLAGYRKAPDEEKTKIPLQMEIIQLKYQELRNPVVEKAVSKVIKIVNALLEKHKEKIDQNNLEIRIESTRELKKPRKEREDISRKNREKDKIRQKYADFLNEKRAEGSLNFNRRIEKYDSIVNKFELWLEMGMDETAMEFSNFQAIVKKGDGEKHRLWLECNRICPYSGRVITFSHLFSPEIEIEHIIPLSRSLDDSFTNKTLTFSSINREKGKRTAFEYMEWKNDLGNFKSRIKRFPDSKKERFLKISFGQEFSNDQISNTSFIAKYVRKKLQEVCYDVQFTNGSATAQLRKYDWKLSNIIDKIRFEEESGIENIDLELQSLKRYRDDFKEWYSKKFHSTDIKFNFDEITEDVYLKYEEETKNPITNCIATIREFDAFRSKSGKKDRSDHRHHALDAIIIACCSRYITQYLSTYNREREESGIPQFNEYGHLTRELISRPFEYHSIKQKLKE

SEQ ID NO: 7146 - protein, 1107 aa, unidentified
  REGION 1..1107: note = Description of Unknown: Cas Enzyme sequence
MLSGIPGGHKMGYRLALDIGTASCGLAAVSLDPQGEPEDVVHYALHIFSEPLLPAKSGGVGEPKKAARRAARMARRIIDRRARRLKRIALLSVLLDLDRRQIPPDSGQEIHEIRAIATSERIALEDFLKVMLKLAKRRGYAGTFKTRKDSEQGQVQSGISALEVEMQAAGSTTLGQYLDHRFAAGKTLKLKEDGLYAHRDMLRAEFEAIWSTQALHHPILNESRSDPVKGSMRSIRDQFADAIFYQRPLKSVAPMVGNCPLEPSLPRAPMAQPAMQAFRIEKQLADLRWGMGRNAAALTAEQRNAIRDMLNDPAQIAKEGKLLFRRIYAQLADLNLMPVHQRSLNMERSSREELTGNRTLRTFKDLGVLDTWMALDPLTQTRVINFLADLGSPDQVDQPDWHKRFTKSESVKNAKTGRWEERQIPRDLDSKMISFVNALIETRKFDRLSNMGFQAGRASYSIRALEKLTARMQASGLGEHDAIQECYPPQAAAGELLPRLPAHKPTGNVVVDVALGVVRRAVNDALAALGKPPAEVVVELSRDMALGIKARGEIEKRIDKNRKLRDRARKELAAHDMLPTERNVLRYLLWEQQDKRHCPYCSVPISLEQAVDGNATNFEHILPRTLTRVGRQRNHLALAHRSCNDLKRDRTPFEAFGSDADRWAAVTFCASVLEDNKQFAKARLLRLQDYEHEVLDDASIAEFSERQYVETSWIGKLTAQWMREISPKVYPSRGTMTAHLRRIWKLETVISEARFGANLPVLDTDGNNVTLDEFSRFKPYWEGHTGSTHPRTDRKIDKRIDHRHHLIDALVIAQTSISLYQRMARQYKELAERRTAGEAVRLKLEAEPPIRDLRAKALELVSIATIRHKPDRNPAGAFFQQTAYRKAWTDDGKSRLSIRLPLPQLVDSTGSVDKARKAISDIVSPATRRIVSEAFEARIAAGKSVKDALTEPILDVRFDTPSKPKIKRVSVYQRLGRGFVDGSSAYRIEHSGRSAVLEKHYLSDGYSYVSLLEEGGKMTVAESVSTFAANRRMQSIRPGERRFFRGDTLRDPKTGKLYLIHQLLANATVRAAEVTEARAWIDLGKESGGTQFGAKALSALERIERGS

SEQ ID NO: 7147 - protein, 960 aa, unidentified
  REGION 1..960: note = Description of Unknown: Cas Enzyme sequence
MNVFAEGRDHSYTHGFPMTNNKTIWAFDLGKASIGEAVRKGNEFLHKASLLIPANFAETKLAAGRRRMWRTRQAHKAREQWLDEVMRKAGIEPLKGRQIERINGKWKEIAKGDPRLEREFPAPGDNTCYTSCLLRIKLLRWKEGDPKLEPWQVYKAFHSAIQRRGYGNVPWAAKEAARQGTTPEELEKKEKADLEKKDPTYRAAVEAWPRFKKTTDSRFHFPCYYDAAKMGLWNPENPDTLDERVSHQAVSTRKIRFDQADVQREIISLGNNAAAQLDGLKNSFEKLKHDGWLVADKVSGQNTKTCKKYKDGKRVRRLKVPAKTLGEFLCHGPGGKTYAAYDPKTVKELEIEVLEHPDPEQIGKKKRLRRGSNLDWLGGTGQKIPRFDNRIIEKCALIPRLNVCRAGAKPGIYGDSQPDSDSLLHTEVAFLLKLKNVRVMCASNVRPLTAKQIQQLFERKKDELSHLCLKRDDSKYAEKIADGFSFGKKKWADVGKEINFGFKPYVNHEEIEPPKCVGRSRFSRPALKIVRELILSGEAPSVFHARLLGQKKDLLLKLGTKIKEDGRFVVRPLAIYEDSKDEAVTAANSIKGVFVSELEFLKKMRKAGATQDSWDDIFIPNEKLDGLVLRIQSEINPANQRQKQNEAIYELIGSQNDPIVRHRLKFFWERLQALGKLPGPDEKPIGEPSRIILEFAREDFLGKKAKKRWQDFNKAKKEQNAQASAQATNEREQLKIKLWQDQGGECVYGRPIKVTKDAKCVYTERGLPSPGTNDFDNLEIDHIVPRDMGGPNAYVNYVLTFREVANQQKRDRIPYVWFSQDRSGELGGYIKFVQSKKESLGRKKVALLTRPDAAELVEQYTALAQTAWIARLAQTIVRLHFGWPLDHQKGEERVLTLTGGQTAQFRREFRLNSLLGENAKTNASVAEISKKEEEDLTVKRPSPEGEGFFSRRLKADIIPP

SEQ ID NO: 7148 - protein, 913 aa, unidentified
  REGION 1..913: note = Description of Unknown: Cas Enzyme sequence
MNKLSIYCDLRSIGWIITNGNNIIRKGIKRINVDFDTYYEFISGNVISKRVNRRLKRTARRNKWRRNSRKESLINFLTCLNMMPTKEMLSTDKLSRYKLRVKALSKIVSAKELGLIMFDLQKKRGYKSMRGVMADGSDYLDQIKEHEENLKSFPSISAYLLTIDSDKDVIFTRESYEAEFDKICQKQITDSKITEKLRSIIYFQRPLRKGAISNCNLEKNRKVTHKSHPDYQTFRCYRDANNITILDNQMKEVPISLEFRYKWANNLLKGNGLTKASCCKDLGIKKSTGYSWLSGKRLEPSSMCQLNEFDFNSFDLWHNLYSATDEAKLINLLIQKSGFTDEQIERLIDIDFKGMGWGEFSHKAINRLLPYLQKGMKLKEAILKEYGSVDMSSDITLRNLLLEQVFESTKSLIEEISKQYQIGEMQIELNQSLKQGNKIRKRISSGKRKKEKWEKENEQTIIDAGAEPSSYNYHKLKLWEEWDGYSPYDPDIKIDLKDLFTDEYNIDHIVPKCKIMERGFNNQCLSKKNLNEHKDQLTGIEFAEKTGIIEKYKSLIESLKISDTKRKFLFMKSNEIPTDYVSSMSGSDYNTKCFLTLHENSTCIPNKIVNRYYREWNFNQFNDEDARSSLMKALVLCNMSNETVKYFDNLVGLGEKSIGRYNLTPEITDIGEMPNIYMPSIKLYRKIKGNYSPRFQLHKETVYGYRPKKTINGKGQEIIENYYKVRKPIESLTKPMMSKIMDGAISKIVNERFNECGTIDKFIESIEENPLIHNGKQIKSISIEVKSDAVMPLHSTDGNGNTFGKKHHDKKIDFVYSSGAAFMYLEKGKYRTMPLMEYIDSLNNGTIHKFEKTFAKNDVVKFEGNHYFICGISDGIVEIRPTHQLNAEKGIKCSKNKISEFEKLIINQLGYVI

SEQ ID NO: 7149 - protein, 991 aa, unidentified
  REGION 1..991: note = Description of Unknown: Cas Enzyme sequence
MANFTLGLDLGTNSIGWALIDFDGNQQPRELIACGSRIFQEAVEAKTGTPKNHARRAARAARKLVARRKQRRTKLLNLLVRHGLLPQDEAERNALLLDNQANNPYQLRKRGLDEKLEPFAFGRALYHLAHRRGFQSNRKAASDEDGKVKTAISALRAEMQGQTLGAFLADQPTQRRRYTDRAMYAEEFEQLWNRQSSDAMEQLTQALKVAIHNSIFFQRPLKSQKHLVGKCTYEPTRKRAAKAILLAQRFRILQDVNHLAVKNPITREFRPLTQDERNKLAEALDKQKSMNWSSVRKVIGWNKKDSLHEGETFNMEEGKKDKLIGNRTACDLRGALGDRWDALTAQQQDDLVTDLLTIDNEQGFLNRMKSHWGFDDAAAESLAKTELEPGYARLSSKAMRAILPYLEQGMIYSDACKAAGYDHSNPNPRTITDKLGLPSNVRNPVVQKALFETRKVVNAIVRKYGKPAVIRVEMARDMKLSKRQKEELQKEQNKQKKENEIASDYLRDRLGIQQPSRADIQKYQMWKECREVCPYTNTPISPEMLFSPEVDVEHILPYQRSLDDSYMNKTLCMATYNRQVKLNNTPYEIGQGDPVAYAEIFHRIKTLPFPKRRRFEQKEIETDKFIERQLNDTRYICVEVRDFLQQLGTPVEVSKGEATAKLRGRWKLNTLLSPDGRNEKNRADHRHHAIDAVVIALTNRSLFHKLSRLSAQSISFDKSRFDVTPPWDGFYDDAYEKINQIIISYAPARKISGALHKETAYGYSEHEKCFVTRKSLDQKRINKLTESEVKKIRDAKVRELVESHLVLHGGDFKKAMGQPLFQENGVTPIKSVRVTSNFNKDTAHPVKKGQDKDYKFFTYGNNHHVEILENIETGNREGRFVTAMEASRRARGAAKTEKSNIVQRDHGAEWKFIASFSINDIVHIASNSAEIPYRIQAISEGNQFEITLKRLNDALSDKNENTLRIRSESALKQIIRKLTVDPLGNLAPCND

SEQ ID NO: 7150 - protein, 1182 aa, unidentified
  REGION 1..1182: note = Description of Unknown: Cas Enzyme sequence
MAVKYRLGLDVGTASVGAAAMSLDKDGQPDALIWHHVRIFNEPLENGQAGLVSKKAGRRKARMQRRQIDRRASRLRHITHLSSLLGLKREEIAPDDGSTLPYLRAQAATEPVELADLLRIFLRMSKRRGYKGEFKTKKKGEVAEGSSELSLAMRTLSTERGIALKDENDTGITLGQYLLHRLESGLPTKLKVKEINDESKSKQGEDANAPKNLYALRKMVEHEFNIIWDTQTKHHDILNGTHEGKPIREYFYDALFYQRPLKSAVDLVAQCGLEPTLPRAPRAQMAFQHFRIEKTLADLRWGAGKRAEPLTSDQKQTIRDLLDQNDKVKFEEIYEALEKAGHPKPQSKGLNLERASREELLGNITLAALRKLDRHSKKHHPERAANLEQNFRALDEKTQIAALNFLAELGSPEQLDDPEWPRQIATSDGVRRFESAFDNPERYLLDFNSKLEKKRGANYVELIAFINRIKEHDHFDRLSKMEFDGGRASYSVKALNTLEKWLEEPNWPGDWNNEEDGAKSLDEEGAVRACYRERMKVNRNIKRLDKLPVPASTGNAVVDGSLHQIRWTVNKMIAELGAPPDEIVVEMAREMSLGISRRNEREGENTKQQKARRDAEKEIRAHGQTPTPSKIRRYLLWTEQDKSFCPYCNKTIGLAEVLSGSATEYEHIIPKSLTQVGLKRSEIVLAHHACNQDKGDRTPWEAWGEGRNDARWQSVEAAALRFENTKPKQFRKAKLLRLKDFEREVLTDNSVNGFADSQFHHTSWIAKEAAQWLESLCPNKVSVSRGGLTSMQRRSWKLETVIPEVRIENNLPVLDSEGKLIEPEYFAKLKKYLEGHPVRREDREANPGFEFNRRPDKRLDHRHHLIDAITLSLTSRGLFQQMAKNYKAAAEKMQPLDGETSEDRERRIKNETRLRLEVPEPPLRNVRAAALDAVRECHISIKPDRYPDGALFKGTAYGVGQREDEDRLRLTLRQSIEGLGKVQGKTKLETARKAIVSIVSNDVRRIVGDAFEDRMANGMEAGAALALPIRHPLYGTPIRKVRCFENYAEDTHPIAFTNRTDVLRQNEPKKIGSFRKYLVNEGYAYLELVTDGSREPHLVKIWDAMRDKYEPTPQGVKRIFKGDTIKDSKDGELYRVGYFTSEGNIFVIPIFDPRSFDKITEAGSGKKKVAFTQATKRLSLIG

SEQ ID NO: 7151 - protein, 989 aa, unidentified
  REGION 1..989: note = Description of Unknown: Cas Enzyme sequence
MGSYTLGLDIGSNSIGWALVETKKKPSIVSIGVRVFPEGVDRDTKGLEKSKNATRREARGARRTHQRRNLRKEQLLKTLQKVGFLPTSESELRSLFHTNPYGLRKKGLDEKLERYEFGRVLYHINQRRGFKSNRKSGEPKEEGKVKKEAGELQKMIEKAGCRTIGEYFAGLNPEEQRIRERYTFRSMYEEEFDLLWAKQSKFYPSILTEELRKKIKNEIIFFQRPLKPTEELIGHCGLEPEEKRCPRGDWYARRFRFLQDVNNLKIHNSDGSVNELTEKQRQIILVHLSKSKEVKLSKLRKVLGLLETQEFNAEYETNEKGKRREKLKGDEFNASMRSKKIFGPKVWDAMDEAMKIKLNEWLVDLDDDELIEKLTAECGLNEGQIEAVLRITLPQRYMSFSRKAIQKLLPLMERGKRTDEALDEVYPDRNKLGAIEQKDKLDLPGDLRNPIVNRALFEARKVANAIVRDHGKPGRIRIEMARDVRGSARERRELHFKMLENERRNKEVREKLKDMGLSDASRDDIIKYKLWEECGRVCPYTGKTISQEALFSTNPEFQIEHILPYDRSLDDSYMNKTLCEVHENIHIKKDQTPYEAYNSNPERYEEIKQRVNKTAMPYWKKQKFWQKEIDTEQIISRELNDTRYINREIVKYLKQICSNVRGTRGKATAELRYQWGLIKDRDDHRHHSIDAAVVAVTRPEHLRQLGKSKYSNATSSFPPPWPHFREELAEKAKHINVSHRVTRRARGRLHDETSYGATGRKDEKEQDIFVYRKKLEDLTGAMVEKIVDPVVKEIVKERLREKGYAPEEKSTKLPKDIWQEPLYMKTTKSNKKVPIKKVRIRDVFNNMIFLNDREGRPYRAVAPGNNHHIEIFEYTDKRGNIKREGKVITMFEAVQRSQQGKPIVKKDYSDGKRFVCSLAINEMFMLEMDNGLEELYRVQKISRNGQIYLRPHTYAGDLKKQKGISKLPNKLKGHKVTVDMLGRVHMAND

SEQ ID NO: 7152 - protein, 1001 aa, unidentified
  REGION 1..1001: note = Description of Unknown: Cas Enzyme sequence
LARNDLGGYMSKILGLDLGTNSIGWAIIDDAAEEIIDSGVRIFQEGVNRSNTGSELSKNADRRNARQIRRQFQRRRMRRQSLAKYLEEIGLYDTNQKNEINKINPYEVRAKSLGKMLEPFELGRALQHINQRRGFKSNRKTGDNEDSKVFTGGNEGVIGINETQKAMQEQNCRTLGEYLFQLDSKTSRRRNRYTHRAMYIHEFNLIWDHQQPFYPEILTDEHKDFIYHKIFDQRKLKSQKHTVGKCSLEPKKHASPKSSPVFQHFRILEQLSRITISTPERDRSMLTTEEWEILKTALFQKKEIKFPTIRKLLGLPSNCRINIEDLGKLEGHKTYYSLKACFGQEMWAKLSDEKKYEIWHTLHFSDSEEWLKRYASDKWGLSTEQTGRILKVQLEQGYARLSHKALSKLIANWKPGLAYDKVVEASGYHFSQNTNAENLKEKLPIPENIRNPIVMKALYEVRQVVNCLIDEFGKPDVVRVELARELKQGKRIRDKQRIENFKRQRKADSVRSFLSTELEFQHPTREDVQRYLLWEECDKICPYTGKSISVNALFGTEFQIEHIIPYSRSLDDSMANKTLCYWEENQEKHNKIPYEAYSGNEKRYAEIIHRVEKKLKHKLHKFLLKTVDDDFVSQQLNDTAYISRATAQYLKEVFPKVQGVKGGTTARLRHFWGLNSILSGSIELKNREDHRHHAVDALVVANTTPSYVHSLSKYHEYDQTPRMERFPDPWKTFRTDSTKSIANILVSHKVRKRVRGKLHEETNYGKINVNGVEHFVVRKPIESLTPKMIGNIVDHAVRDRILSRLKDLQVDTSGKYTIPKETFTKPAYMRGGKVQIKSVRVKIPASNMILLRPDQNLYVEPGSNHHIDIFRNEDGKHKGIVTSLYSEAQSILKGTQSKHNEPIGGSWTLWNSFSINELILLDVDEEQINWKNPPEGYILGGQLFRIQKMDVNSNITLRHHTIASLKNSEGIELGRVNKRGGSLKGTKVTVDPIGKLQRTDE

SEQ ID NO: 7153 - protein, 940 aa, unidentified
  REGION 1..940: note = Description of Unknown: Cas Enzyme sequence
MAKTLGLDLGTNSIGWAIIENEKNEHNKNTTSLLDKGVLIFSEGVKNEKGQESSRAAERTEFRSSRKLNFRRKLRKHETLLVLAKNGMCPLTIEDVRSWRKSNFKKYPTNPDFLNWLKTDDEKSINPYLFRDKASKEKIDKLSLGRAFYHIAQRRGFLSNRLDASDNSIIEEKMYEIEQIIEESNTAVELQKYLDEYFNDFDKKNETEKPLFKLSRAFYGIIKNSDDDITGLKKKVLDKLHKKENLGKVKQGIRDLSEKIKEGNFKTLGQYFWKLYKADRNDTENKIRVNYTAREEHYLHEFEIICKKQNLNGIKEKEKISDKRYFGLVKELHKAIFFQRPLKSQKGLVGKCTFEKNKPRCPISHPLFEKFRMLSFINNIKIKADEEQKLRPLTTEEKQKIIPKFFRKSKPYFNFNEIKKELGKENYFNYKDNVTVSGCPTSAQLKNTFGNDWENISFTYTTKDASEKSKERNVDVHDIWHILFSFDSVEKLKEYAKEKLKLDEKSCKSFSKIILKKDYAALSLKAIRKILPYLEKELIYSHSVFMANIDKVVDREIWQNEKYRRELQDKINLIIVDNRLNNRITQVINGTIKTAKNNGGKYSLKQENSYRQTIKQALEDEFGKSKWESLEDRDAYYEQAVADFIFYFKKRKGQGSFIILKRLDEKIENLLLGNNDTGEIFCTDEKLLKNLYHPSDIKKFKFKTIKNKEGKKFIGLGSPATPSVRNPMAMRSLFQLRKLINTLIIENKINQNTKINIELARELNNSNKRIAIRQWQNSLEKRRAEYAEKIKESFQAETGKLVEPTKDDILKYQLWVEQNQKCLYTGTQISVSDFIGQNPKYDIEHTLPRSQSEDNSQMNKTLCQIRFNRDIKKNRMPSQLNNHEEILQRIEHWKTKYTNLDKQTAQITRSVKGATTKEQKDRKIQKRHLLSFERNYLKGK

SEQ ID NO: 7154 - protein, 1513 aa, unidentified
  REGION 1..1513: note = Description of Unknown: Cas Enzyme sequence
MKILGLDLGTNSIGWAVVDSENKQIIDTGVRIFPEGVVAKTIGMGDKEQSKNATRRDKRQMRRQFYRKRLRKIKLLEVLIEQQMCPLSIEELKRWKNWDKKEKTEGKVFPNNPQFVEWLKLNPYILREKAITDKLTLSELGRIFYHLIQRRGFLSNRKGKEDTTIFTKGKPDENILSINETKEKIKNSTLGSYLNSISYKEGVPYKTIVDDTGKEMRLRGRYTIRDMYIAEFEKIWNLQSGLLGLKNKLVSLKKIREYRGSLNNNRNKNRIKHLHEKYGKNNVKISEADKNGISKVTTLSLVGLKEFLGGEIKEIENESGDKILHFKSNESILFWQRPLRSQKGLLSNCRFENNLPVIMGNGEFLKNGKGIIQNRSKKPCPVSHPEFELFRAYQFINNIKYRKNPRLTDEQRQVVLGLINSKDNNFDFAEIPKKLKLTYEKFNYEDKQKVAGNVTIKKLKPLFDDKIWKDQYEEIWHCFYFYDDDEKLYKKLKEDFNIKKDIEAIKKIRLKDDYSNVSLKAIRNILPFLEKGYQFDRAVILGGVKNAFGSRWGYFEKFHNDIEKEIVNILREDNKEGEAIEKIKEHLASPICNYGFEENDTHFTHLYHHSQEVIKIELRDEVPEVENLRNPIVQQGVFETRRLVNTLIRKYKKENGSDFHFDRINVEMGRDLRNNKTGRQEMSFKIRENEVKNTEARGRLAEYGLQSSRQNIQKYLMFKEIEDRAGKAQCPYTGKIISIADLLGKDNIIQIEHMIPYSISLDDSFGNKTLCEANFNREKSEKTPYQFYKENPDSKLWGVSSWEAVEERAFRVLPYRKAKRFTTKRELEKSDFIERQLNDSRYIAKKAVELLSNVCNDVRVMPGQLTAELRHLWGLNNILQPAQVLDLQAFNLDESNSVQYYVVTNEKGVTLRVQRKVNKRPETSTSQILATGYVNKHKFSSKFFKLDMETPELKDGKYWAKLNITDEIKLIPKFINKPKTDNDEIVFKGKIENGFFKNDTYGRIKTEFEDGSYWAKFKILNTKFEEPQKDKQPKIKRNQVLLFGNVVNGQFKCYIYQCETNLEDGKYWIILDLNPENIEFIRSINSKPTIEQQQLLITATIDEQGLLVADIDKEYQITTNKKSGKFYAVLEVESIEPNLYNVENEPPKLEKGENIVEGNIWVDKYTGEIKFDPKKNRGDHRHHAIDAITIALTEQSYLQRLSTYNAQRKAKQRQKLDSTEKFPEPWLGFDIDVKTAVSSILISHNKNDKTLTKNKKGFSVRGQLHKENVFGKRQAPNQEQAYHRRTKITELKNNKHIGKVVDITIRELILKHLKENCDVDIDNPKGFIVPKETFYKDGIWQVFLPNKYGDPVPIKKVRIREYIGNATQLKSNINQFVNPRNNHHILIYKDYEGNLQEDVVTFWTVVERKLQGSETYQLPEEGDSIVAVLEINDMFLLGLSDDEFESNKNNHQFFTKYLYRVQKISSSYYTFRNHLASTLNNSNDEFSIRSLKAWMEISPIKVKIDTLGMIIRY

SEQ ID NO: 7155 - protein, 1415 aa, unidentified
  REGION 1..1415: note = Description of Unknown: Cas Enzyme sequence
MKKILGLDLGTTSIGWALIEEHENREKSKIVKLGVRVNPLTVDEKINFEGGKPISTNADRTLKRGARRNLDRYQLRRKALSEILVKCNFISNDTPLTEVGKNTTHQTLSLRSKSAKEKVELEDLAKILLAINKKRGYKSSRKTKVEADGIAIDGMAVAKILYDEKLTPGKYVYNLLNEDKKHIPDFYPSDLKSEFTAIWTMQQSYYPEILTNELFENLQGKNKTQTWAICKEPFNLVGINLKGTRSEIKKQQFEFRVNGIKQKLELEHLAIALQEINNTINSTSGYLGRISDRSKVLYIDKLTVGEYLYQQIDKNPHVSLKDQVFYRQDYLDEFEQIWETQAKFHKELTNNLKAEIRDVIIFYQRPLKSQKGLLSFCQFESWEQTYFDDIKKKERKRFVGQRVIPKSSPLFQECKIWQNINDLKLIPQKDLTIDIFNTEEKGVYKKNEEVNIEEEDRKMLFAEANLRGKLSSANVLKVLGLKTKDWKINFEEIQGNTTNEKLFNAYQEIAKQEGYGIGWEKLSALEIYDELRAVFPEIGIDANILDFDANINGNDFDKQASYQLWHLLYSAGDDGAITEEDKLIYGTADVNLRKKLHKKFGFKPEHAKIISNVSFPNDYGNLSARAIKKIIPHLQDGLDYYEACSAVGYNHSNSLTKEQLDARILKDKLEILPKNSLRNPVVEKILNQMVNLINQAIDEFGKPEEIRIELARDLKQTAKEREDQTKYITSATKVNLDIAKKIQQEFGFTPTKNDIVKYKLWLELKPLGYKTVFTNCYIEKKDIFSKKIDIEHILPKALIFDDSFSNKTLCYREVNLKKANRTALDFITQDYKNKLEEYLQRVEALYNKGKNTNNFSKGKYHKLLKSAKDIKEGFIERDLRNSQYIAKKARNMLLEVFKLVTPTTGKITDKLRNDWGVINVMKELNLPKYKALGLTEIEERKNDKTIEKIKDWNKRNDHRHHAMDALAVAFTSYNHIQYINNLNARRDESNKMHSSIVGIENKITYSEKDKKGNSKRKYIEPFPNFRSEAKKHLQSILISFKAKNKAVTRNVNKTKKEGGYNKKLELTPRGQLHKETIYGKVKMPKIKPTKINKRFTLLDAKNIIHNHQRDLVLKHLELYENNPNIAFDGKTLKNNPLFWQDEPLKEVLCFEEVYTIRKEIVGSNPTSKQFIPENKLLDKVVDLGIRKILEERKKEFGGDAKKAFSDLDKNPIWLNKEKNIQIKRVAITGVSNAEPLHYKKDHLGKHILDSKDRKIPVDYVSLGNNHHVAIYRDEKGKLQEKVVSLYEAVERKNQGLTIIDKAYNEHLGWEFLFTMKQNEMFVFPSNDFNPNEIDLLDEKNFKLISPNLFRVQSISSKYYIFRHHYETTVATGNTFKSYKNLSGITYYFSQNPESLKEIIKVRINHIGKIVLIGEY

SEQ ID NO: 7156 - protein, 1165 aa, unidentified
  REGION 1..1165: note = Description of Unknown: Cas Enzyme sequence
MNTYTLGLDIGSNSVGSVGVDVENRLIRMGVSVFPAGIEESDTKRGAPKNQARRGFRSQRRITKRRAERKHQMRIFLLEKGWMPDNPDSEKKWLEDNNPWLLRRDGLKRELQPNEFGRILLHLAQRRGAYGFEVDDDDSDTGKIKDAINKTRNAMKECNAETFGELMTIEFEKRKIQIGSKGKNIGKRVRNRRNAAGEDVYEFCADRELIWEEFDKLWNKQRSFEGDLAKQLSDDFRRELDNPQNDAIWRYKGILFGQRKTYWDIGTMARCDLEPTDMKCPKADMYAQEFLVLETVNNIRVTQRGQLNRPLTTEEREKVIIALEKQKTASEATIRKALGIDKGENKAEYTLSLEKDPGRGLNTNWFKREIVGAIGKDIWKGMSEKEIESLNRAILKFDPQEKNDTALLRKGCRNWWGFNKEQTERFIEAWKKRPKVDDRINYSRKAIKNLLPYMREGLTVNEARNRFAEDADNGASDSQRQRYSFGAKAGNKRLRQYLEKHPDMLPPAPEDISNPVVRKAIHEVRRHILAYIREFGCKPARVVVELAREARQSAFVRNKKLAENRAREKERKDIIKKFNLESETKTQQMKAVDRVLLCREQKFRCTYCCDEKDSISEATAVKGEGVEIDHIIPESRGGNSYLSNLVLCHTKCNRGKGNKTPKEWLTDEEFIKLEQRLGHLEKDNKIKWDNIHKEVTDLDGFVESQLTDTAYAARQVAGWLEKTLYGDRNDGKRHVFTTKGRYTAILRKKWRLFPDRKGNEEGEKNRADHRHHAIDAVITALSGPERLSQIAHAAEKQELAKSEGFAYPEQEPIKPPWGDFDSFRADVIKEYDNLIVAHRPQGRKITGALHNDTLYGPVLDKNGNLTKYATIKKPFSELTPKHLRVPQGWEELLEKLKTANSKRQQRRMRSEMLAIEDVAPSKSGVVRDRWFRQELRECLQGNGIDPDNFTGKQLKELLKTKELALKSGVPVRRFTILRAPTVKPVPRKLWNPKTDKMDYDDNPRSVRLYEPQNNHHIEIRETKKGKWIGKVITNFDASKRVRPSKKSGLSPQAAVNREDTKDGKFVMSLSIGEMVKMRHPETEEPGFFVVFKIDGTGTIHLTPHLDAGRDKETEKCRAREDIKFPGKKTGGLTVAQLQSLGTEEDKLPEKVWVGPLGDVKVLQRD

SEQ ID NO: 7157 - protein, 1128 aa, unidentified
  REGION 1..1128: note = Description of Unknown: Cas Enzyme sequence
MKKILGLDLGTNSIGWALIERNFDKKDGNTLGKGNILGIGSRIIPMDHATMDDFGKGITKSQTAERTSYRSVRRLQQRHLLRRERLHRVLNIIGALPKHYKDAIDFDNRKGQFKSECEIKLPYFKNDHDEFEFLFKTSFDEMVKEFRLTQPQLFQTKKNGQETKIPYDWTIYYLRKKAIKQKISNEELAWLLLNFNQKRGYYQLRGEEVEISDDKIKTFEVLTVKECIDSGEVIKKTGDILYNVYFENKWKYDKQITKTENWLGKSKEFIVTTSITKSGETKRTFKAVDSENDWIAIKKKTEQDLDIFNTENKSFGVGEYIYNTILSNPTQKINGKLVKTIERDFYKDELGQILKTQINLNTELKDTNLLKQCVEELYPNNYAQQNLLKDKDFAHLLIEDIIFYQRPLKSKKSLIDGCNFESRTYFDKKENKYITKPIKVIAKSHPLYQEFRLWQFVENIRIYQKEKMIDGKLFTNYDVTVEFIHNNDEKVELFEFFNDKEKIKQKTFLSHYKLKEDKYRWNFVEDKEYPLNETRAALISKFKKHKDTFAWQSFLNQENEIKLWHLLYSISDKKELEQALDNDNFKLNIPKEVRQEFKIIAPFKSDYGALSEKAIKKLLPLMRMGKYWNYDGFGKKTKDRISKIINGEFDNKIQDRVREKAINLITESDFKALPLWLASYIVYDRHSESGDITYWKNPNDIEKFLEEFKQHSLRNPIVEQVITETLRVVKDIWDYYGKGKEAFFDEIHVELGRDMKNPKSIREKITKSINKNQDTKQRIRTLLSELKNHNIEGVIPHSPSQQDKLKIFEEDILSSANIIPDEIEKISKSSEPTAKETGKYMLWMEQKYRSPYTGQVIPLSKLFTTEYEIEHIIPQARYFDDSYANKIICEAEVNRFKDRQTAFEMISKSPGQVISLGRGKQVKIFSLEEYQDFVSANFNTGSKKQKMLLSEDVPEQFITRQLNDTRYISKVVKGLLSNIVREDDEQEITAKNLISVTGSATTKLKRDWGLNDKWNEIIKPRFERMNEITNSNDFGYFDKTKNFYRIQVPNALKKNFNAKRIDHRHHAMDALAIACATRSHIGYLSNEHSKSTNKRYDLRNKLRHIEETQINDNKCSKRVLNALAKLSY

SEQ ID NO: 7158 - protein, 1051 aa, unidentified
  REGION 1..1051: note = Description of Unknown: Cas Enzyme sequence
MKNFRLGIDLGATSLGWSLIELDKNNEPVKLEKVGVRIFPDGRKAAGKWSKKEPLNVTRRTARGIRRNRDRYLQRRNDLMEYLIENNLMPKDISERKELEHLDPYYLRAKGLDEKLTLFEFGRAIFHLNQRRGFKSNRKLDSQDNESSVMKTAIIELAEKLQETDSRTLGEYLYNLNIDLPKKEIVRSKPKRVKKGDKTYNLFPDRAMYLDEFEQLWEKQQEFHSELTDEIKSNIENIIFYQRPLQPQEKGSCQFEEGEFRCSFAYVTAQKFRIFQELNNLELLDFDKKSNKLTDEQQAIILHTLLTQKTATFKSLRRKLGKEFAKDYTFNLESEKRKDLKGDETSAIMRKDNYFGDKWDELPDTEKDEIITKILNEENDKEIEANLVNWLCDKYSLSEENAQNIANASLSKKISNLSRKAIRKLLPFLQDGFIYSDACEKAGYKLTDEAPEKPKFYKGDLPYYGELFEKDALFGDKIQLNKKYPEKYYGKIPNVTVHIALNQLRKFINELSKTYGAPKQIVLELARELKLGKSKVDEIEKIQAKNRKYNEKIAVELEKINVENNYANRTKYKLWEELAKDPTKRCCPFSGIQIPIHKLFTHEFQIEHILPKSKTFNDRMVNKTIAHRKANQDKGERSPFEAFGHDPTGYNYNEILLRAEQLPFAKRRRFFPDAMKYYEDEGEVLSRMLTDTQYMSRIARKYMAFVCGKNKVWSINGQLTAKLRSKWGLNELLSEDSSKNRADHRHHAVDAFVVACTSRSTMQKVARAIGNSRDKFIDEMPPPFKQFKHTEMKQLLDEMVVSFKPDHGNAKKAIAEHKTVGQLHKDTAYGLVDKDEEKGKIILSVRKELVSLESVKKIKEITDPRIRASLLQLTEGKTSKEIIGILSEYSKETGIKRVKTQIVKSLDTVVRIEDKLGNYKYYALGNNYCADIYCPDKGKKAGKWQIEIIPMFYAHQTNFIPDWQKENPTATKVMRLYINDTVAYEENDKTEIRRVRMLSIANKIIYMREINTAIKDNDIGEQFSATRFQKTNAHKVGVDILGRISDPKRAK

SEQ ID NO: 7159 - protein, 975 aa, unidentified
  REGION 1..975: note = Description of Unknown: Cas Enzyme sequence
MSFYTLGLDIGSNSVGSAAVDLERRLIRMGVSVFPAGVEEQTDKRGAPKNQARRSQRQQRRSIERRAKLKRRLRQYLIKKNWIPTEKNKLQEWQNLNPWILRKDALHRELTDEYEFGRILLHLAQRRGAWWFDEEPEETEETENSKKKKKDPTETPGTVEYTKAIMTQKSAETFGELVAIEYENRKTTTTNNKIRNDRVRNRADAFGEKESEFVADRHMILAEFLKIWETQKSLGGQLAEQLTDEVKKEIYNLQKTNTWRCQGVLFSQRKAYWNLGTLGRCDLEPTDMKCPKADMYAQEFLVLTSVNTIRITPPMEASRKLDDKERPKVINAVRKQKTASESTIRKALGIDKGAEKTHYTLNTDGDKFTVNGDWFYSQIVCGAIGEDIWATFDDKKKESANKAILKFDPNEESDESKIRTGCKKWWGLDGKQVEDFISAWKKRPKKSERVNLSRKAIKNLLPYLRDGWSVTEARNMFAEDASNGADDLTRRRYSTKEVVVDKRIRHFQEKHPNILPPVSEGISNPVVRKSIHEVRKHLMEYIKQNGRPDRVVIELAREARQTEKVIAKEIQKNKAIKALKDGIIETHNLKALGITITQRERAIQRVRLCRQQREMCAYSGITITDVMAADGSGLEIDHIVPRSKGGNNGMNNLVLCFSTANQGKGNRTPIDWLSKEDFRKLELRFKHLQKSKKGKKEESKKSQRVITKDNVDMVDNAKWENLHRKTPKEGFTEEQLRSTAYAATQTSDWINKVLYGSEDRGKRYVFASRGDYTGILRRDWGLFFDEDGERSEKGRKNRGDHRHHAVDAAIIAMTTQCLPKIKQSFIDFEKQKENKRIEPDWKTVEQPWEGFSEQLAEEYKKLKVSHRAYNKQIAGYLHKDTIYGPAVIYEKHKKDDEKKGIKKGDVKINEDGNPILKEGMYIKSIPAAGIKQNHLRMPDGWDKLKEEYKYLTTKPEKKAIRKKMLSLEDVPPAKS

SEQ ID NO: 7160 - protein, 1199 aa, unidentified
  REGION 1..1199: note = Description of Unknown: Cas Enzyme sequence
MKTLGIDIGTNSVGSTWIDTDKKIIKMGVSVFPAGVEESEGKRGAPKNQARRTQRQQRRSIERRAKLKIRLREYLLEKKWIPTEKEKLQKWENLNPWLLRRDAVREELKKDDNFSAGEKFGRILLHIAQRRGAWWFDEEPEETENGKKKEKKDQAEIPGTIEYTKKVMKERGAETFGELIAIEYENRKRNTANKKLRNDRVRNRANALGEKESEFVADRHMILAEFLRIWEIQKKFVGKLAKQLTKEVKEEIYNKKKTNTLRCQGVLFGQRKTYWDLGTLGRCDLEPTAEKCPKADMYAQEFLVHTSVNNIRITTPAESIRKLNNEERSKVVKAVRKQQTASEGTIRKALGIDRGANKTLYTLNTDGDKFTVNGDWFYSQIVCDAFGEDVWASFDNKIKNAVNGAILKFDPNEEDDKAKISAGCKKWWNLTDEQTEKFISAWRKRPKKDQRVNLSRKAVKNLLPHLRDGWSVTEARNMYAEDASNGADDLTRKRYSTKEIFINKQIRHFQQKHPGMLPPVSEGISNPVVRKSIHEVRRQMTEYIRQYGKPDRVVIELARRARQSERVIAKKIKKNKAIDALKKEIIETHNLKAQGITSTQREAAIQRVRLCKQQREMCAYSDATITDAMAVDGSGLEVDHIVPRSKGGDNSMSNKVLCYATANQGKGDRTPIDWLKKEEFRHLELRFKHLAGSKKDKYAITKDNVDMVDNAKWKNLHRKTPKEGFTEEQLRSNAYAATQTADWINKVLFGSEDKNKRYVFASNGDYTGILRRDWGLFFNEDGERSEKGRKLRGDHRHHAVDAAVIAMTIQCLPKIKESFIDFEEQKENKKIKPDWKTIEHPWEGFSEQIAEEYKKLKVSHRAYNRKITGHLHKASIYGPAVIYERHQKDDAKNGIKKGDIKIDKDRNPVLKEGMYIKSIPAIGIKKNHLRMPNDWDKLKDEYKAATTKSLRKAIRKKMLAIEDVPPAKPGIIRDVELRDKIRDWLKEHNFSDMEKAKAYIKENGLIINGTPVRKVRVLWKLNEVKEIPRKKYDFESGSIMKDNNYKSLRVYQTQNNHHIEMREKVNKKGEVKWSGEVITNFDAARRVRAEKKPIIDRNENKNGKFVMSLARGEMVHMRHPDTKEANYFVVFKIDSSKAIHFTAHTDANPASSKQKGVKLREDIPLVPDMLRQHIIFSENGTPEKVRISPLGEVKVLISD

SEQ ID NO: 7161 - protein, 1392 aa, unidentified
  REGION 1..1392: note = Description of Unknown: Cas Enzyme sequence
MKKILGLDLGTTSIGWAYVNEAENENEKSSIEKLGVRVIPISTDEENDFLKGKATSINADRTLKRGARRNLDRYQLRRKALLEVLLKIDFINASTILSEDGKNTTFSTYELRAKAVCEKISKENLAKVFLMINKKRGYKSSRKAQSDDEGTAIDGMEVAKTLYEKDLTSGQYVYEILKNGKKHIPDFYRSDLISELDKIWNYQKQFYPEILNDEFREQLNGKGKQATSKIFLAKYGIYLAENKGKRDEAKLQAYKWRSEAFSQQLTKEEVAYVIVEINNNINSSSGYLGAISDRSKELIFNKQTVGEYLFNQLKLNSHTRLKNQVFYRQDYLDEFNAIWGKQKEFYPELTPELKTEIRDIIIFYQRRLKSQKHHISNCEFEKHHKAIPKSSPLFQEFKIWQILNNLEIKDLKTREKYVLELETKQLLFQELNIRNKLTDKEVLKILSKKPNEYELNFNSIEGNRTNAALYQAYQKILEFENEDFNFSMKSDTINEIVSTKFLELGINTDILSFDTEIEGNDFDKQAIMQLWHLLYSYEGDNSQSGIEKLLEKLETKFGFKKDYAKIIANIKLQDDHGSLCNRAIRKILPHLKEGNGYDVACFHAGYNHSHSLNKNELASRELKNKLELLPKNSLRNPIVEKILNQMVNVINAIIADESLGKPDEIRIELARDLKKSAKEREKATKDINQATIKHDKIRKLLQSDFGITKVTRNDIIRYKLWQELESNGHKTIYTNKYIPKEKLFSKEFDIEHIIPQAKLFDDSFSNKTLSKREVNIRKSNDTAYDFLKEKELNEVEFEQYLERIESLLKRGIIKKSKYNKLKMKSSEIPDGFIDRDLRNSQYIAKKAKQMLEEVVRTVNTTTGSITNRLRSDWQLVNVMKDLNFPKYDKLGLIETIEGKNGREEKKIKDWTKRNDHRHHAMDALTAAFTSYSHVQYLNNLNARNNETHKKYHEVYGIEQKYLYRDKNNKLLFKPPMQIDEFRAEAKKQLENILISFKAKNKVVTRNKNKIKAKGKDNHKEKIELTPRGQLHKETVYGKIQQYETKEEKIGTKFDLDKIKKVAKQSYREALLMRLAEFEGNPKKAFGGKNSPTKNPIYIDEAKTIEVPEKVKLVWKDERFTKREKIAPDLFKDSKKKDDFYKRIGNIYDEKIKQILTERYENTRIEVEKFNNSVLKVSEKKKVLETAFSNLDENPIWLNEEKSICIKRVTISGVSNVIALHDKKDHNGKLILDENGNKQAVDFVSTGNNHHVAIYQDEKGDFQEDVVSFYQAVERSRQGLPIINKSFNKDKGWEFLFTMKQNEYFVFPSDVFNPNEIDLLNPENAGRISPNLFRVQKIAAKNYMFRHHLETNVDTSKELDKVAYRLIQSTPHLVGIIKVRINHLGQIVKEGEY

SEQ ID NO: 7162 - protein, 1486 aa, unidentified
  REGION 1..1486: note = Description of Unknown: Cas Enzyme sequence
MGSRIIPMSQDVLGKFDSGVSISQTAERTGYRGVRRLYQRDNLRRERLHRVLNILGFLPQHYKDAIDFEKHFGQFKKGQEPKLNYRKNDNEKHEFIFMESFNEMIEDFKIHSPLIFHKKKNGEETKIPYDWTLYYLRKKALTQKISKEELAWIILNFNQKRGYYQLRGEEEETEDNKTKTFEILLVQNVVKTDDVIKKTGEYLYDVFFSNGWKYDRQTTKPNDWLNKTKEFIVTSSTTKNGEIKHTYKAVDSEKDWIAIKSKTEQDIEKSSKTVGQYIYNALLENHGQKIRGKLVRTIERKYYRNELEMILKVQCKLHSELQNRSFYQACLDELYPRNEAHQKNIQDKYFEYLFLNDIIFYQRPLKSKKSSISNCAYETRTYMKTIAVETGEGKNQEKEITMTEGIKAISKSHPLYQEFRLWQFISNLHIFKKATKNDEDVTHTFLHSEEAWVNLFDYLNNYKEVGQKHIIDYFYKQGFISRNEKEIYRWNYVEDKKYPCNETRAYFTSRLNKVEGCKKGYYFNSETELHLWHIVYSVNDKIEFERALKTFAIKYRYNETSFFENFKKIPPFNSDYGSYSEKAIRKILPLMRMGKYWKQEDIDENTKKRINNIITGEYVENIKIRVREKAKELNEICDFRGLPVWLACYIVYDRHSESSDNSKWNTPGDIEKYLSDFKQHSLRNPIVEQVVTETLRLTHDIWNFYGNAAKDYFSEIHIELGREMKNPADKRKKIAARNIENENTNIRIRELLKELMNDPAVTDDVRPYSPSHQEILKIFEDGLINNPGTNYSNVSEDDISKIRKNNSPTASEIKKYMLWLQQGYLSPYTGEVIPLSTLFSTNYQIEHIIPQARYFDDSMSNKIICESEVNELKGSQTAYEFLKNERGRKVELSGGKTVNLFTLEAYEEHCNHYFKSNRAKLKKLMSEEIPEGFIERQMNDSRYISKLVKSLLNNIVRDEEEKDSISYKVVPVTGAVTSKLKQDWGLNDKWNEIVAPRFKRLNELTGTDNFGFFDKDINAFRCEVPDELKRGFNKKRIDHRHHALDALIIACATREHINYLNSINSESKNYSLRNRLLCKNKQDDYTKTMLLPWERFPNDARNNLEQIVVSFKQNTRVINKTNNKTWQWVEEHGILKKKLVRQTKGENWAIRKPLHKETVSGAVSIRKVKAVSFSSGLKDWKNLLDKDLKKKIKSYFDIGLDRKDIATIYKKEPYQKNGEIITKVDVYYYSENATATRTLLNDKFTRKQLENVTDSGIQKILENHIKKFIDAKGAECFDLAFSPEGINELNKNIVDLNGGKAHQPIYKVRIYEEGSKFKVGVKGNKKDKYVEAAKGTNLFFAIYKGKNIKDEDVRVYDTIPLNIVIERLKNGDHPVPEKYNDKDGYEYSLLFYLSPNDLVYVPTEEEVVNPGLINLNKLTKEQANRLYKMVSSSGTQCFYIQNNIATTIVNKLEFSALNKTERSIDGIMIKDKCWKLKVDRLGNISR

SEQ ID NO: 7163 - protein, 1104 aa, unidentified
  REGION 1..1104: note = Description of Unknown: Cas Enzyme sequence
MAKRILGLDLGTNSIGWGVVDDLGAGEFELIKRGVHIFQEGVKIEKGNESSKASERTGYRSARRIKFRRKLRKVETLKVLSEAGFCPKLDVDELKAWQSKKVYPDNPAFRDWCKTSDPKDKDSGIYENPYYYRWLAATSVMNLDDEDDRFKLGRAFYHMAQRRGFKSNRLDTTQESDGVVKKDIDELTAKMAGRTLGQYFWEERYKVGKEIRRVHTSRDDHYLAEFDFICEKQGVSAELKTALHRAIFFQRPLKSQKGTVASCPFEPKKKRAPISHPLFEEFRMWQALNNIKIKTLDDERLRSLSVEERNLISPLFFRSSDKYKQFNFKDISKKLTPHGQKAGYIKGRDTDAHVLFNYKGNQSLSGCPFLAKLKGLFGGEYQQVIFDSYCGNKQDKRGNERTPDDILHEVWHVLFSFDDAEKVKAYARGKLGLDAEKVEKFAKIMLKQGYGALSLKAIRKILPFLKQGLIYSHAVFFANLDEVLGATTTKTESLYADIAKLVDEHNRYFEEVRCVNEFVREYKNSPQAFESKYDLRDVLDFEAMLPSGLRNSAGSLCEKIRVQALKNNGNGEYVPMKRLDERVGDFLRTEFNVSDGTVKKLYHPSAIETYKPAEKHSDGKFYLGDPRISSIKNPVFMRAMHRVKAVVNELLKQGVITDQTLIHLEMARELNDANRRAAIKIWQRNNEAKRKEYKGVIEKHFKAFGYDREADADEILKYQLWIEQGEFCPYCNEKINVTALLSEESEIEHTIPRSLSCDNSQENKTLAHRQCNRNKKNRIPFECPNHAEILQRIGHWLEESERLGGLVEKKRSASRGATTKDDKDRIIQQRLVLEMDRNYLREKYRRFTMEEVTSGFKNSQLVDTRIITKYARLYLKTIFSTVHTVNGKATDDFRRCWGLQNEFGKKDRSNHAHHTVDAIVVSCVTREQYDKLAHYYHEYESYEQNDPSVPNKPHFSKPWKTFTEDMTALSNEILVSHYAPNHLLKQAKKHAEVRGKMVVQQGKTARGSLHRDTFYGKINDHGDLKYVVRVPLVYNPGGGVFGFDAKAYDKKDELYVERQDWKTRDLERIVDHIVRDLVVQAIYQRMEKGESFKDALVEPIWMNE

SEQ ID NO: 7164 - protein, 1515 aa, unidentified
  REGION 1..1515: note = Description of Unknown: Cas Enzyme sequence
MSKKILGLDLGTNSIGWALVDEDFENKTGNIEGLGSRIIPMSQDILGKFDAGQSHSQTADRTSYRGTRRLYHRNNMRRERLHRVLNILGFLPKHYANSIDFEDKLGQFKAGIEIKLNYCKNEEGKHEFIFMDAFNEMIVEFKKTQPQLFYTKNDGEETKIPHDWTLYYLRKKALTHKITKEELAWLILNFNQKRGYYQLRGEETETDNSKIEEYYNLKVNEVQETQDKNTKGTWYNVILENGWIYRRQSKESLNVWVGKHKEFIVTTQLDKDGNHKLDKDGDIKRSFRSVDSEKDWIAIKAKTEQDIEHSEKTVGEYIYQTLLRNPKQKIRGKLVKTIERKFYKNEYKQILSKQIELQPELFKNELYKSCIKELYPRNESHQNSIKGKGFLYLFIDDIIFYQRPLKSQKSSISGCQLEYRVYKKRNDETGNDEIIKEPVKAIPKSHPLFQEFRIWQWLKNLRIYNKDEINNGQLDDLTIDLLKTEQDWVELFDFLNTKNEAEQKHIIEYFVKKKLIDKKDKDSYRWNYVEDKKYPFAQTHVQFVNRLKKVSGIDDADNFLTEKTKVGLKAESPNLSREEQLWHIIYSVTDINDYKSALEKYALKHKIDIDSFVKNFIKFSPFSSDYGNYSKKALDKLLPLMRMGKYWEEKTISLKVRDRVSAIMERVNALNLKADYSDKDLKVALAHVSDDDIPKQLVKSFHPFKDKNPTKGLNTYQATYLIYGRHSELGDIQHWNTSGDIDKYLNKFKQHALRNPIVEQVVTETLRVVSDIWNYYGNGKNGFFDEIHVELGREMKNPANKREKIARRIIENENTNYRIKEILKELMNDTLIKGDVKSYSSSQQELLKIYEEGIYQDPNAKYDNVTEDEISKIRKNNNPSKKEIQRYQLWLEQGYVSPYTGEIIKLSELFTEKYQIEHVIPQSRYFDNSLSNKVICESDINPYPYKGNQTGYEFIKNMGGQVVPELSNNGKMTTIFSLEEYENHVTKYFAKNTAKLKYLLSEDIPEGFINRQMNDSRYISKLIKGLLSNIVRTDNEQEATSKNLLPVTGAVTSKLKQDWGLNDKWNEIIAPRFKRLNNLTQTNNFGYWDKKINAFRIQVPDNLSKGFNRKRIDHRHHALDALIVACITRDHSHYLSALNTEKENYSLRNKLLRKNNQDDFTKHFQMPWLNFTTDAKQSLEEIIISFKQNNRVINKANNKFWSYNDENGNLNIGKDGKPKKKLRKQTKGDNWAIRKGLHKETISGIYNIDTPKGKIATSVRTSLSEIKNEKHLDKITDKRIREVILPNHLRNYLDEKGKPNYDIAFSQEGIEDLNKNIVALNNGKKHQPIFKVKMYEVGSKFSVSEEKTSAKNKKYVEAAKGTNLFFTIYWDEEKQKRNYDTVPLNEVISHQKEVAKLPKEIRTPIQPKAEKGKFLFTLSPNDLVYVPTEEEIENPHIVDFNNLNKEQVRRIYKMVSSSGNQCFFILSNVANTIKNKSEFSALNKMEKSIDNLMIKERCWKLKVDRLGNIIDIIKG

SEQ ID NO: 7165 - protein, 1063 aa, unidentified
  REGION 1..1063: note = Description of Unknown: Cas Enzyme sequence
MSATGKRDLIFSFDVGHSSIGWNVLKETENKPEEVALGTVTFESDGCLASKRRVHRGMRRNIRSRRLRIADIEKLFVHQGILSAEEIEEKHKPGAGSSSPWLLSAAVLASGGNFTLKADELFDMVRWYAHNRGYDGNRRWAHNVEDQEGDSKREQSAFALMDEHKTSTMAETICAQLGLTPGGQQKASMAAYKDSEIGAAFTRKIVVAEVVRVLQAHLGKINGCSTEFIDALCGQDDEAWKTITVPNLGKPKTYRGGLLFGQKIPRFDNRILSFCPVSDKPTPLKSCAEFMDFRGAMFLSNVRVGASAGFDLRPLSSDELNSLWAKMKERGYLTAKQFKDAVRALAGVEKDNLEALMMIEPADKNLVIDPSLKLLSSSTVLKSIVSLLSRPVRDEILSSLRKKHGVTIFEMIAEVPASAEMNQALNAAFKKDTKGQKKYGIQDRWVNERTFGAEFDSGRAPYGRPVMTQAVEEILSGKDPRAEGGCLYLTEEMLKRHEGRSLADLTNNHLVRHRLMILQRLFKDMVKEFCDGDKERILSVVVEVNREVSSMSGKSMKLIKQEEGLKRADHNKASKLMEAAVEESGENIRVGAGLIRKARVAQDLNWTCPYTGEIFDPLALIHSQVDLDHIIPRSERLSDAMAGLVVTFSEINRWKGARTAYQFISEEQGRRVPGKPNLSIMSLKSYEEFVGKLKISGVHDADVGRRKARKGYLMLPSYQDKEFTPRDLTISSYVAKLAVGQIKKEFSELTRRPSVISLPGRLTGEARKAWKLLGLLSAVNENITGETPKNDIRGLTHLHHALDAAVMGLMAHCADNLSDGTTWQLLLKRNLRPDEKNRLKANMRNIAFDGNRAHLLDVPDGIKKQLQKCLMERRVVQHVPASMDGLKVEENTRGVVGFDEEKGKVKLRQMGNETEEVSGKLVGYKTDGSKLEKQKGVRVINQNFGVALTSPPQIITWHKVFPKLKEIEQETGTWPQVLRNGMLICVPEGNYAKVSKVWKIFSLKNNASGMAVDMGYADSIKPFKINVLLKSLIKDGLRLVESNFSGEGICHITSSILAVQPSD

SEQ ID NO: 7166 - protein, 1049 aa, unidentified
  REGION 1..1049: note = Description of Unknown: Cas Enzyme sequence
MKEKKNYRLGIDMGATSLGWCMLKLDKDNKPCGIIKMGVRIFPDGRDDKSKEPLNVTRRIARSIRRNRERYKRRRLSLLRILRENGLMPEDIADSKKLEKLDPYELRVKGLDAKLSLYELGRAIFHLNQRRGFKSNLIIDKADNDSSAMKNSIEELKNKIKSSNCRSLGEYQLKINLDLGKHEQHKREAIRVRVTGTEKNKIYSIFPERPMIEDELKLIWEQQQSYYPKLLTDELLTRVRDRIIEQRPPKPQEKGKCIFEPKEDRILRCNPEFQMFRILQTVNQLELRDDNGECFDLTLEQRQILIDYLKTKKKAKFSSLKGKLGKQYKEGYTFNLESEKRQDLQGDETAAVMAKKDNFGVQWHNLSRAEQVKIIRLLMGEEQDCTTREQIGARLKKAYVLSEEQIDNCLETHLVTGTGNLSEKAIRKIMPGLEKGLMYHEACEEAGYKHSGDIIKAEYQSGNLPYYGKVMPNHVIKRESAHLDNEETKYGKISNVTVHIALNQLQKLVNAVSKKYGAPKQIVLELARELKLNGKQKEELKKRQNRERAENERIREELEGIGIKNNYQNRLKFKLWEELNSDPQKRCCPFSGKTISISELYSEKAQIEHILPKSKTFDDRRINKTLAWYKANQDKRERSPYDAFGKSPAGYNWDEILMRAENLPKVKYERFFSDAMERWGDEGEILSRMLNDTRYMSRIAKEYMGNVAGSNNVWAIPGGMTSRLRYHWRFNKFLSDENVKNRDDHRHHAIDALVVALTSRAMLQKISHQIGRGNDRFIENMPEPYPDFEYEKTQTIIDNIMISYKPDHKFAEGKRSSFISGGRLHKDTAYGLREIVDKREYHLHVRKPVSEFTKSSKANLIADPHIRADVENLIIETGNADDYFREKRINKLRIIENKNLETLVPITNEQGEKYKYFLSGNNYCCVVYCPDKGKKAGKWQKETISMYNAHQKDFIPQWKIDNPTAKKIMELYKLDIVIIKQDNLWKVKVVKRIYLSKNQICFHDINIANPTKDNLEFIAIRDLQKYQAFKAGIDILGRINPQVPTGEDS

SEQ ID NO: 7167 - protein, 1564 aa, unidentified
  REGION 1..1564: note = Description of Unknown: Cas Enzyme sequence
PSAYSLIVIRCNMPTKIINYYFKSKIIYNFIKLFSELIIKYFQIMTILGLDLGTNSLGWAVVENENNEIIDTGVRIFPEGVVAKTLGMGDKEQSKNATRRDKRQMRRQFYRKRLRKIKLLEVLIEQQMCPLSTEDLKRWKNWDRKEKTDGKVFPSNSQFVEWLKLNPYILREKALKDKLTLNELGRIFYHLIQRRGFLSNRKGKEDTAIFTKGKPDENILSINETKEKIKNSTLGSYLNSISFKENVPYKTIVDESGKEIRLRGRYTVRDMYIAEFEKIWNLQAELLGLNKKQIKVKKIREYKGSLVANRNKNRINYLREKFGKNNVEISETSKKGISKVITYSFMTLKEFLGGEIKEIENENGDKILNFKSNESILFWQRPLRSQKGLLSNCRFENDLHVIMGNGEFLKNSKGEIQKRSKKPCPISHPEFELFRSYQFINNIKYSKNPILTHEQRQVVLDLINSKENNFDFVEIPKKLKLTYEKFNYGDKQKVPGNITIKKLKPLFDKEIWEAHYEEIWHCFYFYDDDDKLYKKLEKDFAIKKDIETIKKIRLKEGYGNVSLKAIRNILPFLEKGYQFDRAVILGGVKNAFGKRWKYFEEFHDNIEKEIISILKEDNKEGEAIEKIKEHLASPVFNYGFTENDPWFTHLYHHSQEVEKKGELKDIVPEIENLRNPIVQQGIYETRRLVNTLIKKYKKERGSKFYFDRINIEMGRDLRNNKSQRQEMSFRINENNNKNNEARERLAEFGLQASRENIQKYLMFKEIEERAGKAQCPYTGKIISIANLLGRDNVIQIEHIFPFSVSLDDSFGNKTLCEANFNREKSEKTPYQFYKENPDPKLWGVSTWEAVEERAFRVLPYRKAKRFTTKREFEKSDFIERQLNDSRYIAKKAVEILSHVCKDVRVMPGQLTAELRHLWGLNNILQPAQQIDSQMFEVDEHNSIPYYVVTNEKGEALHVQRKLNQRPATNSNQILATGYVNNNKFSSKFFKIDMETPELQNGKYWAKLNITDKIKLIPKFINKPETDNDEIVFKGKIENGVFKNDTYGRVKTILEEGSYWAKFKILNTKFEEPQKDKQPKTKRNQILLFGNVINGQFKCFIYQCETNLEDGKYWIILDLNPDNIEFIRSVNPKPEIEQHQLLITATIDEQGLLVADIDKEYQVTTNKKSGKYYAVLEIESKEPELYNVENEPPKIEKGENILEGNTWVDKYTGEIKFDPKKNRDDHRHHAIDAITIALTEQGYLQRLSTYNAQRKEKQRQKLDSTEKFPEPWLGFDKDVKSAVNSILISHNKNDKTLTKNKKGFSVRGQLHKENVFGKRQAPNQEQAYHRRTKITELKNNKSVNKVVDITIRELILKHLKDNCGIDINNPKGFTVPKDAFYKEGNWQIFLPNKNGEPVPIKKVRKMENIGNATQLKSNINQFVNPRNNHHVLIYRDYDGNLKEDVVTFWTVVERKLQGSEIYQLPEDGQSVVEILETNGMFLLGLCQDEYESNKNNPVFLSKYLYKVEAVSSKYYEFRHHLESSQKREYVPYYYIISSLGIGIKGWQTFNPIKVTINVLGKIINI

SEQ ID NO: 7168 - protein, 1402 aa, unidentified
  REGION 1..1402: note = Description of Unknown: Cas Enzyme sequence
KYFQIMTILGLDLGTNSLGWAVVENENNEIIDTGVRIFPEGVSKNSSGKEVSKNVARRIARGTRRRNYRFKVRRDKLIRALRRCNMLPGDKHYSYKKNDQKNHTIELFKLRKDALDKQIRLEDIGRIFLQINKHRGFKSNKKEDAVIKADKEKEKEAEGVIGTIIKLEKRIIEYECRTIGEYYNFLIEQNKNSYNPNEPKKINVDDIIRGEGAYTSRELFEKEFDLIWEKQKEYYPKIFTEENEAIIKNDCIFYQRDLRSAKHLRNRCTLEYKKYFSKEKGKYIFNYLPCSSKSSFEFQEYRIWEQLNKLRYTNTFGTHQELTLDEKKKLALRLHVVEKLNLTAIKEILCFERTTKFNDIGDHLIGNVTQARLIQALGEDFWLNKTNLEKAKKFEPLKYSKIQYQLWHNIEFSKDKKWLLDDKEFMEKTHKRNKRQANRKKKEYKPYQNWSENIGILGLSNEQIEEYAITTFEPGWANYSSKAINKLLKYMKQGYDPVNASYEVYGDYASKLQNENVQLEYKVPFLANNSLKNPIVEQSVRDAIKVINAIIYKHGKPGKIHIEMTRELKMPKKAREEMRNRNATKDKAREEFAKFLSKKLNRNIDKTSPDIKKFEMFLELNYTKEAFEGNIKGQISLKEIKDFFKLKIPSDKTKYYLWLECNRMDPYEGKTIRLSDLFSPSVEIEHIIPYSICGDNSFLNKTLSFKGFNAIKGNKTPIQYFEDKPNEKRSFEKRIAKSHFSDAKRDRFLMPTNKIDQFRNSQLNNTAYIGTEVRKHLLKSFLNKDIEITNGKMTSLIRRFLGFNGILNEPVQVSELFRNMGKVWAVINDKREIVDYLPREDDSEPNNLKVIKGVINFQTFYPSKLRDDHRHHAVDALVTALINKKISNSMLSCTEGYVDFNTGEYYSKYFTDENGEHRLTREAIGQIKEKLREELSLSELDELLPKAKEKIKQILVSYKNEKLNSLVRKKLFEPNGKQKTINKNGEIYQLRSSGLGVRHELHEANFYGKTNDCKPNEYVKRVKLSFGKSGNYFKQESHFENIVDKGVRDAIISKINECALKYAKEKLIPFNISMVDFREIRKKLDSSNQGLIDLKSEEQKFRKEIKKKQEKLYGIKTSFAKQERKNLQLLIKEFLKNINFQKHIKEMEIDNNKNELNKYEATYNKLFVIGAKIASQEGFRLKNEGKRQKRKGKSNSFIQREDIPIKKVRIKYISNTAIPVKSKSQIINITPQSQKVIDESQYQYVLPGNNYSFIIYGNDYNDENKKYHVVTWFDKARIDQENIRRKKDSKELKSYYPKTKDGLPFLIQLSHKDLVIAFNENEDVSNISIDKNELFNRIFVVNDFDQSGKIIFTRHNKCLNATATKASSVGNNILLGDGEVLRRHHDTFKGIPVRIDILGNLL

SEQ ID NO: 7169 - protein, 1092 aa, unidentified
  REGION 1..1092: note = Description of Unknown: Cas Enzyme sequence
FGHFIADLMDQRRQHPLNADGQPKTDKCFHDAVRNRRDAFEFHADRALIRAEFDAVWTAQKGFDGPLAPILTDRLRGQLDDPTGDDNWRHRGVLFGQRRTYWDTGSLGRCNLEPADRCVPVADMYAQRFRVIETANSIRIETRDGTSRPLTGEERDKVIAVLRKQKIATPKTIRKALGIHKQALKKKELPEDFYALNIERDPERQINTDWFWRQIVVEGVGEAAWDGMTGTQRDSLNRAILKFDPQIEDDAERLRRGSKNWWKLNPDQAERLVSGWRTRPVLEKRLSLSRRAIINLLPYMERFDNVAGRWPTQIEARLAFAEDPGSPATRQQRMQYAMGAHALTKADRHYLRKHPDLLPPAPTLSNPVVRKAIHEVRRHVLAYLRRFGRKPDRVVIEFARSAKQSGKVRQAALDANRLRDRVRKAIIEEFQLDRRTFNQQRAAVDRVVLCRQQRNICPYTGRTITDQQAASGDDVEIDHIVPYSRCGDNSLNNKVLCCRQANRGKGRQTPKEWLGEKFDEFLQRLAHIQKPARGGLEYFSARNYARKWENLNRDVRPEEEWANSQLTDTAYAATQVQAYLKDALYGDANDGTRRVFVTKGVYTAMLRRDWQLFQTLADPSPDAEPDGSSQRQSRGAKNRGDHRHHAIDAAVVALTGADIIPRLARQAAEGEDYHERTGDWAKRMPLDPPWGTVEQFRRDILGRLFDIFDPSDAGGDPESGQALVVSHRPVKRRVIGALHKDMPFGPVLGSKNQFVKRIGILGLKPGHLRLPLPEKPRDAITRLSERYQRQGLPAGDARKKARDVVKSDAYVAKMVDPPPSKSGLVRDRDLRRRLRCAINDGLADLGAPRDADSFTAKDLKTLVDLDALRMPSGVPIQRVVLLWTLSDPVRINRWEWDPKQLNMVVNAKPRAKRVYDSQNNHHIEIRQDARGRWEGKVIRTYDVAMCNAKRLKALGAAGVPPGAVLRKMPKSKRAQLRPIIHRINRDHPLVDRSDHGDHTFVMSLAQGETVYMRHPKTGQPDYFVVFKLDKPRTIHFMHHWDARQPQSARGNPTREDVHLTPDKLRNLGVEPGQPPYKVRVDPLGSVRRLEKD

SEQ ID NO: 7170 - protein, 1278 aa, unidentified
  REGION 1..1278: note = Description of Unknown: Cas Enzyme sequence
MNKILGLDLGTNSIGWAVVERENIEFKLLHQGVRIFQEGVKIEKGIESSKAAERTEHRSARRLKYRRKLRKIETLKVLSEYGFCPKLTDDQLDDWRYRKIYPGDLAFRHWLLTDIGESKNERQKQISNPYYYRNLAVTSKLDLNKQEHRYRIGRAFYHIAQRRGFISNRLEGTKESDGAVKESISELNEAKGGQTIGQYFYEKYRKGEKIRNVYTHREEHYLQEFNAICESQNLPGEIKQKLNKAIFYQRPLRSQKGLIGKCVFEPDKPRCSVSNPKFEEYRMLCFINNIKIKTPEDEKLRSLNKEEREKVLPLFYRKSKPSFDFEEIAKVISPKKHYKVFKSNDIDPKDYLFNFSMKTAVSGNPVSARLKELFGDGFLDVQFEYTREKDKKRSVIDIYDIWHVLYTFDSDNKLKEFGKNRLGLTDEQAESFVKIHPKHDYSSLSLKAINKILPYLRNGMIYSHAVFLANMDEIIPGHIWKDDKNKEIISREIFRIMQTQNEEKVIIDIINGILKNARDEKFVWSNEAEALYKKELIRKISKQIGERKFSSFSDEKKNYIENTAIQMFETQMKRKMGRGEFLQSKRIDDRVKSFLTDNFNIREDHLDKLYHPSANETYNPPVKGDDGIYLLGSPMVPSVRNPMAMRSLHQLRKVINELLRNDIIDKDTKVNIEMARELMNANERKAYQSWQNDREKLRNSYYERIKEHYLSSGSNIEPSEEDILKYQLWEEQNHKCIYTGKEISVSDFLGSGPSFDIEHTIPRSLSFDNSQENKTLCNNVFNRDVKKNRIPFELKNYHEILLRIEHWKERYEELEKQIQNTIKQARGNSEKEAKDRIIQKRHRLKFEHDYYFNKYRRFVMENVPEGFKNSQIVDTGIITKFARLYLKTLFTKVYTVKGNTVADFRIIWGLYKEYEKKQRVNHIHHCIDAVTIACITKESYENLANLYHEWEELEKAGIDKMPKVDKPWPSFAEDLKDLEKRLLVSHYTPDVLPKQSKKILRKRGIIQYNKKGEPIYQKGDTVRGSLHQEMFYGAIKREIQNTKGERAGYDLQIRYVIRKPLDTLSDSNIVNIVDDRVRSIITEARKKEKEMKQELENLNKQLNNAEEEEEPDIIRKIEDIKDKITKLYSMPNKNGDPVPVKKVRIFTPTVTNPIHLKEHRDTSKKKSFPYKEHYHVVNDGNYLMAIYERRDDNGKIKRDFEIVNNLKAAEYFKLSVQKVLKPQDFNKYEGLIPESKINGTVVMPLKGILKIGTMVVLWENNPEEVWDLENKEISRRLY

SEQ ID NO: 7171 - protein, 948 aa, unidentified
  REGION 1..948: note = Description of Unknown: Cas Enzyme sequence
MDIHENRTLGIDLGIASCGWAVIEQDEDGGGRIVAMGSRTWDAPETDKERTPTNQLRRGHRGMRRVLKRRRQRMSEIRRLFRHHGLIEVQGPTGLRIAELDPWSLRAEALERKLTGPELAIALGHIAKHRGFKSNRKGERGANANDDSSKMLKAINETRDRLAQYRTVGEMFARDDLYVARKRNRDGQFTHSVLRDDQAREVTLLFDIQRRAGSLLASAELEAAFVEAAFFQRPLQDSEHLMGQCPFEPTEKRCARRAPSFERFRLLSRLRTLTLSEGREERPLTPDQIARAEADFGLQKSFTFRTLRHRLDLPEETSFSGVARADEGRDFVGRTSNAAEGTASLRSLIVDAAGEGAWRSLQNTPEKLDAIASVITFREDIESIRQGLTQIGLEPVVLTAVMAAIEDGRPLKAFSGAAHISAKAARAMLPHLREGLTYDKAAAAAGYVHTDRAGPGRSEGTTHERMVHDITWVDANVSNPVARKAVIEALKQVHAIVGVHGLPGAIHVELAREVGKSKEERDEIKSGIDKRNAAKDRLRDQFKETCGHEPSSTEDLLRFELWTEQGGRCLYSDRAIAPHQIATSDNSVQVDHILPWSRSGDDSFVNKILCFANANQNKRGRTPFEWFGDDAARWEAYRGAIESNKAMKGRKKRNYLLKDSSVLTEKFRPRNLNDTRYATRLVLDLLARLYPESDRFTGVPRKPEDERRKRRLFSRPGPLTDRLRRAWCLQGLKKGGDGKRITDDRHHALDALIVAVTSESRLNHLTKLVQERENAGLPRDFGPVDPPWPGFRDEAQTMMREVFVSRAERRRARGEGHKAGVQSVVDSKDGSVVYERKTIDEKFTFEDIARIKDPERNLALVATLTEWIKAGSPKDKLPVRRYGGVNNAGLQKEPERFEEIRKVSVLKNSFPAVRLAHGGKEGNPGTADRSTIVRVDIYENGNVRARSR

SEQ ID NO: 7172 - protein, 1423 aa, unidentified
  REGION 1..1423: note = Description of Unknown: Cas Enzyme sequence
LVTRRNRINVTDGFVKGLALGFHMPTYLGFDIGSNSVGSVWTDTDSGEITAGVSIFPAGVDESDDKRGDPKNAKRRMTRRTRITLRRRATRKRELRLKLIEVGLLPPTSEEFKRLLETTDPWELRRRGLAEPLTAHQFGRVLLHLAQRRGALGLKLAEPDETDDGDSGDDGKVKAAINEVRAKMRDLNVGTFGEFIAAIRAQRVTAITTPDRRPTDKRKGPREFRAAVRNKPGIYEHCADREMIRDEFRRLWDKQKSLAGEPAPLLTDELRRTLDDESGDAIWRHRGLLFGQRRASWDLGTLGRCVLEPTERCAPHADMYASCYLVIETVNNLKIIERGKPPRPLTVEEREKIRAYLSGPLGMEKPKKTKKANGSAAERPKTKVTVSDLRRLMGTADEGWGERFSKHSQFRFNIEADENREINTDWFSREIVHGAVTLDKWSAMRANVREGINRAILKFDPEQEGAAERLKSGVMTWAALSETQADALVAAWKRRPKLDAKRLKMSRRAVCKILPYMDEAFTEVDGQDGQIPVRWRKDTAFDPARHRWMTQIEARKAHAQAVKRKLTEALLEEGLSSSEAHENAENSPEFKRYATGAKGATARDRHYLAKHVLYHNGEPVLDCDGKPLAEPPPAPLLSNPVVRKAIHEVRRHLVEYMVTFRRRPDYVFIELAREARMGKKDADRLLFKNRLRNRIRNDILEEFNLHSVSATQQRAAVDRVVLAVQQGCICPLCGKRIGPDGNDGLTLRKAAIGEGCEVAHIIPRASGGHNGLGNIVLAHTKCNREMERRTPRQFWELTLPGGFAEGIAWAEKMYADVERPKASDMKNANGMALWSCYFRAWDDKAKLDQFKKEVKDIREMTARQEAATKYATRQVMAYLADAIYDGKGLPERGGERRIFTTDGIWTSRLRREWGLFFDRHDKKRKGLTTEQEQQRREKDRGDHRHHAIDAVVIALTTEQVRADWDKREMRADVEGVNTADEQQMENYRRAHPISPPRPFNTGDKLREAVEDAVFGDGPVERPVCHRHVKRKLIGALHKATQYGPVVDVWKQNGTVHCELVKTRVTVRQAVIGEAPTDFLKPTHLRLPREESDDEAIERLARRFRVGKKRLSAPEAEKAARRFIKSNAFTRRIVDPKPEKGGIVRDPGLRRLLRRRIEQRGLNPDSFTKVELKRSIDLHGPLTQDSGVPIHSVVLLWSNNDPVTVGRDHCDYATGKRRKLDDPTSIRLYDGQNNHHIEVRVRANKKGVEVWKGEVVSAFEAAQRKLAKLRAVRKADIPKPTDFRKLSKAERAKYRPLLREIESAHPLVDRSDNEKDGRFVMSLCEGEMLMMKGKPAKKGEPPGPVGYFVVAKLDKPNGIVLVPHWDARAAGERKDAEGKKVPNSKREQFTATPSDLKELAPPGKPHAAKVRVSPLGKIAELVRD

SEQ ID NO: 7173 - protein, 1116 aa, unidentified
  REGION 1..1116: note = Description of Unknown: Cas Enzyme sequence
MDSPTDHAYILGIDLGSTSAGWAVVRLIDGEPAGLLRAGVRIFEAGMEGNIESGREESRNATRREARLHRRQLWRRRRRLTKVFNLLQHFGLLPPIAPPFRAAGVEGEDAGLKPGATSGARRAPLQKVQQTADRRQDFLNQLDQTILASTWFAEKQKSVALKEPMQIMPYLLRAAALDERLDPHFLGRALYHLAQRRGFLSNRKSSTSNDKKKDEGPVKEGISELRAKMQESQARTLGEYFAHLKPSEQRIRGRYTHRSMYEEEFALIWEAQRTDHPDLLTEERRKQLKNALFFQRPLKIPRSLVGDCELEAGSKRAPRYLPVAQRFRMLQTVNNLKVLPPDEAERDLTREDWTKLTQALEEQGDRTFAQIRKLLDLPKTYSFNLERGGEKRVPGNRTNAAFAKVFGARWREFTDAQRQEALQDVLSIQKPEVLKRRGMHRWGLSEDAASAFAEITLEPDYLSLSRRAMERVLPLLEQGMTYAEARKQVYPEVFKPREPAPLLPAVSEFKEIRNPAVIRSLTELRKVVNALIRQYGKPQGITIELARDLRNTKKQREGMSKRMKDQEDLRKKMAERIMAEAGIPQPVRRDIEKALLWDECKGVCPYTGRSIPFRALFGDAPQFDVEHIIPFSRSLDDAFSNKTLCAVDENRNVKTNKTPFEAYGQDEGRFEAMLDRVRRFNGGRELVAAKLKRFQLQGEDLEIYLAEFKDRYLNDTRYASKLAADYMALLYGGRVDEEHERRIHTCTGQVTAYLRSLWGLNAILNDGPSAQGGAVPKSRADHRHHAVDAVAIALTNARMIQRLSLAAEHAPLARRRRFAPLEGPWPDFVESVRAEIDHIVVSHRVSRKVSGALHEETIYSPPKPVAPVYDRREKANGEGRRSQSGATDVRVRKPLDKLTKPEIEKIVDAGVRKLVEAKLAELGGDPKKFPPPDEHENLDRFPCFVTKDGRRIAIKRVRINKAVPVIRLGEGRAARHVASESNHHVEIYAELDKNGDEDKWDGEVVPMYEAYQRLKAGKPVVQRDHGPLVRFKFSLAPGEIVECDIEDGKRGLWVVRGMTSEKGSPRLFLVRVRDARKKSDITKSGLYWRPFLNPLRALRPRKVAVSPLGEVTEAHD

SEQ ID NO: 7174 - protein, 1091 aa, unidentified
  REGION 1..1091: note = Description of Unknown: Cas Enzyme sequence
MSPHSRALPHAAKDWVLGLDIGSASIGWALIDPAGQRVAAAGVRIFEAGADERGFAEGKEGSSNNTARRAARLHRRQLRRRAGRHRELFLELQRAGLLPAAEEGGRTGGSAARHAVLSRLDDALRAEWVERAAAAGVPAPEQVWPYFMRAWALDQPLPPFALGRVLYQLAQRRGFKSNRREAAGGATSKQAAADEKSTVKQGIATLQHEITATGARSLGEYYSRIDPFALPLRRRWTHRDMYRSEFALIWERQAATEARLTPELKERLERLLFFQRKLLPAKPGKCELEHDHLRAPAAALVAQRFRLLQKVNDLAVVLPNLDYRPLAADERQNLLLALEGEGDLKFTEIRRRRLVDCPRGAHFNLESGGETKIPGNRTAAALRLIFGERWDALADGQRESVVALWLAAEIEDDELARIGREQYGLDDAAANAWAQSEPEAGYAKLSARALARLLPLMEQGVPFKTAEKEIYGSGNSGGTAYDRLRPVADALPEVANPAVMRSLTELRKLINALVREYGKPGEIRIELARDLKRNAQQRAALAKGMRQRESERKAAKKAIEDLTEVNIPAPSAADITRRLLWERCGKACPYCGGVIGFSELFGGAADVEHILPRSRFPDDSFGNKCIAHRGCNTEKGGRTPFEAFSGDPERWAQILERVRRWNDAGKLKAFQAGADELDPDREGSFAARRLNDTRYTTTLAARYLGQLYGGRDEARPDGSLRRVVFASTGLVTATLRRGWGLEGVLRQPDASDNGRSPGKNRDDHRHHAVDAVVVALSSNATIQQLSRAAAASASATGVERISSRTLQGPWPDFVDRVRPAIDAINVSHRPQRKLAGELHQESNYSRPHMLGAVGFVHIRKPVHRLSVAQINAGDKIVDAAVRQAVQAKLAALGGEPKRLEHDSPVLLTRAGRSVPIRSVRIRAEKAASSRSIGTSDRQRQVLLAGNHHLELFEGRDRRGRDAWKGQVVTRLEANARRARCRCGRGRSCDCVVTRKFEREEGYGFLFSLMGGDMIEMSESGGAASRFVVRTISAYADGRVEMALVAATNAARVADVRAAGQLLRITDMNDLRKRGCRKIEVDLLGRIRGAGG

SEQ ID NO: 7175 - protein, 1092 aa, unidentified
  REGION 1..1092: note = Description of Unknown: Cas Enzyme sequence
MTEQPASEYILGIDLGSNSLGWAMIGLIDGVPAQVVRAGARVFEAGMDDTKGLGNEESRNKARRDARLHRRLLWRRRRRLTKVFNLLQGFGLLPPAPEGLSEFSGSGHRPPLLPDQRQDLLNDLDQQILTSAWFQAKASSGLFPEPKHTLPYILRASALDEPLEPYYLGRALYHLAQRRGFLSNRKQVAKKDDDEGAVKEGIAELRKAMQENHARTLGEYLSRLAPSSERIRSRWTARDMYAQEFTAIWDAQAAHHPALLTAAPKKEVYNAIFYQRPLWFDPNTVGQCELEPGQRRAPRSSFVAQRFRLLQAVNNLRIELPDGSERNLTTGERDKLVQELEIKGDRTFAQARKLLKLPKDARFTIERGGEKTLRGNRTTAEFCAVFGQQRWLEEMSAEEHDQALNDVLSIQKEGALQRRAVQHWKLDEESAKKFVAISPEPDYFNLSRKAIEKLLPLLETGMTYAEARKQMYPESFEAQEPKPLLPPVERALTEIRNPAVMRSLTELRKVVNAAVRRYGKPAYVHIELARELKKSKKQRETISKNMRHNEKARADAAREMLANPGIAQPRPDDIRKFLLAEECHWQCPYTGKTISREALFGPEPQFDIEHILPFSRSMDNSFQNLTLCYVPENRSIKGNKTPSQAYQGNPERYEAILDRVRKFGGDRQTAAAKLRRFTMGDDELEGFLEDFRNRQLNDTAYATSIAAKYLGLLYGGVIDPDGRRRVQATSGQATSSFRSLWKLNSILNDGPTTRGGYAPKSRKDHRHHAVDAVVIGLTDAAMIKRLSDAAQRAPLEHRRRFASLEAPWPNFTDTVRAEIEKIIVSHRVSKKVSGALHEETIYSRPFTVAPVSSPADRRPNTATEVRVRKPLASLTRPEVEKIADEGVRKLVQQKLEELGGDPKKFPAPEERENVDRFPCFVTKDGQRIPIKRARISKAVPTFALGKGRTARHVTSKSNHHVEIYAELDEHGNEGKWGGEVISMSEAYQRLRARRPVVQRDHGPLVRFKFSLAPGEVIECDDGKDGRALWVSRGVASYESGPRLLLVPLNDARKKKDILKAGLFWSPFLNPLRKLNPRKVVVSPLGEVTEAHD

SEQ ID NO: 7176 - protein, 1095 aa, unidentified
  REGION 1..1095: note = Description of Unknown: Cas Enzyme sequence
MAEQPASEYILGIDLGSNSLGWAIIGLIDGEPAQIARAGARVFEAGMDDTKGLGNEESRNKTRRDARLHRRLLWRRRRRLTKLFNLLQRYGLLPPPPVGLSPASGNGHRPPLRPEQRQDLLNELDRQILSSAWFQAKAGSGLFPQPGHTLPYILRAAALDEAIEPYFLGRALYHLAQRRGFLSNRKQAAKKSDDEGAVKEGIAELRKALQEKQARTLGEYLSHLDPAAERIRSRWTARDMYQNEFSAIWAAQAAHHPDLLAPERKKEIYNAIFYQRPLWFDPNTIGQCELEPGQRRAPAYLLSSQRFRLLQKVNDLQIELPGKLPRFLTAQERGKLSDALELQGDLSFHKSRRAKADIPSSVRDVLGLPKTASFNLQRGGEEKMPGNCTTAKLYAVFGERWLEMSAEEHEQAMQDILSIQKPATLKRRALDYWKLDEGTADKFCEISLESEYVNFSRKAIEKFLPLLEQGVPLATARKEIYPDSFKSGESKDLLPPVELALAEIRNPAVMRSLTELRKVVNATIRRYGKPTYVHVELARELKKSKKQRVAISENNRRNEKARADAARKIIAEAGITEPRPDDIRRFLLAEECHWMCPYTGKSISVRSLFGPEPQFDIEHILPFSRSMDNSFQNLTLCHVPENRSAKGNKTPHQAYSGDPARYEAILERVRKFGGDRQSLAAKLRRFTMGDDELEGFLDDFRSRQLNDTAYATSIAAKYLGLLFGGVIDPEGNRRVQATSGQATSSFRSLWKLNSILNDGPTTQGGHTPKSRDDHRHHAIDAVVIGLTDAAMIKRLSDAAQRAPLEHRRRFASLEAPWPNFVDSVRAEVGKIVVSHRVSKKVSGALHEETIYSRPFTVAPVSTPADRQSNAATEVRVRKPLASLTKPEVEKIADPGVRKLVQQKLEELGGAEPRKAFSNPENLPRFPSSGVPIKRVRISKAERPMVFGQGRSQRHVISGNNHHVEIYAELDEHGNEGNWGGEVVSMADAYQRLKARKPIVQRDYGPLGKFKFSLAPGEVVECDDNKHTRKLLVVRSVSEFTSGVIQIGFVKPTDARKKSDMIKSQGFIRIVPNRLREWHARKVDVSPTGEISEAYD

SEQ ID NO: 7177 - protein, 1041 aa, unidentified
  REGION 1..1041: note = Description of Unknown: Cas Enzyme sequence
MKLNYRLALDMGANSLGWCIYLLDESGEPHAIKRLGARIFSDGRDPKSLASLAADRRLARQMRRRRDRVLKRRHRLMQGLIRFGLMPADEAARKVLQKLDPYELRAKGLDQKLIPHQLGRALYHLARKRGFKSSRKDARDSESAKETGKVHAAISKLQEQITSTGCRTVGEYLARHHAKREPVRARRSPDGEYVLYLQRGMVEAEFDALWSAQCQYYPELLTDAAHDWLKDTLLFQRKLKPVKPGHCLFEPDEYRARLCSPLQQRFRILQELNNLRLIDGMEQRPLTLEERNLLLNKLLVTKAMTFAKLREAIGIKRSDKARFNLESEKRKNLKGDVVGCQLGVPECLGESWYQLPAERQEDLAELIEATDDASELIERLKSVPWNFSQEQAEAATRCQLPEDFGSLSRKALLRIVPELEREVVTYDVAVQRAGYTHHSQLHTGEFFQRLPYYGEILRGYTAPSETAKNPDERKHGKIPNPTVHIGLNQLRQLVNEVIRRYGHPYEVVIELTREFGVSGEHRREIEKQQAENQERNERYNGELKTLGVRQSRENRLKLQLWKELGRDDALDRCCVYSGQRLNKAMLFSDEIEVDHILPFSRSLHDGIGNKILCTRQANRDKGNRTPFEAFEHSSGLYHWNEILARVERHFAQSENRGLRRKAELFTEDALERFLGGRNFLDRHLTDTAYFGRAAKQYLSYICHKDSVWGSSGKLTGMLRGKWGLNPLLSGNAHKNREDHRHHALDAAVIGLCSRSLIQHMKAAAERAEEQGENRLLERLDLPWPAFRNDLGGALQGVVVSHKPDHGREAALHNDTNYGLRGEPDKRGTPLVGRHVLLESLSSVEKAKKVAAPELCAQLVQLLQPLSGSKEIKAALAEFSARTGIRRVLLEERLSVIPIMDRRNDKPYRYVKGGSNYCYEIFRCDDGHWDGEVISTFKANKRSYVELKTLTQNGKPLVMRIRGGDLLAIEQKGKRRIMRVAKFSEGRINLAEHQEANVAARNSNYSDPFKYLQVAPNKLRLVKARLVGVDMLGFVNDPGFRQ

SEQ ID NO: 7178 - protein, 1047 aa, unidentified
  REGION 1..1047: note = Description of Unknown: Cas Enzyme sequence
MAEASPNEYVLGIDLGANSLGWALIHTTGGQPTALFRCGVRIFESAMDGNLREGREESRNRTRREARLHRRQLWRRNRRLRKTLNLLQSFGLMPPGQCDIPSERQNFINAIDESIRQSAWFQPKRSSKRFPEPDHVLPYIIRSAALDEAIEPYTLGRAIYHLAQRRGFLSNRKQARPQAQEDEGQVKQAISDLRATMNASGARSLGEYLALSSPSERRIRTRWTARDMYRDEFNKIWEAQAAFHPTLLTDERRENLFRAIFHQRPLKFDKGTIGRCDLEPEDARAPAHLLLSQRFRLLDKVNNLLIDDTPLTPADREKLVCQLEIQGDLTFKAIRKLLGIPKDHELNLERGGDKGLPGNRTFAKFYGALGQRWLGISPEERDRLVEYVHAFQNPEKLENAAKKKWSLDDDSARKLAAISLEPDHFSLSVRAMRKLLPLLEAGLPLATARKQAFPGALKPKDPLHLLPPVCEFDEIRNPAVIRSLTELRKVVNAIVRAHGKPAEIRVELARELKKPKWAREQATQRNRANEKARVNAAKRITAEIGIPHPSRTDIRKVLLADECGWHCPYTGRPISMRSLFSEPQFDIEHIIPFSRSLDDSFTNLTLCAIDENRNRKANQTPHEAYSGDPGRYEETLARVRKFTGERSTAAAKLRRFRMSPAEVEALLGDFSSRQLSDTAYSSRLASRYLGQFYGGVVDPNGVRRVQATSGQVTAYLRNEWSLNGILNDGATANGGAVRKTRDDHRHHAVDAVAIALTDAASIKMLSDAAQRAPAERRRKFAPVPAPWPQFVESVRQQIENIVVSHRVSKKVSGALHEETIYAAGSASANERRVRKPLASLTKAEVEAICDPGVKALVVAKLGGSDPKKAFANEADLPFFAISDGRKIPIKRVRVAKAVPTFAIGHARTVRHVASESNHHIEIFAELDHDGNEVEWDGCVVPLAEAYRRRRAGEPVVRRDFGANRQFKFSLCPGDTIEWTTNGIPQYFVVRGASESRVFLARSRDARLKDAMVKARDGSYTRPSVSALRGAIRKIAISPLGEAAEAHD

SEQ ID NO: 7179 - protein, 1486 aa, unidentified
  REGION 1..1486: note = Description of Unknown: Cas Enzyme sequence
MAKILGLDLGTNSIGWALIDDYRKEILKAGVRIFPEGVNDINTSKEKSQNADRRTARGIRRNNYRFKMRRDKLKKVLAELGMMPDEKYYTNKKKTKGEIIYLTQDLYKLRKDALEVPLRLEDLGRIFLQLNNHRGFKSNKKEEADKEFTNKIKDADKINTIEQKESTLFAWQKKKERILKEIEEIKKSLKKDAAKKIKVREKRVKAIDKKINEIEEIKTLQEKIDEAKKQHNIKHGTLGEYFFYLIELNKGSHNPNEPISKIRNNDAGEGEYTTREILEFEFDKIWQRQIELNKNSENILAVLNDENKRKIKDQCIFYQRDLRSQKHLVDKCNYEYTEYFIYKFDNNKLQQQIDSITYSSSEISPNYLNENQKKLLFDHLEKKNQITVAEIKFIIGLKDYYKNEDGKLKNKLIINNLPKEKYLERDYYPCCHISTLEFQEFRIWDKINNLRYADEDDQVYELKPEQKQILADKLHNSISLTIETGNKSSDDEKEEAAEVKELLGLSNNYKFKEQKLKGNVTLTKLKDALGEEYWNFLNPEITEPEIELVDKSSGEVLKANTPIQYSNKQKQLYNNIVFAMNFIKSIDWLQGKGKARKWKETLNKLGLTEKDNKIQLEAYSKIYIEPDYCSYSLKAIKKLLPWMKQGFNSAQAAEKVGYASASDERKNDEYLQDRLPEIKNNALRNPIVQRGVTETVKLINAIIETELEGNKPDQVHLEMARELKKRKEARQEAKRKNDEKEKERNEWKEFLKQKLGNAPSNSTLSKFEFFLELEHQRVNFEEIKNQIGVEEFIKFCKEVMGETILLSKEKFSELKNKLNKKDSEENEDIEANEIKASNEEQEKEKTKTEKNNLRLLKYRLYLECNRILPYTGKPISLTRLLGENSDIEIEHIIPYSRCMDNSFLNKTLSDSTFNKLKGKQTPMEFFESDPQAKKQFNSRINRNKNFSDEKKKRFQLEGKEELEKFKNSQLVNTAYIATEVKKHLLHTFRRDDIIMPNGQITAMLRGFLGFNKVLNPPLRVTTDPDKGRYWAIINQNNGIENLIPITKENADKKPKSENESWKKVLEGYVYEGQDGKRFQPKKQRNDHRHHAIDAITIALSSIKISKIIQKNTEGYYIKNGKQIQKNEEGCMWVKKFDENGELTTEARKNIIEEINAELKFRGLWWDVKNTVDYIPVSYSNKNRIVSSGRKKIHKNKTTFFSGGGVARGALHDESYYGNIHYPHSDKIEWQEKANGVYVVRKALKYNKQGYFGKIEQLEKIIDPIIRKMIIQKAEKIGLKEALKEGIKLPNKNGESIPVKKVRIANDAQELTWIRQHKQGDKENKKKVWIETGDNYCIALYGNKVLDKKEKREFKMVSFFEAVRKTKRGESLFPQEYNGKKLFTFLSKKDMVLVYKEHPDEVTHLIGKKLEEMPQADQELLFKRLFVVRKSDKNGIIVLSRHYLSGAKKEEDISVKDLDSLEGKKLQCNPNTFKGVKVLVDVLGNIS

SEQ ID NO: 7180 - protein, 1016 aa, unidentified
  REGION 1..1016: note = Description of Unknown: Cas Enzyme sequence
MVRILGLDGGIASIGWAVLDMNANAGTILGAGTRMFDAPETDKQRTPTNALRRQHRGQRRVIRRRRQRMTAVRQLFVTHGLLTDSGREALAAPGLDPWALRVAGLDRALSSSELSVALGHIARHRGFRSNSKRDRGNNAPGDTSKMLKAIAATEARLARWRSVGEMFVQEPEYAARKHNRDGDFSRSVLRRDLESETRTIFSAQRRLGNPDATEELEAAFASAAFDQRPLQDSEHMVQSCPFELTEMRAARRGYAFEMFRLLSKLNTLRLVSGGTEQRLDADQIAAVARDFGHQKKITFKSLRRLLDLDPRARFDGIAPEAEIHDVVARSGNAAEGTAALRQAVGDGGWRVLMGQPEQRDRIAEIITFRDDPASIRRGLIETGLEPVLIDALMLGVAEGAFAQFKGAGHISAKAARALLPGLARGLMYSEACEDVGYDHAARAEVKLEDIRNPVARKALGEMLKQVRAIVREYGLPDYIHVELARDVGKSAEERDEISRGIETRNKEKDKRRAEFAELLYREPDEAELLRFELWREQNGRCLYSDEAIPLTALVATDNTVQVDHILPWSRFGDDSFFNKTLCTARANQEKQGRTPFEWFTADRTPAEWDAFAARVEGCKGLRGRKKRGFYLRQNAAEVEEKFRSRNLGDTRYATRVLAGLLTRLYPADGQRHVLARPGALTAKLRRAWGLEDIKKDGAGKRRSDDRHHALDAIVIAATSESMLQRLTRAAQAAERSGAPRGFDFGEVKEPWEGFREAARAATAAVFVSRAERRRARGEAHAATIRQVRERDGKMVVYERKRVADLKLADLERMKDGERNEAVVAALRAWIAAGKPKDALPCSPKGDVMRKVRLATDGKVAVELRGGTADRGEMVRVDVFREPGGKRRDRFHLVPIYPHQVADRVGWPKPPDRAVVAYKPEDEWTVVGPGFAFLFSLYPNNFVEVIKSDGEAIRGYFKGAHRGTGAINVAEHHSANDTHNGIGAKTLLAFSKLSVDRLGQTHTIAKENRTWHGVACT

SEQ ID NO: 7181 - protein, 1314 aa, unidentified
  REGION 1..1314: note = Description of Unknown: Cas Enzyme sequence
MGNILGLDLGTNSIGWAIRDLDSDTEDQIVDYGVVIFNKGVGEGKSGEFSLAAERRTNRSKRRLYNAKRYRKWATLLELSKNGMCPISEEELRLWSIGNWQNGKNRGRVYPTSPNFIAWLAMDFERIGKDFDHNVKLKPAYTNTYALRCDLLGNKSEDDILRLYKISRAFYHLVQRRGFKTSRKSGKTSYANNELFKKFKEAHPDKVDWKPSQIYLYLQSGRDPNPELRRDRIRNNAVIQRGLNEDEFFTICKKQNIDEALTNKIHKAIYFVRPLRTQKGLVGKCTLEKGKTRIPISHPAFEEFRALAFINNLQWRDTNTKKTFVPIPISLKKQILEQLFFRRKTKGKDKGKVDDSGSMAFDEIIDTFSENGTTEFNFRNKPNISTCPVIAGLMNVFDEEWKDKFIMDENKFGINWNGLQLVYNIKYNGQIVKNKKGKEEKKLNYEEIWHLLFDYLQTKDDEEGLTNFCKEELGWDEVRTTEFSDITVSQGYGSLSKSAIDKIIPFLQQGFIYSEAVSFANLSKVLGKENFENNKVAITASIANTIKNTDSIKEKLNIINGLIQAYFAEATTNRAKGFNGTIEEINAYRTEVVNALTKYFGESNWNEKNDGEKNDYNEFILDKYLTFLSGKQTKEEKASAGINKNPEIDYYKLPRLDEAIKQTLRANFNATDTGLKKMYHPSDIDIYPKAKNNWLEDPNPPSKGWKNPMAMRTMHELRKLVNYLLEVGKIETETKIVIEMARELNDANKRWAIQTYQRYREDENKEFAKAIIGVAKEKYPDLNENDADNIDKVRLWWEQLENGEEVYKTIKALKEDVEKYRLWKEQECQCLYTGNMIKIADLFDGTSYDFEHTLPLSQSFDNSLANLTICDATYNRSIKKNNMPSKLPNYEEEANGYPAIFPMIKKWIAKVSSLKERIERNKLDTKKAIRSGDIERKNYLVRTRHLLQFDFDYWNKKVQTFTLTELPNWWKNSQLIDTQIISKYARAYLKSLFNKVDVQKGNITAEFRKIYGIMGDEKKDRSKHSHHAKDAAVLTLIPGSAKREDILKKHYLAIENGRKHHEKPYLTFEIPHVLKIEENILINHVTKDQTLSETKKNVRKRGEIVFKKDKEGRFMKDENGNKVSLKMQGDSIRGQLHDTTYYGAIKVPERTDEGYAKKEGNKFIIKQKNDKDELCLVKREGIEDAELNNMVDILLKNHIENQLKNGKKITEVVDFNNKRIRHVRCKIKALTPAKALYFKNHIFKSKHVHKQQYIARNTPGSNYLNILYEGANSKREIIRAYRIISLFEFSELGYSYINELKNDTTFNKVTKGKG

SEQ ID NO: 7182 - protein, 1071 aa, unidentified
  REGION 1..1071: note = Description of Unknown: Cas Enzyme sequence
MADGEELILGIDLGTDSLGWALVARKNGEPERLVRAGARIFDSGMDETKGLGKEESRNKSRRDARLHRRQLWRHRRRLSKVFHLLQTYGLLPPGETETPQHRQDLLNALDREIIASPWFESRKASGSMPEPLQTLPYILRAAALDEMLPPHYLGRALYHLAQRRGFLSNRKAQPKKDEKPGKVAKGINALREKMAETQSRTLGEYFSRSAPSEERIRGRWTARGMYEAEFDAIWDAQFPHHPQMLTPERRKELQRAIFYQRPLKIKRGLIGKCELEPGQRRAPRYLLISQRFRLLQAVNNLKVVPRDEPEKWLTPQDRAKLIEALELKGDRTFDQIRKLMELPKDYAFNLERGGEKTMRGNRTGSALYKVFGEQWLKFLRDEQDGVINYVNSFQKPEKLAAAAQRKFGLTAEAAKRLSEMPLESDYMNLSRRAMERLLPLLEDSAAYAEARKQVYPESFKGGEPVESLAPAERALPALRNPAVERSLTELRKVMNAILRQYGKPAEIHVELARELKKAKKDREGIAQAMRDNEKARKDAAQRVLKETGIQNPSRDDIRRVLLADECKWVCPYTGKSISMRAIIGHEPQFDIEHIIPFSRSLDDSFANLSLCEQQENRNVKRNKTPYEAYSGDPDRYQRILDHVARFNGDRRKAARKLERFKMDDKSLAEFLERFSSRRLNDTAYATKLAAQYLGQLYGGISDAERSQRIWVSSGGVTSHLRSLWKLNAILNDGPTTDGGWQRKERTDHRHHAVDAVVIALTNSAAVKRLNDAAQRAPGEGRRRFASLEGPWPDFVDSVRAEIDKIIVSHRVSKKVSGALHEETIYSPPRPGAPVSPPAKRRSQTAAPEVRVRKPLKDFTKSDLEAIADGKVKELVLQKLEELGGDLKKFSAEENLPNFVTEDGRRIPIRKARIRKAVSTFQLGEGRAARHVANDSNHHLEVYAEIKPDGSEGKWDGEVVPMWEAYKRKQEGKPIIQRDHGPHARFKFSLAPGEIIECDGNKEGKELLVVRGVSQFTSGWIEITSVSVTEARKVTELRRTAAWVRCGPDKIRAWNARKVSVSPLGEVTEAHD

SEQ ID NO: 7183 - protein, 1008 aa, unidentified
  REGION 1..1008: note = Description of Unknown: Cas Enzyme sequence
MPTETVLGLDLGTNSIGWALIETERTSDGDSVPRRLADAGARIFQEGVEANKNESRNVQRRMARAMRRQHRRHNLRRENLREAMTAAGLLPTNEAAFADLLRTEPYMLRARLLDEPATQFELGRALYHLAQRRGFKSNRKAERKSDKKENQVVQGAISDLRHRMDGAGARTLGEFLSRIGAEGSRVRGRYTAREMYEQEFDALWNAQQPHHPSLLTDELRNRLHEIIFFQLPMRVQKNLVGNCELEPEKKRSPRGTWYAQQFRMLQDISHLEFPDLATGEVRPLTDGERAEVVPALQPRREMTFDQMRKELGLLDSQRFNFEAANHREKLKGNVTEWRLRQIFKKDYDRLTPATRDEIVHDLLFVEDDKIISRHALERWGLGAESAEKLASVELESGYLHLSQKAIQKLLPHLARGRSYMDALQDAGYERPDQRQIEVQDQLEAEDLPELRNPIVMAALHQTRHVVNAIVREYGKPARIRVEMARDLKVSLGKRTEILAENKKNRRENEATRALLESEFGLSNPTRDDLIRYRIWKEGGMTCPYTGRTIPATAVFSPDFEVDHILPLPRSGDDSYMNKVLCTAAANREKGNRLPREAWGADAKRWGEITLRMNHLPFPKRRRFLMEEIPDDFIARQLTDTRYIAREARSWLETLVGKNRVQVGKGGVTAALRRRWGLNSLLSDSGEKTRADHRHHAVDAVVIALTTPAVVQRMSRLSGSGSSLDDNGFAPPWDHFRDEVKRRIDSILVSHRVLREIRGALHEETNYGILGIKDAKGNDLYAVRKPLPRLTRSELERVADPKVREIVTAHLRANGVDLSSRSADKSPQWKQAMAAESGPAMPNRNGAPVPIRKVRIHKPSSAMIPLKNPAGTVYRAVESGSNHHIVIYEVTEGRGAGKWGGEVVSMFEAARRARHGEPVIRRDLPTGRKFVMSLSINEMVRADLDGSQRLWRAQKIDAGNLRVTFRPHTDATASDQKAGERTISVGPLKNCAPVKVTIDPLGREHPAHD

SEQ ID NO: 7184 - protein, 973 aa, unidentified
  REGION 1..973: note = Description of Unknown: Cas Enzyme sequence
RLVDAGVRIFQQGVEANKSESRNVQRRMARAMRRQHRRRNLRRNRLREALTAGGLLPADDATFGELLCRDPYALRARGLDEPLIPFELGRALYHLSQRRGFKSNRKTDRKAGKNESQVVQSAISALSEQVTLSGARTLGDFLHRVNDGGRRVRGRYTARAMYQQEFDAIWAAQQRYRPELLSDELRDRLHDIIFFQLPLRAQKGMVGDCELEPDKKRAARGTWYAQQFRMLQDVSHLEFPDLATGEFRPLTDAERAKLVAALQPRREMTFDQIRKELGLLDAQRFNFEEANHREKIKGNVTEWRLRQIFKNEYDRLTQPTRDQVVHDLLFVDEESVIVRHAIERWGLKEESARKLASIELESGYLHLSQKAVQKLLPHLARGRSYMDALQDAGYQRPDQRKIEVRDELDREDLPELRNPIVMAALHQTRRVVNAIVREYGKPARIRVEMARDLKVSLGKRSEILAQNKKNHRENEATRALLETNFGLSNPTRDELVRFRIWKEGAMVCPYTGQAIPAGAVFSSDFEIDHILPLPRSGDDSYMNKILCATSANREKGNRTPSEAWSADAKRWGEITLRINHLPYPKRRRFVMEKIPEDFIARQLNDTRYIAREARSWLETLAGRNQVQIGKGGVTAALRRRWGLNGLLSNSGEKTRADHRHHAVDAVVIALTTPAVVQRMSRLSASGRAPDEAGFAPPWEHFRDEVRRRIDSMVVSYRVLREIRGALHEETNYGILGLRDARGNDLYALRKPLARLTRAELDRIADKRVREIVSAHLLAYGVDLATRDADKSQQWKQAMEPQAGPSMPNRRGAPVPIRKVRLHRPSSAMIALKNPAGVVYRAVESGSNHHIVIYEVTQGQGAGRWGGEVISMFEAARRARRGETIIRRDMPAGRKFVMSLGANEVVKLVEDGVAAYWRVQKLDAAAENITFRFLNAAGLEDNTTRRIKSPESLRAMNPVKVTIDPLGRERPAHD

SEQ ID NO: 7185 - protein, 924 aa, unidentified
  REGION 1..924: note = Description of Unknown: Cas Enzyme sequence
LGIDVGSNSLGWFVVWLDDKGNATGLGPGGVRIYPDGRDPQSRTSNAVDRRMARGARRRRDRYLKRRSTLMSLLIRHGLMPEDEAARKALEKLDPYELRAKALDETLPAHHVGRALFHLNQRRGFLSNRKTEKGDAESGAIKQAAGKLEGLMRDSGARTLGEFFYGRQRTRQYVRARNRSTGAKAEYDFYPTRQMLLDEFDAIWAKQALHHPSMTDDARRAIQYDVNGIFYQRPLKQPPVGKCSLDPAHDANDREGFRCSWAHPLAQRFRIWQEVRNLAIAESGKNPQPLGKEDGDKIALALLQSNKLSFDKIRGLLKLPPEASFNLESAKRQELLGDQTAAKLAHKSLFGKAWRGFPLERQIDIVTRIENDEDETHLIAWLVAEAELDQATAERVASAFLPDGHSRLGLRAIRQILTYMVDGKNYPDAAKAAGYDHALLPTGELSPNGYLPYYGEWLPDDVLGSGDPHDTNDKRWGRFPNPTVHIGLGQIRRVVNALIRDYGPPAEIAVEMTRDFKLAPKQLAEVEREQAANQDKNTARREELRKLGQADNARNVLKMRLWEELNPYDPLDRRCPFSGEQIGIHTLLSDAVEIEHLIPFAESWDDSAANKVVCLRSHNRLKGKQTPFEAFGNAPEWADIAQRAASLPKGKRWRFEPDARARFDTMGGFQARQLNETGWLARVAKQYLAAVANPYKIHVLPGKLTAMIRAKWSLNNLLPDHNFSDAKNRKDHRHHAIDAMVAALTDRSLLHRMSSTYDDERDKIDIPTPWPSLRDDLDAKLKAMTVSHKPDHGVQAQLHEDTAYGAVKEPEKEGGNLVYRKAFPMLNEQEIERIRDRRLRDLVKAHVAAEKSTGKDVKAALQSFAARGDIAGMPNGIRHVRLIKPEKPDYLVPVSDKNGKPYKAYSAGENAFVEIFETADGRWL

SEQ ID NO: 7186 - protein, 1798 aa, unidentified
  REGION 1..1798: note = Description of Unknown: Cas Enzyme sequence
MKKILGLDIGTTSIGWAIVEATDEKKINKIPGKEAGTDINNDRIGIHKDAVGVRIISQDTANILSFNKGEKLIQGSTLTPTANRRVKRSSRRLKSRYKLRRGKLENILSFLKITKDEKYYTNKRKNDTDGKRVKRGANNDIGKAIYELRDRAIRKDEKITLSELGRILLHLNQWRGYSSDRFATTEKEETSAGTTARVVKIEQSDDYVYKRTVKKKVVETIYNTFIIEFDNGEKGIEIRSKENENLDFIIGKLCTYKFKDEDEINGMKPIDKKNLNENSWAFKKEKINSSIQEWCNDGGTLGSYFYHNFYEQKNIERIRNNVVDRDWYEQEFDKIWNIQFEKNKDFFEKINIEEVVKIAFKDYQAILNEVEKKDGIKEQLKCLIKDKIIFYQRPWQQAKNKGQCPFEKILVKKEQTIKGTRKKEMVEVYIGRTVIPRSHPLFQEFKIWQQINNVRVYLNTTDEKIDLFADEIAFKKHIGKEISAVKQILYNSLQNGKTLSWRIFVKDELGLKTFEDIEDKRNKKKSGVDIETGEVANTYFSVNFRKRKKDGTWEDIKLKGNTTKASLKNILNDKTDEWFQEFHIKTNKKREEKYKDANKKVSCKIPITNLQLLWEIIYDITNSDANKVAELIKEHFGFDKEICLQLAKIKFDDAGMGNLSAKAIRHILPMMSNGNNLTEKAKKKIDSLIVLNQSEEEKAKDKDEKLEGLKNFITDKKPRLRLSKFNNENAFTYLNYWEATAVMYGSHSSKNTIINSEISRVQNHSMNNPVVEKIVNETISIVNEIYKQYGFDEVRIELSRELKASMDERQQIWEAMTANADKNEWAKQMLRELKAALIEDKRNTDNIDDSTTTNSNIDKIKIIEDVVKYQFQDEYKKKIREYKLDEPSKKEVTKYLLWLEQNFKCPYTNQPIPLTDVFAKGKVVEIEHILPRERYYSNAYSNKVITWQEVNQAKANNGNRTAFEFIVSKRVEKTIKVGNKEIPLVVKEKWEEHIKAMFPKGGKRNNLLRKDIPEDPINRTLNETQYINKKLKEKLAELIGEQKVWVTSGSVTDILRERWHLNNVMKDLMRHRFENFKIPTGKKTFTLKTIEEQEKMVADISQALQSEPFGGLKIPAGKKFIEIKEKEELEKISEELKNIIRDNTDSPKKVKPYKYSSAEESFETKSLSYWTKEYNSKSNEYKDVERFEGFSKRLDHRHHALDAIIIACTKQNHIQYINTLNAINTADQESDKSKKAKYSSIKNDVCIGNSSKRFFVPWNHEDFIIDEKKEIYNDNKFLVDVKKAMDNLIVSHKNTRLLISPSKNNFGQNKVASIRGELHKETNYAKKNYFEGDKTPIKKLILNILKLKSENQHQSMVHFKKFDEIIRETVLKEKYQNVLTPLFEKYDKEKLNDSLCKDFSKVIMGEIDTNKLLIDSKTNKPLEWLSTYSDKDKSNRPNGLSMDLNKEKEIKDIADPRIKRLAGYRLDYVNKKCEEIDKLDLDKKEKDKEKSKIKSMPLYSNAIYEVRVKREDYEERIKNHSSGHDWIELKDFNWSDFDKIEYAKKETTQSIKNKLKEIDFEKLKISYFDKPIFLSPTPILIKKVRQKGFYQDLYEVTKGRYVYSSEMFMTYFFKNKNDKSLNPKREIKFLKYIDAVSIINLEKPAKIDYTKLIEKEKTNYELLDGAQYELLFTLAKNDLVYLPDKNEDIKKIDWQNINSIVSKLFIVKDMNPSDGNKKIKFQQFYTADAINISEADAKSLFKNPELKEQTEGIKYGVVEMMQTCIKVFTDKLGKKVVPYWEFPNGCWDKEKAIELGLI

SEQ ID NO: 7187 - protein, 989 aa, unidentified
  REGION 1..989: note = Description of Unknown: Cas Enzyme sequence
LVRAGVRIYESAMDGSLVEGREQSRNRTRREARLRRRQLWRKTRRLRKIFNLLQNLGLLPAGPATAPSERQDLLNALDESVRQSPWFVEKKASRQFLGRAIYHLAQRRGFLSNRRQTRPQAKEEEGQVKQGISELRAAMDSSGARTLGEYFALASPSERRIRARWTARDMYRDEFNKIWEGQSVFHANLLTDERRKALFRAIFHQRPLKFDKGTIGRCELEPEEPRAPAHLLLSQQFRLLDKVNNLQIDETPLTPAHREKLIRELENHGDLTFKGIRKLLGIPRDHELNLERGGDKGLPGNRTFAKFYGALGQRWLGISPEERDRLVEYVHAFQNPEKLENAAKKKWSLDDDSARKLAAISLEPDHFSLSVRAMRKLLPLLEAGLPLATARKQAFPGALKPKDPLHLLPPVCEFDEIRNPAVIRSLTELRKVVNAIVRAHGKPAEIRVELARELKKPKWAREQATQRNRANEKARVNAAKRITAEIGIPHPSRTDIRKVLLADECGWHCPYTGRPISMRSLFSEPQFDIEHIIPFSRSLDDSFTNLTLCAIDENRNRKANQTPHEAYSGDPGRYEETLARVRKFTGERSTAAAKLRRFRMSPAEVEALLGDFSSRQLSDTAYSSRLASRYLGQFYGGVVDPNGVRRVQATSGQVTAYLRNEWSLNGILNDGATANGGAVRKTRDDHRHHAVDAVAIALTDAASIKMLSDAAQRAPAERRRKFAPVPAPWPQFVESVRQQIENIVVSHRVSKKVSGALHEETIYAAGSASANERRVRKPLASLTKAEVEAICDPGVKALVVAKLGGSDPKKAFANEADLPFFAISDGRKIPIKRVRVAKAVPTFAIGHARTVRHVASESNHHIEIFAELDHDGNEVEWDGCVVPLAEAYRRRRAGEPVVRRDFGANRQFKFSLCPGDTIEWTTNGIPQYFVVRGASESRVFLARSRDARLKDAMVKARDGSYTRPSVSALRGAIRKIAISPLGEAAEAHD

SEQ ID NO: 7188 - protein, 1035 aa, unidentified
  REGION 1..1035: note = Description of Unknown: Cas Enzyme sequence
MQTRYRLGLDLGANSIGWSAVSLDGDGRPAGLLDLGVRVYPDGRNPKDGSSLAAERRGPRSMRRNRDRYLQRRRALLNALTRFGLMPGGAAERQAVAARDPYALRAAALHQRLAPDDLGRVLFHINQHRGFKSNRKVDRASNEGGVIQDAAQRTQAELARGGHATIGSWLADRHEKHLGVRVRLAGSGKTAAYPFYPTRAMVLHEFETIWAAQQGWNPDLSETMRDRLRAIIFFQRELKSPPVGKCWLEPTEPRAARALPTAQRARIAQTLVHLRLAPPGVPERPLTDKERATLSSLLYRGTDIAFDRVRRLLGLATDTDFNTREEKLVGCDTAHRLGGKKLAGAEWHALDLAAQDAAVLAILEAENDEQATEALRGAGLSAEAAVRAAKASLADGHAALSAVALGKILPKLETGLRYSDAVQAAGYRHHSDTRTGEIRERLPYYGELLAERVGTGTGEPKDPEEKRFGRAPNPTVHVALNELRRVVNAVVEHLGPPTEIVVETLRDLGRSKKQREEYEKEQKKNRDANDRRRAELAGLGLPVNGSNLMRLRLWEEQAYDPKNRVCPYTGTLITPRTALSDAIEEDHILPFSVALDDGAANRVLVTREANRAKAKRTPYEAFGHSRDWPAILERVALLPEQKRWRFQPDALANFAREGDFLARHLTDSSTIARWATAYLEVLAPGKVRSTPGRLSSLLRRALGLSPAAVLGKGGATKTRDDHRHHAIDAVVVSLVDRRLLQSTTRAAKLAEERGERLLVALDPPWTGFVEDVRARLATVVVSHKPDTGWQAALHNDTAYGPIRDAKGTEPNVVVRRPIESLATWSAADATLRVRDPALGEKIAAALAAGDTAARKAALAALHNPGEAVVRRVRTVERLDSTQPIADRRTGKPYKLVKRDGNHRAELWRLPGGAAKLIVISTFAAAQQAEGVRLGRPVPDLRPHPAAKLLMRLHKSDLIGFGAGEQRRILRVVKMSEGQVTLAPHQEAGNLKARDAAKDDPFKYVYASASRLLAEQVRKLFVTPDGRVLAGSARIT

SEQ ID NO: 7189 - protein, 1030 aa, unidentified
  REGION 1..1030: note = Description of Unknown: Cas Enzyme sequence
LVKVGHALQRAGVLPEGNLSDPEIRQHLFNKLDREILGSPWFAQKVESGLYPAPTHTMPYILRAAALEEKLEPRFLGRALYHLAQRRGFWSNRKTAPKKDEKPGEVENDIKTLRSELAGKTLGQYFATFSPPEGRIRDSWWTARDMYQTEFKAIWEQQVKHHPALLTEELRRTLYNAIFDQRPLKLKRSAVGQCEFEPSQRRAPAYLLISQRFRMLQVVNNIKVRPIGGQDRTLTADERSKLVRELERRSEMAFKEAREILGFTRRLSINLQRDREEAKLSGSDTGAEFYGVFRESWFNLSSEQQDRIVADTQSILSVRDADERAGRARKYLQNRGVENLDEACDRFLQIKFEAGYRNLSVTAMKRFLPLLEHEFPYGALSPHYRYLEEVEDELLRLVNAGVSHDAACKRLLNRKPEPITSLDALPPVLSEEVQRRIGAIRNPIVIRSLTELRKVVNAIVGKFGKPTRIHVELLRELKKARVVREKIWKENFAREKQKETIEKNIRDVAPNLDRVRPRDIEKYRLWQESEHCPYCLKTMTPRLMFGEDSEYQIDHIIPFGLSLDDSFKNKVLCHTECNRRKRQRTPFQAFGESPEGYDYDAMLKCVKSFRTDKDTREEKHQRFKMNEKGLSEYLAKRPAQQFNDSAYASRAAADYLNLLYGGRVDANGNTCVQARSGGLTKYFREAWNLNSILGDGGTLNGGRVLKPRHDHRHHAIDAAVIAATDQEMVERLNSAAKHGRLDGPGRFGNFDAPPRWPGFRSELKRKVIENVVVAHRVSKKVSGALHKDTNYSPTDWGENKHRHRVALVDLGEKDVMSDDVIADPGVRKLVRDKLLALGGGKPEKLFAVKENLPCFITADGRKIPVKKVRIEETVKTRKIGDGLRSRYVKPGKNHHLEIFGQPGRDGKDMKWETLDVVTMIDAHERLRNREPIVQKQSEPGWEFRFSLAQGEMLVFDEGPFKDDFFVVRTISEEAKTGSVKIEMVPINDARPKDKIKKSKLWITKSPNELRKWGARKVVVSPLGEVTEAHD

SEQ ID NO: 7190 - protein, 1075 aa, unidentified
  REGION 1..1075: note = Description of Unknown: Cas Enzyme sequence
CFDKAETAKEGESLNLTRRTARLLRRRLRRRAWRLTKLARLLKREGLIAVANLFKLKIEKNTPVLKSAWQLRVDALDRQLNAEEWARVIYHLCKHRGFHWISRAEEKAAEGDSKSEGGKVKQGLAGTKKLMQEKNYRTAAEMVLTEFPEAQRNKQGDYSKALSRILLGDELKALFERQRKLGNTFATEKLEAAILGNGDHKSGLFWVQNPALAGNDLLKMLGHCTFEKTEYRAPKASFTAERHVWLTRLNNLRIVVDGTTRSLNEAERRVALPLPYQQAGDLTYKQLRTALTKAGYLPESFRYTGLSYASGPKADEKIKDPESAVLVRLPAWQELRKTLEKKELTSEWRKFSTDALDGKQQSLDQIAWVLSIYKEDAEVEAELRKLNLPNAEKMIDALLDIRFDKFSNLSLKALRQIVPLMEQGQRYDEAVANIPEYGHHSQLHTAGAGEHKYLPPFYKERDKTGRMVFNDDMDIPRNPVVLRSLNQARKVVNALIKEYGSPHEVHIEMARDLSRPLNGDFNKQGKYIEGRRDILKKQEEFRDLNKKDKDQFAQDFNIVGTVKGKDFEKYQLYREQQGKCAYSIEPMDIHRLFEQGYVEIDHALPYSRSFDDSKNNRVLILAKENRDKGNRTAYEYLTLFPGGENGERWRQFVAFVEDNKAYRLAKRSRLLRKDFGDKEAKDFRERNLNDTRYICKFFKNYVEQYLQLHEDSEAKRCVVLSGQMTSFLRARWGLVKVRGDNDRHHALDAAVVAACSHSMVKRLSDYSRRKELEQVREGFVDVDTGEIINPNMFDQIEKHFPNPWPHFRDELEARLKLDDPALLREVMQRLGTYSEDTLQSLRPLFVSRAPQRRNSGAAHKDTIYAQPERLVAQGGVTQKVMLSSLALKDLDKLIDPHRNEKLYAAIRTRLEQHGGKGDKAFPASNPLRKPDSEGNPTGPIVRGVTMVIDKLSGIPIRGGIAKNDSMLRVDVFTKANKFHLVPVYVHHSVAKALPNCAIVAHKDEDEWPLLDDSFSFCFSMYPNDLIRITQKQGQFVGYYAGCDRGSGNVNLWAHDRNQQVGKDGLIRGIGVKTAL

SEQ ID NO: 7191 - protein, 1140 aa, unidentified
  REGION 1..1140: note = Description of Unknown: Cas Enzyme sequence
WEGQIKDIIIKTDIDKNGNDKLVNGKKQIRFNIPSEQDWEEKWELIKDKTQRGIGTDYVGTYIYKTLLKDPKQKIKGKLVRTIDRNFYFDELQAILKCQIDDHPDWHPELQDSNLYEKCIEYLYPYNIEHKQNVLRNKNMFSYLFLDDILFYHRPLKSQKSLIAKCNFEYREFINEKTKQKERQYIRCMPKSHPLYQEFRIWQLLQNLAIQEREVREKDKLKTNVDVTNEFIVTNNDKLKLFDFLNNKKEITQKQFIAYFIKDKKQQALYKWNYPDDDSTSLVCNETRPLLLSKLDKKDIKLLSKELEIKLWHIIYSVTNKAEYNKAINKFCIENGFSETSQENLHNVPLIKKDYGAYSEKAIKKLLPLMRVGELWKEEDIHIDTKKRIEKIIDAIDDQTIKNRVREKAIDLTQISDFQGLPLWLASYIVYDRHAEVDAKQWTTSKQLEDYIHSFKQHSLRNPIVEQVILESLRVTLDVWKYYGERFGINYTLTTNERTGKQEKVYERIFDEIHIEVGRDLKNPKKDRERISALNNANKNTNQRIRNMLIELKNENSSYINPESKTHIDKLKIYEDGVLSQFTEKEQKAIEIENKQTVFQISRKEQPTVTEILKYKAWLEQKYRSPYTGKVISLGDLFSDKYEIEHIIPQSKYLDNSFNNKVICEAEVNSLKDNMTAYDFILKYQNTDVPLNLGGHVTISSVENYKKFVTENYWGKKKENLFREDIPKAMNERQKTDMRYISKKALKIYSNIVRDDDEQESTSKHIISVQGSITSQMKKNWGLGQVWNELVEDRFKRLNRLINGEENNGLFGEYHIIDGERKNYFYPVVPNELAKDFDIKRIDHRHHALDALIIACLTRYHVNYINNQHAKENISRFDLGCALRNTKQVKRTHVLTGEETTRTILDDYKKPWDSFIVDAKKSLNEIIVSFKQNLRVINKTVNVFQSYKNKDGNLMFNKNGNPKKGLVKQKDARESKNCTNWAIRKQLHEDTYYGLLQHGKNKDRLVLRVAIDKSFDKEKIDKVSSGSVKKILFNHLQQEKYQNIVDENGNKMKPSELAFSPDGIEDMNRNITDLNGGKHHNPIYKARLTFEKGNKFSVRYLKDKNGNVKPTKFVKAAGGTNLYFCIYSNGEERKYYVPSF

SEQ ID NO: 7192 - protein, 1089 aa, unidentified
  REGION 1..1089: note = Description of Unknown: Cas Enzyme sequence
TFLIVMRSTVKGGSVTILDNKTISPIFVKRILLIFGGKFMAGYILGLDLGPSSIGWAAIQADKEENLTGLIQLQDGEKSCPAINSRIFPAGVENLGQGQNEKTRNKKRRESRGSRRVLRRRRARRLKLKNLLKQNNMLPDEDTIEKSPYELRQEALKGKIELKEIGRILLHFTKRRGFKSNRKDLNKDPDSGKINQARTDFKKALGDLTPGQFWNMQKSGNGGEPIRNRRSQYKWIAERDQYIDELARIWQEQQKYYPNVLKKEVHDKINDILFSQIPYEISNAKKRKVIGYCSLMKGRLRCDYSYRIAQEFRLLQKLNDLEVKRKGKKIEISPEKRKELYDKLMVSKDMKLKDIRKLLELDSTDKINFEFEGNDSLIGNEIDYQITKRGLIDKEIWLKLNNEIKEKIWQKILAYFSDENITLEETIEKIQKLSRFNIKKPESIKNITIPSKTIKYSREALEKIVPYMREGTDLYQAINKAGFINKYKTLKKLPLPDESNGYRISNPNVRVALFELRRIINRLIEEIGKPQKIVIELTREIKASKDVRQRILKQQAERKKLKERIGKELKQLDEWKDCENIPAWAIEKYILWHEQKFHSPYSGKNIEQSQLFTRDIEVDHILPYSMSLDNSLNNKVICFAEENQNKGQKTPFDWLGYDEDKWKIVAGAIDHYNPQRKTRGKSSKRTQLKANMDLKDLAVENKDKWQRFYMTADQIEEIYWQPRFIPETGYIAREVRDYLKRLYPYKIANQKVVTTKGGITAELRKWWNLNRILGDGDEKKRDDLRHHAIDAVVIACTNPKIVKNITNEIQKAWPRKRPSEIDIDRPWEGFEKDLEKAVSKINVGHRVQRKVKGQLHKETHYWKEKNGPYRGKYITRKFLDGSFTLNFAKHICDATVKQLVLNRLKEHKNDPKKAFLEPLFLKHHDGNQTPIRKVRVWKSANPSTMRKIRGNIWVETGAKGANHHIEIFEYTKGKNKGKRGFDVVPTFDVVNRIKEGKPIIKKEHGEGTKFLYSLSINEMFMLEVKKGKHKLHRVQKMDQNGNIILRPHTYGGKLSDRDEKPLIQRPTFNSLKGYKVTVDLLGRIRRAND

SEQ ID NO: 7193 - protein, 1035 aa, unidentified
  REGION 1..1035: note = Description of Unknown: Cas Enzyme sequence
MNKLKKASAILGIDIGPNSIGWALIERQPKIKSGKIIAAGARIFQAGLNDLTLDGKGKSRNTQRREARSRRRILERRRRRLKVLGVTLQKAGLLPKGNLEDSWNRNAIFTKLDSAYGSPYSLRARGLDEKLDYHELGRALYHLAQRRGFLSNRRESPDKEVEEKGIKKDIGDLAKCIDKSGSRTLGKYFSSIDPKIERIRNRYTSRKMYNDEFQLIWQTQQKCYPEILTDSFRKKVEHIIFYQRPLKSQKGLIGECELESERKRAPWALLSSQRLRYLQVINNLMIIDDDNPKGKKLSEDQRKVLIATLETKSEISFGGIRKLLKLKGTKFNLEFGGEKRIIGNRTAAKLMSIFGENRWLEFNESKRQAVVEDIRSIVKDETLKKRALEYWKLENSSAEKLSKLRLEDGYSRFSRQAITKLIPILEEGQPLQTAIKECYPGHWERTGQPCDILPPIKSEEMPALRNPIVERSLTELRRVVNAIIRQYGKPDIIRVELARELRQTSKRREQTWKRMRANEKQRENAANKIIEEFGIQNPTPSDILKVVLAEECNWQCPYTGRTITLPSLIGDHPQFDIEHIIPFERSLDNSFLNKTLCYAEENRNRKHNRTPHEAYHHSDKWDEMTFRIKDFKGDSARPKLRRFLMQPDEVQTLLDNFTNRQLNDTCYAAKLAKQYLGLLYGGIDSDGIDADNKRRVQASIGPTTAYLRNEWNLNSILGDGPGKSRDDHRHHAVDAIAVAISEPNVIKLLGDAARKAEKYGRRLFEKIPEPWDGFHEEVKATINNIVVSHQVSKRVRGQLHEETFYGTPQFDENGKVFVTVRKPLDALSKKELENIIDPAVKESVKKKLEELGGDVKRFAEPENHPILNPDGKDPKPIHKVRIRTNLNTFPVGEGHRVRHVQSETNHHMEIAEVDQGEGKEPKWEGHVVSMYEAYRRLNNHESVIQRDFGKRKKFLFSIACGDIIELDSNDNKERFLYVVRTVPQSKQIRFVPVNDARIYKQNMFSGLSALPDPLRKRGCRKAVITPLGQVRYAND

SEQ ID NO: 7194 - protein, 1012 aa, unidentified
  REGION 1..1012: note = Description of Unknown: Cas Enzyme sequence
KRNTANNKLKNDRVRNRANALGEKESEFVADRHMILAEFLRIWENQKKFGGKLAKQLTKEVKEEIYNKKKTNTLRCQGVLFGQRKTYWDLGTLGRCDLEPTAEKCPKADMYAQEFLVLTSVNNIRITPPAEPIRKLNNEERSKVVKAVRKQKTATEGTIRKALGINKGANKTLYTLNTDEDKFTVNGDWFYSQIVCDAFGEDVWASFDNKIKNAVNGAILKFDPNEDDDKAKISAGCKKWWNLTDEKTEKFISAWGKRPKKDQRVNLSRKAVKNLLPYLRDGWSVTEARNMYAEDASNGADDLTRKRYSTKEIVINKQIRHFQQKHPGMLPPVSEGISNPVVRKSIHEVRRQMTEYIRQYGKPDRVVIELARRARQSERVIAKKIKKNKAIDALKKEIIETHNLKAQGITSTQREAAIQRVRLCKQQREMCAYSGATITDKTAADGKSLEVDHIVPRSKGGDNGMSNLVLCYSTANQGKGSITPIDWLSKEDFRELELRFKHLEGSKKDKYAITKDNVDMVDNAKWKNLHRKTPKEGFTEEQLRSNAYAATQTADWINKVLFGSEDKNKRYVFASNGDYTGILRRDWGLFFNEDGERSEKGRKLRGDHRHHAVDAAVIAMTIQCLSKIKESFVDFENQKENKNAKPNWKTIEQPWEEFSEQIAEEYKKLKVSHRAYNRKITGHLHKDSIYGPAVIYERHQKDDAKNGIKKGDIKIDKDGNPVLKEGMYIKSIPAIGIKKNHLRMPNDWDKLKDEYKAATTKSLRKAIRKKMLAIEDVPPAKPGIIRDVELRDKIRDWLREHNFSDMEKAKAYIKENGLIINGTPVRKVRVLWKLNEVKEIPRKRFNFETGKIEKDDNYKSLRVYQTQNNHHIEIREKVTKKGEVKWSGKVITNYDAARRVRAEKKPIVDRNENKNGKFIMSLARGEMVHMRHPDTKEANYFVVFKIDSSKAIHFTAHTDANPASSKQKGIKLREDIPLVPDMLRQHIIFSENGTPEKVRISPLGEVKVLISD

SEQ ID NO: 7195 - protein, 1078 aa, unidentified
  REGION 1..1078: note = Description of Unknown: Cas Enzyme sequence
MKSDPSVVAEPSTLVLGLDIGAASIGWALVETNNGSPARLRALGVRIFEEGVEGFNSPKEKSRAAPRREARSRRRMTERTRRRLTKLAHCLQRGGLLPPGDLGTPEALHAYFLQLDRSLFPSPVRKADPHRMHYRLRARALAEKLSEYEIGRALYHLAQRRGFKSNRKALGKGREDDRGTVKTGIKTLQQEMEAANAKTLGEYFGGIDPEKARIRDHYLHRETMVRHEFNLIWQSQASHHPNLLTHELRAAVHDPIFFQRPLKTPERFIRLCELEQKERRAAFTDLAAQRFRLLQKVNDLRYISADGSRRLLTPEERAKLVGRLETKEKMPFDAIRKALKLSGGRFNFETFGETGIVGNRTGARLAKPLSAKRWKALSAEERAQVVEEFCALDSEQALREWGVTRLGLDDRAVAKLLEVGLESGHCNLSRKALDRVLPHMEKGVAYSCAVASCYPDRARAAQRSLLAPLRDVVDVRNPAVERALTELRKVVNAIIRQYGKPGFVRIELARDLKRNRKQRQAITVDIKENEKQRQVAIADLERMGYPPTGWNIEKWLLWEECNHQCPYTGSMISPVDLFGDPPQFQVEHIIPPELCPALGNSFFNKTLCHVRKNQEKGNRTPWQAFGDNPGEWDLMIGRVSKFRGRGTRQVQTQRAGKGGRGKPKPFVHPKLELLQLKDPQDLDDFTRRQLTDTQYAARLGVRYVGQLYGAGVDGVGGDNRKRVEARRAGLTGQLRRGWLLEREEGKRRSDHRQHAVDAVCIALADSARVKQLSDAWHRGWCTPGQRPQRLDAPWPDFRGDVANAVDKIIVSHRVARKLSAALHDELPWSPRRSDPDGRTWAHQRKPVHKLSAKEVADIVDCKVRRCVQDKLRELGKSDPKEAFKSQQDHPRLLTRKGRSIPIHKVRVRKPDPTVTIGAGSRQREVVLGSNHHMEVIKTSDRKGREMWKGLVVSRYEASQRVRAARKSGGKSNAAVETDPAGGGEFLFSLAQGETVELDENESGKRRFYVVTKITKRVPKKGAEVHTVGIVEVNDARPSTGKDKANVRALEEPSAEVLRKRHCRKVVVTPLGEVRRAND

SEQ ID NO: 7196 - protein, 1171 aa, unidentified
  REGION 1..1171: note = Description of Unknown: Cas Enzyme sequence
MKILGLDIGSNSVGSAWIDTDSATVCVGDSVFPAGVEERSDGRGEPKNLARRSKRSQRVSLRRRSDRRLELRRRLQEWEWMPTDPDALKAWMGRNPWHLRRDGLAKALSGKEFGRILLHMSQRRGPSWCEDEEDSSQQEQKGKAHNGAGPGGSKKSPLKAANEATEKMLLANNMTFGQLMADLFDQRHTNGKPIRNRTDREGNPTYEFFPLRQMLRDEFEKLWAAQSSFDSELAKQLTEDRKRELYDPSGNNIWKCRGLLWGQRNTYWDAGRLGRCDLEPTDRACPKADLYAQEFLVLQDVNNIRVIWEGEPPRPLDPQERQKVLLVLESQKTATAKTVRAALGLNRKDVRDLVTLNIEFDANKKLNTNWFIREIIGAIGKDAWAALSDKRREGINRAICKYDPREPDDVVKLTAGAEKWWGLSKDQAARFISAWQKRPGPSSRISLSRRAVINLLPYLRGGDTVTEARCHFANDPGATKEQRQRYALGGYAANHAVRHFLSKHPDQVPPAPELANPVVRKAIHEVRRHVAAYLRKFGAKPDRVIVELARDARLSGKVADRIAQDNRRRRDERETIKEEFAEVLRGKSEKQIAQAVERAILCRAQREACAYSDLDGQKARHIDPLQAAEGTGLEVDHVIPRSRGGGNGRGNKVLCYAATNRGKGNQTPKEWLSQEQFANLEVRFCHWKDGSKEDRMRWNNLHKDAMDMECYLQSQLTDTAYASRQVTQWLDQVLYGGSPVNDETKRHVFTTNGRYTSILRRQWGLFFEEGRPDPGQKSRADHRHHAIDAVVIACSGPERIGQIAAAWQTQENEWGAGKQPTQFTIAPPWGTHESFRRQVLDLIGDHIVSHRPERRKIVGQFHKDKMYGPILSPDGQLTTEFTKRISVSELDPNHLRVPQHWDTLREKLDQAETKVQKDDLRRQMLNMKDVRPAKSGVVRDRWFREELRQCLRSGGLDPDMFAKRQIMALILAGKMKLPGGRLVKKVTLSEVFNNTVQIPRHIPDMLTNRQRVIDPNPQSTRVYEAQSNHHVEIRENAKGLWVGRVVITFTAASRVRPPGRSGPGRPPAVDRTDNDEGRFIMSLAVGEMVRMAHPDTGRTGYFVVFKLDNARQVIHFTPHWDAGKSKEDENHRRREEIAKAPADLQKLRVDGQAPQKVWVGPLGDVRPYLRD

SEQ ID NO: 7197 - protein, 1079 aa, unidentified
  REGION 1..1079: note = Description of Unknown: Cas Enzyme sequence
MTPSINPNLILGLDLGANSLGWVLLDAPDGKPAGIRDAGVRVFEAGVNLLEKGEKASRSLDRRQARGRRRLLDRGARRRRKLLHALQRAGLLPAGELHGHLRPNDPANPVSLVFLDTAADPYHLRAQALDRKLELFELGRALYHLARRRGFLSNRKAPRKDEEKKGVVDKETKVLEAEMKNAQFRTIGAYLASLDPLEARRRGRYTLRKWFEDEFDAIWAAQQPHHPETLTEVLKKSLLKTIFHQRPLKSQTRLIGVCELEKRPVNVLKKLKNGQDRRMTVYAGPKRAAMASLPAQRARMLQTLNDLRVVEYGAERPLEPEERSRILDALDRADELKLTTIRGKTLLNLPRFAKFNFEAGERETIPGNDTAAQLRKAFGEKWDAMTPDQQDLIVTDLLSIQKDETFVKRAAKYSEKYSLTDEQRKALDKFTPEDGYHRLSLRALRKILPHLEQGLSYPKALEKAYPGRVSTDALDFLPAADPLRNPIVQRAVAELRRVVNAIIRKYGKPGTIRIELARELKKTQKQRDEIGKQNATNRRGRDKAREAVIRETGQPNPTSYLIEKYLLWEECGGICPYTGKSIPLSGEQGLFGGHPAFDIEHIIPFSRSLDNSFFNKTLCCVDFNRNAKRNRTPWEAVGEAMEAGDPAMKQQWSNMIDSVKRFKSDKDMRDAKLERFKFKTVPGEESFLEEFSTRQLNDTRYASRQAREYLGLLYGAEAVKRVQPLTGQVTAYLRSAWKLNRILDGDGVKNREDHRHHAVDALCAALTSTATVHQLHTAAGRGVNVFRPGTFPAMEEPWPGFLESARAAVSKILVSHRVSRKVSGPIHQETLYGEIIRPDTAATAEPQKCAVLRTPLIKLDEKNLSDIVDETVRKTVKDHLAKLAADHGIDITKAVKLLGNEENLPFLTAKDGRRIPIRKVRVFVRAKPFSIAGGDHQRLVILGNNHHLAVYEARDKKGETIWREEVVSLKTAMERARDRKPGARHGEPVVAPLDAQGNKLLFSLVIGDAVEMEIEGEKSIWIVRSISQNDFHFKDPHDARLAKDINKEGGLRIRSINRLRDAKCRKIHLSPLGEVSSAR

SEQ ID NO: 7198 - protein, 1084 aa, unidentified
  REGION 1..1084: note = Description of Unknown: Cas Enzyme sequence
MQLTEPQSTAASSYTLGLDLGTASLGWAVVDGLSQRVLDAGVRIFEPAVDATKFERGQEGASKNVARRTARLQRRQFRRRAARHHDLFLELQEAGLLPPTPDPKPADRGEARQAVLGQLDAQLRAAWRERLAELQPACPAPEQTLLYALRARALDARLEPHELGRALYHLAQRRGFKSNRRASKREPGKDGEKEESELKQEMAALEREIQESGSRTLGEFLSRQDPAAARIRGRHAQRRLYEEEFDGIWNRQAEWHAVLTPELRERVHNLIFFQRPIKAPPPGRCELETGCFRAPMASLPAQRFRLLQKVNDLRILDGRGERALTPEQRTTLLAELEKGDVTFGAARKLLGLRGTRFNLESERQDKIEGNRTGAKMLAAFGERWMAFSEAERDRIVELWRQTEDEAELKQVGQQYGLEAEAAEAWARPEAGPEDGYCRLSVEALRKLLPRMEAGAAFKTAETEVYGARFSGGAVRAQLDPVAKVLAHVPNPAVMRSLTELRKVVNAVVRQFGKPHEIRIELARDLKRSARDRDALSRAMSQQQKARGAAKGEIVKELGIQRPSGADIEKALLFEECGGLCPYSGEPIDFRALFETGEFEVEHILPKTRFFDDSFANKTLCHRSMNAQKRDRTPFEAFGHDPEQWEQILERVRKFKRLGAVHRLGKRKGKRAELEPRHPKLGRFLLTSADELESFSNRQLSDTRYASKLAARYLEQLYGGRDVEQADGRKRQAIFASAGPATATLRRAWGLEAILRQPEASANGQSKGKPRTDHRHHAVDAVVIALTSRAAVQQLAASAEASQRQTGVARVSSRTLEAPWPDFVESVRPVIERINVSHRPERKLSGEPHDQTLYGRPRQSGEREWAHVRKSVHTLSEKQIRAADVIVDPRVRDAVRAKLEELGDPKKLEQDPACLVTRRGKRVKILKVRIRVPCEVRKIGAPPRERYVWLRSNHHMGVFAGRDAKGREVWDYIVVSRLDAFERRRSGQPVVQKDLPGQPDFQFLFSLMSGDMVEIEDNDGRRGLFVVRSISKGDFNFARHTCAMLKEDMAKTRHWLRIRSIEKLRQRGCRKVSVDPLGRVREAND

SEQ ID NO: 7199 - protein, 1154 aa, unidentified
  REGION 1..1154: note = Description of Unknown: Cas Enzyme sequence
MSKTALHIFRRRFIITCLKFVNDNNVLVLNCQEKFLIGEKMSNEKVVLGLDIGVASIGWGLVKLTEEKYIDEKPDGTIEEKHKISDGEIIGTGIREFQLPQDRQRKSLALIRGSARRTRRTIKRKSQRLKRLVKLAKEFNLIAEDFNSDQILKPTKNANKKEKWDIWLIRKQALERKLTDIELFRVLYHIAKHRGFYFHTKAEEVQKEDAGSETGKAKAGLARISKKLEDGKWETVGQMFWGEFKQTNPENKRKRNAKDKYENSIHRLLLKKEIETIFKKQQAFGNMQAKEELKQRYIDEVLMYEEGIDDERLQKMMSRCEFVTGAMCAPKESYTSERFSLFNRLNSLSLIDTKNKGQNLPLDGQRGKIEALAYKNAKVTFAQIRTELGLQDDLHLRFNLCSYSEKNPEYNKKLECEIKNGQPQFDEKHKVPVVDIHTGEVTILDKEIKDIFNSKKLWANSKKIHVYYLDIRKQLNLSGDFRFKDLSGYTKSAAEFGSEAKYVKQFENDTFVELKGYHKIKNAIEKCGDGQWEHISKDIAKLDTIAEALTYCKSDETRAAYLKEHGITDEKVIEAVLTINMKQIATFSKEAMSNLLKHMSDGTLFNEAKEKCGYGKIDHKKQARLDPYSGFFEKNPVVARVIAQTRKLVNAIVRKCNDKYPIDQIHIEVATELANSEKRKNEIAQGQRRYQEDKKRAEERCREFKIDPEEGQNLLMFRLAEQQNNFCPYTGKAITFYPTSADNEIYIQDCEIDHIIPMSRSFNDSLNNKVLCTQQANQNKMDRIPFEWFEDTHGKDSQQWADFARRVEKMYGMPYPKRKNLVRKSWTEEDKEKFISRNLNDTRYAARHIADYLRKYFDFSKSKRDDIKDVSRIQLRGGGVTAFLRHMWGLNKDREENDLHHALDALVVACSTYGHVYLVSNLSKEIERKGKNWYKHFGRDKFRPWNNIREDIQKVVEKVFISRMPRHKVTAEAHKDTITSLKEAAIAKRVIMINGGYAEMGDMVRADVFTDDKDKNYVVPIYSTDIFANKPLPDKYVPDDRLLPYEQWPSVLNNAMNFKFSLFKDDLISINDKMYYVSFFEATTANVNVKNIDGSIFPDKKDSNDPKTKKIGYRPKGKTRKCVLKKYSVDMLGNYKEVKEEKRLGNKFQNEKLV

SEQ ID NO: 7200 - protein, 1013 aa, unidentified
  REGION 1..1013: note = Description of Unknown: Cas Enzyme sequence
MGYVLGLDLGSNSIGWALVDEVGERVLRSGVRVFPEGVDRDKQGGEVSKNENRRIKRGMRRQIFRKARRKRKLRAALVEAGLLPAEGAEQLKFDGVNPYALRAKGLDQRLEKIELGRVLLHLNQRRGFKSNRKGGKTKEEKGMLAEISMLARKIADSGSRTLGEYLHREIEAGGVAVRIRGQHTRREMLEEEFGKVWEKQQEFYPGILTDELRGQLWDELIAFQRAMYWPKSAVGRCELEPRERRCRREHRVAQRFRMYHEVNNLRVVESRGRMRPLTADERAKLIAYLSASKERTFDEIRKHLGMLDSQGFNLEFGDRRKMLGLSTDYLLSGKKYFGKTWGEIPEEKKNRIVNAILDEGMEEATFKKLAMEEWGADANLADALLEVELKEGYASYGMPAMLRLLPFLEQGFPLSAKTGERNALHEAGYLRGDEQVVHQKDYLPEPPELTNPLVRQALYQVRQLVNGIIKEYGKPAAIHVELAREVKGTAEQRAKQSWEMREREQYRAAVAERIGKELGIRPRRSDIERYLLWEEQGKMCMYCGEPISLAQLFGGDVDVDHILPYPRSLDDSRMNKVVVFRSENQAKGDRTPFEWLAATDPDKYEQVLQRAAKLPLKIRNAKRLKFSVETLELTEFIERQLNDTKYITRKVAEYVECLGVDIVCTKGACTSDLRHFWGLDTVLRGDGLALKNREDHRHHAVDAVVIALTDRRRLQALARMRQSGEALELPWEDFRLDVEGSINAINVSHRVERRVSGALHEETLYGPTAKAWKGGAETRRDVDGVVKERPWATGWVEEEGAFSYRKPLAGLTAAMVPEIRDRVVRDLVADRLKAHGVEPDSNKAIPVSVWKEPLCMPSGTVIKKVRLIRRDETIKPIRSGQACVKTGSNHHVCIFEFEERGKKKREGVWVSMMEAARRVRDKETIIRREHPTRKGAKFVMSMSRGEMVEAVVGGVKQLMVYRTAASTTGQMSFVLHTDARPDIGVKKYKPRPSTLDARKVTVDLLGRIRWAND

SEQ ID NO: 7201 - protein, 927 aa, unidentified
  REGION 1..927: note = Description of Unknown: Cas Enzyme sequence
MAKILGLDLGTNSIGWAIRNTDSSFENQFLDYITEDLINAGAIVFKKGVGEGKSGEFSLAAERRKNRSKRRLYNAKRYRKWATLRILILNGMCPLTEEELRLWSIGDWKEFEGRIKNSGRLYPMSPDFLAWLAMDFEKIGKEWEGQKLQPTYSNPYELRIELLEKKDVEDPLRLYKIGRSLYHLVQRRGFKTSRKSGKSAYGENEYLEEKLKANPDWKASQILQQGLTEDKRRIRNSGVIQRRYYEEEFFTICGKQNLPEKLTENIHRAIYHVRPLRTQKGLVGKCTLEKGKSRIPISHPAFEEFRALQYINNIQWRETGSNKTFEPIPISLRKKIFSQLFFKQIERGEKKGKINERSYFEFKEIINNFSENHKYEFNFAKYKNDKFDLKTNPNISTCPVIAGLMNVFDSEWTCKFISKDDYFGIDWKGLQLDYKIKYGTCKQKGNNFIPKQIGENRSLDIDGIWHLLFDYLQTKDNEEGLKLFCLDVLGWDVNKTDEFINIGISQGYGSLSYSAIRKITPFLEEGYIYSEAVLFANLKVVLGKEIFNIKKNEVKKEITKTINDIDKQKELLNITNGLIQQFYAENNTHKAKGVDNTIKELAYDDTIKKLHSYFGKENWESKTELERKHYVETIFEKYLCFLDGKQKKEEMASARQNKKPEIDYYKLPRLDESIKQVLKNNYGASEDSLKKLYHPSDIDIYPKSQTGELGDPNPPSKGWKNPMAMRTMYELCNLVNYLLEEGKIDEDTKIVVEMARELNDANKRWAIQTYQKNREDENIEFAKAILGVAKVKYPNLNENDADNIDKVRLWWEQLENGEEIYKQVKTLKEDVQKYRLWKEQECQCMYTGKMIGIVNLFDGTKLQFEHTLHLSKSFDNSLSNQTLCDADYNMRIKKNQIPTQLKNYSEEWNGYPAIEPKLKKWKEKVEA

SEQ ID NO: 7202 - protein, 1498 aa, unidentified
  REGION 1..1498: note = Description of Unknown: Cas Enzyme sequence
MRKILGLDLGTNSIGWALVNEAENESKEILGIGSRIIPMSQDILGKFDSGNSISQTAERTGYRGVRRLRERHLLRRERLHRVLHIMNFLPKHYEKYIDFENRLGKFISDTEPKLVWEQNEECNFDFIFKASFNEMVEEFKITQPLLFNEDRLIPYDWTIYYLRKKALQYKIEKEELAWLLLNFNQKRGYYQLRGEEEEDNPNKLVEFHSLKVIEVTADEPQKGKPDIWYNIILENGWIYRRSSKTPLFDWKEKVRDFIVTTDLNNDGTTKVDKDGKEKRSFRAPSEDDWTLLKKKTESDIERSNETVGTYIYNTLLQNPTQKINGKLVRTIERKFYKQELKAILEKQKEFHSELNDAELYHTCLNELYGNNEAHRNSNANRDFTYLFLNDIIFYQRPLKSKKSLISNCKYETRTFINKENGEKQTDAIKCIAKSHPLYQELRLWKFIQDLKIFEREKDINGKLNTDVDVTIEFLKTEDNYVELFDWLNKTKEIKQDTLLSSYFKIKKRKGEEKLSHRWNYVEDKEYPCNETRAQFLNRLSKVSNVPENFLDKETEIQLWHLLYSVEDKLEIEKALKSFAVKNHLGDDFVEVFKKFPPFKKEYGAYSEKAIKKFLPLMRMGKYWQLDNIDEKTKLRIDKIISGECDETIQNRVREKAFKLNSIIDYKGLPEWLVSYIVYNRHSESGDISKWKTPEDLEAYLRTFKQHSLRNPIVEQVITETLRTVKDIWKHYGDFTEIHVELGREMKNPADKRKTMTAQITDNENSNLRIKYFLAELTNHSDIENVRPYSPSQQEILKIYEEGALNNPDFEVPEDIAKIAKQSQPSKSELIRYKLWLEQKYRSPYTGEMIPLGKLFTSAYEIEHVIPQSRYFDDSYSNKVICEAAVNKEKDNALGYEFIKNNEGRIIELSFGKTVKIFTVSQYEDFVKQYYGKSRGKMKKLLMEDIPEAFVERQLNDTRYISKVVKGLLSNIVREDGEQESTSKNVISCTGGVTTILKQDWGLNDVWNRIVTPRFERMNELTKSNNFGQWTNKEGKKVFQTEMPLELQKGFNKKRIDHRHHAMDALVIACATRSHVNYLNNESAKPSAKESRAGLKNKLCYKSKTDDKGNYKWQFHKPWNSFTEDAQVALENIVVSFKQNLRIINKTVNKYQVIENGKKVIKTQEKGDSWAIRKPLHKDTVAGIVNLRLKKSVTLSAAIDQWEMLIDKGLKTKIKQLINEGFDKKKILKFFAEQENKWFGSDITKVELYYFSNDKEVLVASRVSLDASFDKKKINSITDTGIQKILLYHLANYNDQPELAFSPEGIEEMNKDIVTLNNGKFHQPILKLRTFETKGNKFNVGVSGNKKDKYVEAAKGTNLFFAIYVNEEGKRSYETIPLNIVVERLKQGLSEVPETNEKGNILLFFLSPNDLVYVPSVDEIENPRLINFQIHDYKKSTRLFEVNDFSGYTIYFTPNRFAKAIAPKELDTSFDSKLTKYDGVIIKDVCIKIKIDRLGNISL

SEQ ID NO: 7203 - protein, 1194 aa, unidentified
  REGION 1..1194: note = Description of Unknown: Cas Enzyme sequence
MKKILGLDLGTNSIGWALVNEAENENEKSSITKLGVRVNPLTVDEQTNFEKGKSITTNADRTLKRSARRNLQRYKLRKVNLIEILKANGFITNETILSENGNKTTFETYRLRAKAAFEEVSLEQMARILLMINAKRGYKSSRKAKSQDEGQLIDGMGIAKKLYEEDITPSQLVYQILKEGKKFIPDFYRSDLQAEYDKLWDFQKQFHPEILTEEFKKQIAGKGKVNTTKIFFAKYGIYTADNKSTDKRLQAYKWRVDGLSKELSKEELAFVISDLTGTISTSSGYLGAISDRSKELFFNKQTVGQYLMAQLDENPHTKLKNQVFYRQDYLDEFNIIWETQAKYHTELTAELKGEIRDVIIFFQRRLKSQKGLISFCEFESKQIEVEIEGIKKKKTVGSKVCPKSSPLFQEFKIWQVLNNLQVIDKSRAKQSLEQDEKEILFAELSIKDKLSKTDALKLLYKNYKELDLNFKDIEGNRTQATLFKAYQRIIELSGHGEYDFTKLPAAESKEIVSSVFNGLGYNTDILSFNSNLEGKEFENQPLYLFWHLLYSFEGDDSTSGNEKLLSKITELYGFEREYAKILANINFEPDYGSLSTKAIRKILPYLKDGNEFSLACEYAGYKHSKDSLTKEELENKVLKDKLDILPKNSLRNPVVEKILNQMINVVNTIIEEYSEKDINGKKIKLFKPDEIRIELARELKKSADERKDATEAISKATAEHESYRDILRNEFGLNHVSRNDIIRYKLYLELKDNGFHTLYSNTYISPTKLFSKEFDIEHIIPQSRLFDDSFSNKTLEARNENIEKGNDTAYDFVLRKYGEKGLTEYLSRLDVLYKSFKISKTKFNKLKMKGEDIPSDFINRDLRDTQYIAKKAKSILEELVKDVVSTSGSITDRLRQDWQLVDVMQELNWEKYDKLGLTEVIENREGHKIYRIKDWTKRNDHRHHAMDALTIAFTKRSHIQYLNNLNARSDKGGSIYGIETKELYRDDKGKLKFKAPIPLKEFRAEAKKHLENTLISIKAKNKVATININTTDKKNGVNKKKQLTPRGQLHLETVYGSIQQYTTKEEKVNATFTEEQILKVAKKAYREALLSRLKEFDNNPKKAFTGKNSLDKNPIYLDIEKTQKVPEKVKTVASETVYTIRKDISPDLKIEKVIDCRIKTILESRLMEFGGDAKKAFSNLDENPIWLNEKKGIS

SEQ ID NO: 7204 - protein, 1038 aa, unidentified
  REGION 1..1038: note = Description of Unknown: Cas Enzyme sequence
MAQMRYRLALDLGSTSLGWAMIRLNHDDPPAPVAVIKAGVRIFSDGRNPKDGSSLAVTRREARAMRRRRDRLLKRKERMTQTLINHSFFPADEAQRKALVTLNPYALRAKGLDEELTPSEFARALFHINQRRGFKSNRKTDKKDNDSGALKQAISKLRTAMQEENCRTVGEWLHKRDMTGQTVRARYRQTKVTKDDGKTRIDKSYDLYIDRAMIEAEFDALWAKQASLNPVLFHERARDELRYCLLFQRPLKPVKPGRCTLMPEEERAPLALPSVQRFRIYQEVNNLRILRNGLKEEALTLKQRDDLVAALEANNKRTFTQIKSLLGLGGAVQFNFEDPKRQELKGNTTSAILSKDTLFGKAWLKFDEAKQDAIVLQLVKEENEAKLVRWLQEETGVDEAHAEAIANTGLPEGYGSLCSQALARILPELRRDVVTYDKAVLAAGFEHHSRLNEYAEIPGLTFDTGVERINPTTGEIQKLHAFHALPYYGEFLQRHVGFGSGKPEDSDEKRYGKIANPTVHIGLNQVRLVVNALIKRYGHPSEVIVELARDLKQSKEQRDEDNKRQADNQRRNTRLRADIASVLNISPERVRTTDIQKMILWEELSNNVADRRCPYSGVQISAAMLLSDQVEIEHILPFSETLDDSLNNKTVAMRQANRIKGNRTPWQAREDFEAQGWDYIGMLARAELMPKTKRSRFGEEGYQRWLKDDAGFLARALNDTRHLSKVAREYLSLVCPQNTRVIPGRMTAMLRAKFGLNDVLGLNGEKNRNDHRHPAVDACVIAVTDQGLLQRFANASASARERQLNRLVDDMPLPWLSYREHVARAVGNIWVSHKPDHGHEGAMHNDTAYGLLGNGRVSVHKMVDGKRERLEDNLKVIEFSSAKATTRHGLLPTGEPRPYKGYKGDSNYCIEIVRNDKGKWEGEVISTFEAYQLVRQHGLERLRHPKLSVSGKPLVMRLIRDDFVRLEHNDFVKTIRLCKMSGDGVLAYADVQEANVDARTRTKDLSYLFKTAGSLQKSKARRVTISPIGELHDPGFKE

SEQ ID NO: 7205 - protein, 1107 aa, unidentified
  REGION 1..1107: note = Description of Unknown: Cas Enzyme sequence
ENITPGQLVFELLKEGKKFIPDFYRSDLQVEYDKIWDFQKQYYPEILTEEFKKQIAGKGKVNTTKVFLAKYGIYTADNKSTDKRLQTYKWRVEGLSKELSKEELAFVISDLTGTISNSSGYLGAISDRSKELFFNKQTVGQFLMKQLVENPHTRLKNQVFYRQDYLDEFNTIWETQTKYHKELTPDLKGEIRDVIIFFQRRLKSQKGLVSYCEFESKQIEVYIEGTKKIKTVGSKVCPKSSPIFQEFKIWQVLNNIQITDKTESKRFLFQDEKEILFTELSLKDKITKNEALKLINKSAKDYDLNFKDIEGNRTQTALFKVYQTIIEISGHDGFDFSKMNSTDKIETIKSIFNGLGYNTEILKFNSDLEGIEFEKQPIYQLWHLLYSFEGDDSNSGNEKLINKLSELYGFEKEYAKLLANVSLQPDYGSLSTKAIRKILPYLKDGNEFSLACGYAGYRHSKSSLTKEEIKNKVLKDKLDILPKNSLRNPVVEKILNQMINVVNTIIDVYGKPDEIRIELARELKKSAKEREEATKSINETTAIHDKHRVILQRDFGLTNVSRNDLIRYKLYLELENNGFHTLYSDTYVTPGKLFSKEFDIEHIIPQSRLFDDSFSNKTLETHSENNEKGNDTARDFILRKYGNDGLEKFTDRIEGLYKSSKLSKTKYNKLRMKGEDIPSDFINRDLRDTQYIAKKAKTLLEELVKDVVSTSGSITDRLRQDWQLVDVMQELNWNKYDKLGLTEIIENRDGHRIKRIKDWTKRNDHRHHAMDALTIAFTKRNHIQYLNNLNARSDKAGSIYGIENNELYRDDNGKLKFNPPIPINEFRAEAKKHLENTLISIKAKNKVVTININTSDKKNGVNKKKQLTPRGQLHLETVYGSIQQYATKEEKINASFNEELILKVAKKIYREALFNRLKEFDNDPKKAFTGKNGLDKNPIFLNEDHTLKVPEKVKTVSIEIVFTIRKDITPDLKLDKVVDVKIKTILEERLKEFEGDSKKAFSNLEEFPIWLNKEKGIAIKRVTITGITNTESLHEKKDKDGKLILDKNGNPQPVDFVNTGNNHHVAIYKDENGNLKENVISFFEATVRVNQGLSIIDKDYRKQEGWD

SEQ ID NO: 7206 - protein, 1065 aa, unidentified
  REGION 1..1065: note = Description of Unknown: Cas Enzyme sequence
MSTPTTPYVLGIDLGANSVGWAILGLDKNSNEYRALAQYGVRAFEAGVEGDIEKGKDESRAIARRDARSARRRLERLARRLNKVFFILQDAGLLPSGGERQRLPQNATAKERRAIRKAKSLERHKILEPFDSQLSKQWREKLRSEGASAAKVSLVPHLLPYILRARALDGKLSPHELGRALYHLSQRRGFLSNKKSLKKDKEEGEVKSSIAELAQKMQETGARTLGEYFSTLDPHDKRIRKRWTSRLALLDEFEKIWSGQQPHHPTILTEELKKKLHKAIFHQRPLKIQKHLIGACELEPERKRAPLPLLAAQRFRLLQMVNDTRVITPYGELVEFTPDQRKTLLDALETEGDVTFAKAKKLLKIKGHRFNWEEGEEKRFIGNRTAAKLSDVFGERWKTLSATDRDRIVEDIRSIQKDEVLAKRGKKAWGLDDEAAGKFASLALEEGYCGLSRQALEKILPLMEKGIAKQTAVKQLYGDRPAPPATDSLPPVHFALSELRNPAVERALTELRKVVNAIVRKYGKPATIRIELARDLRKSREQRKQFAQKMDENRKDHEKAAAKIIREMNLGGASPKRADVDKVLLWEECGGRCPYTGKSITMSALLGSTPQFDVEHIVPFSRSLDDSFMNKTLCDIEENRNRKKNHTPHEAYGSIPERWNEIIQRVKGFTGRAAREKLRRFQLKEITEDFASSQLNDTRYASKLAKKYLGLLYGEDAPSRVQAGRGGVTAFLRNEWELNSILNDGGTKTREDHRHHAVDAVVIALTEPNTLKMLSEAAVNAAREGRRRFGKISEPWPGFNDDVRKAIDSIIVSHRVSRKISGPLHEESNYSPPRKDANGNGYVVIRKPLEALTKNEAEDIVDPTVKKLVLEILAARGGDPKKAFQSAADHPFLTASDGRKIPIHKVRVRKNISPFPVGGDGRQRHVTNDSNHHAEIIEVIDKKGNTKWDACIVSLYEAARRHKAREPIVKRDHGDGKKFIFSLGGGEIIQLDATDGGRGLCRIRTISADRDGYVTVEYVSLNDARKKDDIKRTKDWKKIAMEPLRKLHCRKVVVTPLGEVRTAND

SEQ ID NO: 7207 - protein, 1104 aa, unidentified
  REGION 1..1104: note = Description of Unknown: Cas Enzyme sequence
MTGTTGSDTATPYVLGIDLGSASVGWAILRQPAPSGNDLVATGVRVFDPGVTGEVSDIEAGKDEARGKERRDARQARRQCWRRAWRMKRLFRELQAAALLPPTLPGEHPDEPTSRYATIERLDAELRERWLNAGSAASPAPAGAGAAAQPAQATVAAPSQVLPYLLRARALDQRLEPFEIGRAIYHLAQRRGFLSNRLAAPKDDEKESEVYSGISALAAKMQEANARTLGEYFSRLDPREERIRDRWTARRMYEREFDLIWAPQAAHHPQLLTARLCKRLRRLVFYQRALKSASGLIGQCELEKGQRRAPWACLEAQRFRLVQSVNNLRVTSQGSRELTPDERSRLLAALEGRKDMTFEAVGKLVGLRGERFNLEAGGEKKLKGNRTAALMTACFGDRWQTFADQDRARIVGEWCNIGNSEKLVSRLVGVWGAAEPQARKLAGERPPKGHCHLSRQALRRLLPLMERGMPYMTAVDEVYGVRYSGGQVYGQLPPVREILPQLRNPAVARGLTEFRKVVNAIVREHGKPAEIRIELGRDLRRPREQRKRIWKESRAREDERDRARRLLESEIGIPKPTRGDIEKFLLWEECGHFCPYTGQPISREALFVEPQFQVEHILPLSRFPDDSFQNKTLCYHEENARKRNRTPFEAYGADPEWPRILERVKNFNNHEKLRRFQMQETDAGQMLEQFSSRQLNDTRYGSRVAADYVGALYGGRDVADPAMPDGKQRRVVFTSTGQVTAILRREWRLGAILPPPPNVTNPAEKARHDHRQHAIDAVVTALATPAWVKRLSDRAAGNLRQWGRASFRGLEGPWPDFVDAVRESVLSINVSHRAEHKVSGQLHEETNYGKPYERTEGGKASVCSNVRKPLSGITRAQIACIVDPAVRQAVERRLQELGDDLKKLQSSGTPRGPEASDALEPPFLVARDGRRIPIYKVRIRQVLSTEKLGQGSRERHVALGNNHHAEIVAELDESGEEGRWEAVVVSRFEAAARLEDMRRKRSGLPVVQRDHGSSRVFKFSLMNGDTVEMADGERRALFIVHKISRFATGQVEFAFCRATDARRVKQIQEGKGVDWPRPGPDGLRKLGCVKVSVDALGRVRPAND

SEQ ID NO: 7208 - protein, 1217 aa, unidentified
  REGION 1..1217: note = Description of Unknown: Cas Enzyme sequence
MKLLGLDIGSNSVGSAWVDTDKKLIEMGVSVFPAGVEASEDKRGAPKNQARRSQRQQRRSIERRAKLKIRLRKYLLKKNLIPTEKEKLQEWENINPWLLRRDAVRKELKKDDKFSAGEKFGRILLHLAQRRGAWWFDEEPEEKENGKKKKKDPAEIPGTVEYTKKIMKEKNAETFGELIAIEYENRKSITSNKKTVFENGRQIEKHKERNNRVRNRTNAFGEKESEFVADRHMILAEFLKIWETQKSFDGELAAQLTDEVKKEIYNPQKTNTWRCQGVLFSQRKAYWDLGTLGRCDLEPTDEKCPKADMYVQEFLVLTSVNNIRITLPAKPIRKLNDEERSKVVKAVRKQRTASEVTIRNALEKGANKTLYTLNTDEDKFTVNGDWFYSQIVCDVFGDDTWASFDSKIKDSVNKAILKFDPNEEDDKTKLSDGCKKWWNLTDEQTEKFIYVWEKRPKKDQRVNLSRKAIKNLLPYLRDGWSVTEARNMYAEDASNGADDLTRKRYSTKEVVVNKQIRNFQQKHPGILPPVSDGISNPVVRKSIHEVRRHLMEYTRKYGRPDRVVIELAREARQSEKVIAKKIQKNKAIDALKKEIIETYNLNAPGITSTQRETAIKRVRLCKQQREMCAYSGVTITDKMAADGSGLEFDHIVPRSNGGDNSMSNLVLCYATANQGKGNRTPIDWLSEEKFGNVEKIFKHLHSQKGEKGQRSITKDNVDMVDEAKWKNLHRRTPKEGFTEEQLRSAAYAATQTSDWINKVLYGSEDRDKRYVFASNGDYTGILRRNWGLFFDEQGERSEKGIKLRGDHRHHAVDAAIIAMTIQCLPKIKESFIDFEKQEENKSVKPQRKTIEQPWEGFSEQIAEEYKNLRVSHRAYNKRIAGHLHKDTIYGPAVIYERHQKDDAKNVIKKGDIKIDKDGNPVLKKGMYIKSIPSIGIKQNHLRMPDGWDKLKDEYKDAPTKPQRKAIRKKMLALKDVPPAKSGIIRDIELRDKICDWLKEHNFSDMEKAKTYIKENGLIINGTPVRKVRVLWKLNEVKEIPRKKYDFESGKIVKDNNYKSSRVYQTRNNHHIEIRENEKGEWVGEVVTNYDAAKRVRVKPPKPKPQGWTPPPAVNREDTKKGRFVMSLSKGEIVHMRHPETQKDNYFAVFKIDSPNTIHFTPHTDANPASSKKKDVKLREDLRLVPDDLRQRIIFNENGLPKKVRISALGKVKVLVRD

SEQ ID NO: 7209 - protein, 1356 aa, unidentified
  REGION 1..1356: note = Description of Unknown: Cas Enzyme sequence
LERAMAIYLGLDIGSNSVGSAWIDTHNKTITPGVSVFPAGVDESDEKRGEPKNAKRRMARRTRITLARRAERKRLLRWKLIEVGLLPRDAGEFKTLLDNTDPWDLRRKGLDEALSPHEFGRVLLHLAQHRGALGLKMPDPDDADSPDLADEGKVKAAIGEVRAKMLQRKARTFGEYIAMVRAERVTAITTEDRRPLNARRGPREYRAAVRNKGRSYEHCTDRDMIRDEFGKLWEAQVKIGGDTARRLTQDLRTALDDPTGDSEWVHKGLLFGQRRQSWDLGTLGRCVLEPTERCVPHADMYASRYLVVETVNNLKIIEWGNEARPLTPEERQKIKNYLSGPLGTEKGRKKKGDTEPPKDRPKTSVTVADLRNLMGWGRVSKTSQFRFNIESDKERTINTDWFSREIIHGAVTPEKWAHMSERVREGLNRAILKYNPDNEADAAKLKKGVMAWGGLDEAQADALVAAWRKRPRPDAKRLNMSRRAVRNLLALMDRDEPWSGRMRWLTQPEARRRIAQDADFKDVTTGQPLDWYARMRYATGAKGATARDRYYMKKHLLLKNGKPIFGPDGNPLAEPPPAPLISNPVVRKAIHEVRRHIVEYMTTFGRKPDAIYVELAREARMGKKAADELLFRNRLRNRIRNDIIGAFELDRLTSTQQRAAVDRVVLCVQQGGVCPLCGNQRVTTKITPRMAAAGEGCEVAHIIPRACGGHNGLGNIVLAHTKCNRDMGRRTPRQFWEAALPGGFDEGMRFVESIYRNVERPKPSDLKSATGDSLWACYFAGKPSRFGPTFDELKIEQFKKDVTDIQEMTPRQEAATKYAARQVMAYLADALYGGRGLPERGGEHLIYATDGLWTGRLRREWGLFFDPHQRKAKGLNEQQEHERKEKDRGDHRHHAIDAIVTALCSRQVQIAWEEREKQAEREGVNTADEVEMENYRRLHPLDPPAPFKTREEFRDAVAKAVFGDGQVERPVCHRPVKRKLIGALHKETLFGPVLDEAGRLTDTYTAKKSVLELKPNYLRMPRPETTNEAVERLTARRLRRNGGDERAARKWARGVVASAGYKPRIIDPPPGKSGIVRDVALRTRLRECLTAGGIDPDDFTANQIKKLVEAGGLRQASGVPIRSVALLHTISDPVIVSRWASDHATTKRRKLYDAATGQGDASAARAYVARNNHHIEIRAAKNKKGEEVWRGEVVTAFQVAQRKLAKLRAFRQAGVPRPDVFRGLPRAERARLMPVIRAIEKDYPLVDRSDDETKGGRFVMSLCEGETLLMKHKATGEVGYFVVAKLDKPQGIVLVPHWDARAAGERKDAEGKTVPDSKRDQFTATPTDLLKLAPPGRPHAVKVRVSPLGEVREVHD

SEQ ID NO: 7210 - protein, 1072 aa, unidentified
  REGION 1..1072: note = Description of Unknown: Cas Enzyme sequence
MGVHVGLDIGIASVGWAVVDPERRQILGMGVRTFPRAEDAKTGAPLAEPRRLARSVRRRLARRQQRMEALRELLVRHGLATAEELDGDPASDASLYRVLPGDPTPFELRAAGLDRRLDRREWVRVLTQLCKRRGFKSMRLSRRAEEEREEGVLLQAIEENRRRLEEKGYRTAGEMLARDPEFAEAKRNRRGEYRAVLSRDMVLDEVAKLFDAQRTHGNPFASPELEADYVAILETQAPILEGPDLMCKVGRCSLDGEHPRTPLASPTFERFRLLQHLLTLRIVEGAGAPERRLTPDELRRVLDKAQSRKTALTVKDVRKVLGLLEDAAILGLRSRDDGAESERLPGLPAWHAMREAVSAAAPELWEALAADEELLHRTACVLTYYKTDESVRRELAGLGHRPRVVDALAGLRFSGHAHLSRETILRILPHMEQGLPYDEACEAAGIRHYLRAVPGTRARRLPPLPADDIRNPVVLRALSQARKVLNAIIDRWGPIEALHIELARDVGRSAKERRRIEFEQRRNRERNEQVRAQLKEDYGLAEPRPLEVLKYRLWREQHGRCVYSGEYIEPERMLREPYYTQVDHILPMRRSFDDSYMNKVLVLSEANQEKRDRTPYEWLGGDERRWHEFSERVLALHLPLRKRQRLLRKDFKGKEEEEFRERNLNDTRWAAREFKNFVEANLEFASESARPVIVLSGRVTNYLHKAWRLEKVRSEGDLHHAMDAAVAAVTSPGMVQKVSRFFSARRLTSVDDVYVDAETGEVVDLKHIPEPWEGFVAEVREWLAARFSDDPAGDLAAPDGQPRPILVSRMPRRGLSGEAHKETVRRLEGAATDGRLRTSKVVPLSELDSRSLERMVGRERGDHALYELLRARLEEAGDDPKKAFSEPVYKPSRNGRGPRVKAVRVWDDDASGGVPVRGGLADHGRMVRTDVFERGGRYVLVPVYVADVAARRLPTKAIRVGKPETEWHDVSDGSWRFCFSLYENDFVRIVRRRRDGRQEVVWGYYKGCDRNTARITIEPHDSSRDGAAKPPRVSVYEGIAKFEKYHVDVLGRQLSRVRGEARLGFSRGGGRE

SEQ ID NO: 7211 - protein, 1073 aa, unidentified
  REGION 1..1073: note = Description of Unknown: Cas Enzyme sequence
MQEEILNTSDVSKNLEVSFDVGHSSIGWAVLKSPDKNGENNPEFPQIELLGCGVVTFEPDTCLAKKRRDYRRQRRHIRSTKMRIKRMKQLLEHLKVLTPSELEKPGSPYPWKLAASVLQGKRLLNWNEIWDVLRWYAHNRGYDENRHWSEVAEKEDEDDTESVKKSIELMEKHQTKTMAETICKELGTDPSESDKRASHKSYKEVGAAFPRSVVVNEVREILDKHKGKLPGLSQELVETLVGESKDAWKTIPCPSINLPSHYWGSLLFGQLLPRFNNRNIKKCPFSGDTLPLKECVEFYRYRWGKILTNIRVSANGLFGQKRPLNPDERKYVDSKMRELGSMTKTELRKAIEEAVLMTLNKQGILKPGKINTNLETMFLTPEMEKGLVLDPVKNLINSDTVQSFWGVLPPQLQKRLTGKWRRGKQIKIGEIQKELEKIAPEKVEEFISTIKKNLKGKNKNQNYLEIKIPDSPLKQLKGRAPYGRKLLQQAYEEVLEGKDPHEKGGCLYRAENILKEEIQEDIEKQTNNHLVRHRLLILERLFDDIVKEYAGNDKNKIKLITIEVNRDLREFSGMTAKEIESELNARSADFKKAKKQLENMLQEAGLSNIRITATLIKKARIAQDLDFTCPYTGAKYELIDLINKQVDLEHIIPKSKRPSDSMESLVITFKEVNRWKGNRTALRFIKEEQNKPVPGKENLMILTEKRYQELVNGLNTKGHPKDIERKKKRKELLLMEDYVEEEFLPRDLTQTSQLVRLAVQVLKKKYIGEKEKPVFVSMPGSITGKFRAAWNLLGCLLKAVPWAVDEDNQVKPKDELRNITHLHHAIDACVLALAAHFIPTYKNGKVWELMIKGTVKPSEKSYIEDVPVLQLDSENRLHIKDLPDSIKEQITERLYERRVVQHIPKDMSGVKCDETVYRVVDPNDNHPYARKLIRWAKEKNIQIPSANDDTALIVTKKDKKSIKIKKNKKDECILHKGEKYVWQYDIVRKTKLLGIEPIGGNGKLKRLKAAKLISENYGIALDPKPQIIRHFKVYQTIQELKKLNNGKPPRILRKGNIINVPKGRYKGVWKITS

SEQ ID NO: 7212 - protein, 1039 aa, unidentified
  REGION 1..1039: note = Description of Unknown: Cas Enzyme sequence
IFSDGRESSTSGQPGEPLNQTRRQKRMMRRQLERRKRRKLAMYKFLKSGGYVPSDSESHTLWVQLDPYKLRAEALTRPLNALEIGRVMMQLAARRGFKSNRKTDSNKEASEYKQKINAFERELGNRTLGQYLWEKKQAIEAKFKTKTGSGPATVTETIRFRPGTPFYPNRAMYEHEFAAIRNAQSAVHPQFDWDRAWRIIFFQRPLKRPERGFCTFYENEYRAYLAQPSSQMFKALQDINNLEYLTDRPTKLTAEQKEILFEQLQKKGSLSFSNIRHLLGLPQEAAFNLEKGTKDKLEGMATDLAFSKHIKNWLELDLAERDALVETFIVEGDEDRIVTAFQKCGIEPDETRKALASIDLKVGVGSLSAKFMRECSALMRSEWIRYDEAVEKMGLKHYAPRTSEVFEKLPYYGQVLKYATIPASSSSRHANAAELSDEMRYGKIANPTVHIALNQLRKLCNVLIDRYGKPDEIVVEVATELKLGREKIRKIIQEQKKNREKNEEIKKEIRALIKNPDGKVARTYILKYRLWEELGEHSAGRYCIYCGKVISAHQLFNGDAEIEHILPFSRTLRNNRNNLTVAHRSCNAFKGNRTPYEAFGSNPNGFVWEDIEARVKDIFRYNFAKKNAFLKKDLEEELLENSEFLESQLSDTAYIARATREYLSCLYPSQNGLLPSAVRVVPGRLTSILREKWGLNSILSPNREIKNRADHRHHAIDALVIGLTTRAILQRFATANARGNAERIMRPPFPADRAWIERRLQNMLISFKPDHGIEGALFKETAYGFQYDPANPNKEQTEFFQKIPLAKLSWANIKKEKKQGILSAKTRAIIKDFLAQKGLTPDNSDNTKLSLALQELSSKTGIKTVKIRAKNVEGFIPFLPGKNGRKGHKAYPQGDMLFVDIWRIPEKKGGYTFKGVYVSRAQAHAQGGSIKTERPNPAAKRIMRLYKNDILALQFLDRTVFCRVAGLFSDDRIDLRPIQASCEIKEWRELTNEKYRDRLWDDMNSRQNKKKLNAIINNNKGLIIKHVNITIDGKLLCRK

SEQ ID NO: 7213 - protein, 1354 aa, unidentified
  REGION 1..1354: note = Description of Unknown: Cas Enzyme sequence
MAQKYYLGLDMGTSSLGWAVTDSEYHLLRAKGKDLWGVRLFPEAEASAGRRENRVSRRRLQREKARIGFVREVFADAISKVDPGFYQRLDDSKYFPEDKTEVQRFALFSGNGFTDREYYDQFKTIFHLRSKLIHSAEPVDVRLVYLAVANIFRHRGHFLNANLTDGQTAELEEIYAQLVDVTSNLPALTDVEKLKEILSSNKITNSRRNEQLMELLQVNKKMPEAEMLKMICGLKGTLSKAFTDIEFDEDQQKFSISFRDGNYDEKDAEMQTLLDEESYETVQLLKQMHDWGLLANIMRGEQYLSDARVKSYEKHANDLMILKELYKEYGSGQYNKMFRVMEDNNYSAYVGSVNSDKEKGKVRRGAKKDRDGFYKKIKSDMLGMQKKAPEDERIQYILDEINKESLLPKQLTSANGVIPYQVHLKELRKILSNAEQYLEFLKESDETGLTNSEKILKLFSFQIPYYIGPLYNDGNAAHNAWVCRKEAGKVFPWNFEQKIDVKASSEEFIRRLVRKCTYLTSENVLPKSSLLYQKFMVLNELNNLKINGVSIDADLKQDIYRELFCREKKITSKKIKDFLIMRGVCSKKTGVEISGIDGDFKSTLSSYLLFREILNVNVLSYEQEKMAEQIIFWATVYGDTKSFLKEKIEESYGHTLTSAQIKRICGIKFRDWGRLSKAVLELEGADKETGEVLTIISRMWNENVNLMECLSDKYTYLDAIQDAGRSVTRSFEEIRYEDLEELYISAPVRRMVWQTILVVKELVKVMGGPPEKIFVEMARDVDGKNEKTRKDSRQKKFADLYKKCKDDGRDWSKEIAETPEAKFRSKKLYLYYTQKGRCMYTGEPIDLGDLFNDNLYDIDHIYPRHFVKDDSIEKNLVLVKKQVNSHKSDNFPLEAEIRTTQYGWWKHLCDNDFITKEKFERLTRGKQFSPEELAAFISRQIVETRQGTKVVTELFENSFPKADVIYTKAGVVSDFRHKFNLLKCREINNFHHANDAYLNIVVGNTYNVKFTKHPTNFIKDYQRDPEHFKYHMDKLFDYPVSRGSEVAWKTKGGESIKTVRKVMNRYTPLITRMNYEVHGKLWDQTIYSADKAAKAKAVGYIPVNTEDPKMQDVTKYGGYTKYTGAYFFLVEHLKKGKRVRTLEAIPLYLKDSLNSKEKIEEYCREKLSYQDPSVRVERIKMYSLIKVDGFLMYLTGRTDNRLTVMNAVEMKMSNEWNTYIKHLFTVSTFADGETGENAVRFAVSKEKNCDLYAIILDKYNSGIYSNRPNPIGRMLKDGQAKFENLSLDKQAYVLKQLVQLSLNSNQGADLRDLGGSSSTGTTKFSKNIESHNEFLLISMSPTGLYKSETNLLTV

SEQ ID NO: 7214 - protein, 1216 aa, unidentified
  REGION 1..1216: note = Description of Unknown: Cas Enzyme sequence
MKKRILGIDTGTNSLGWAVVDRDDKGTYSLVKKGVLLFQEGVKVEKGIESSKAAERTAHRALRRQYFRRRLRKIEALKALIKYNLCPALSEEDLKLWHTRKIYPLKDEFMLWQRTDEKTDKNPYHDRYICLTEKLDFNKEADRFTFGRAIYHLAQRRGFKSNRLEESDDKESGAVKAGIADLTKEMQAAGCQYLGEFFYKLYKEQGNGVRIRTRYIDREEQYVNEFKAICAQQGISDEMQHELYRALYFQRPLKSQRQGVGKCTQEKDKPRCPISHPLFEEFRKLGFINNVRVKGPYDTEFRPLNESELQKIEPLFYRKSKPDFDFEDIAKAIAGKKNYRSKNDPGNEQYVFNYRMSQNVSGCPTAAQLRSIFGEDWQTAIAETYAHSTKKDGTPKTVDEIVNDIWNVLFFFDSNEKLTEFAQKQLQLNEEEAKKFAEIKLKHDYASLSIKAIRNILPFLRMGLIVPHATFMANIPNIVGPQVWNDEAKREHILNEVQRILSTPRDEIKNMEGTFEFCIKQLLMQDYGVTDEAAEKLYHPSIIETYPDARPNKDGVILLGSPMTNAVRNPMAMRSLHEVRKVINKLILEGVVSPSTEVHIEYARELNDANKRKAINDVQRAREKERAKYKEEIRTLYKEACGKDIEPTDTDVLKYQLWIEQDRKCLYTGNQIGICDFFGDGPKYDIEHTIPRSVGGDSTMENMTLCELNFNRYTKKAKMPSQLDNYEEILERIKPWKERYEALTKDVDRLKKGRSADKNSNDNRIQKKHRLQIERDYWRGKYQRFTMTEVPEGFARRQGAGIGLISKYAGLFLKTYFHDAQNPDKRQIFTVKGTTTMECRKMWGLQEEYEKKSRDNHAHHCVDAIVIACIGKRQYDLMAQWYQAEEEFRRGERRDIPQFEKPWPTFTEDVKALYDELLIVHDTKDNTLKAAKKRVKTPNGKHLATGDSVRGSLHMDTYYGAIERDGEVRYVKRIALENLEAKDIKNIVDDAVRSAVQEAADRLGLKEAVKEGIFLGGKTPIKKVRCFANDVKTPIDIRIQRDKGPKDYKHSYHVKNDGNYCIGIYEGTVNGKVKRDFEVVNVLDAAKRAKKHEDILPAEKNGLPLVYNLKIGQHVLLLDKEESRMLPVSEPYKRLYTVVGISTLRIKQYSYGTLQLKHASEARRSSDLKAESGAFEKGEEKRAVISMLHSQLNAIVEDEDFVISHLGDITYLNHNA

SEQ ID NO: 7215 - protein, 1395 aa, unidentified
  REGION 1..1395: note = Description of Unknown: Cas Enzyme sequence
MKKILGLDLGTTSIGWALVNEKENDNEKSEIIRLGVRVNPLTVDEKTNFEKGKSITTNADRRLKRSMHRNLQRYKLRRKNLIACLLEHHIITEDTPLFEQGNNTTFKTYRARAKAATEEISLEDFARVLLMINKKRGYKSSRKVKDGEEGELIDGMEIAKRLYEENLTPGQLLLDLYNKGKRNRPTFYRSDLQAEFDKIWEVQAKYYPNILTNDFKDSIHGFNKTQTSGAFYGVHQIYTAKNSGKEGYAQSLLWRTEALKHQLDIEEVAYALADINGAINNSSKRLAMISDRSKELYFSHQTIGQYLMKRLDENPNNSLTNIIFYRQDYMDEFETIWEKQAQYHPELTKELKKEIRDIIIFYQRDLKSCKNLVSYCELEHTEREIIIDGKKKVILTGCKVCPKSSLLFQDFKIWQILNNLQVSVVGTQRKRIKKDKTQLSLFNDAETGALNRFLTQEEKDILYNELSIKDKLSKKDVLKLLFDNPKNLDLNYKEVEGNRTMATLFKAYQDIISLSGNGEYDFSKMPAEEVLPLVKEIFTGLGYKTDFLTFNPLLDGKALEQQPAYRLWHLLYSYTGDNSATGNEALLQKIQDICGFEKEYATILSNASFAIDYGSLSAKAIRKILPHMMKGYEYSEACKMAGYNHSVRSLTKDELANKEYKNRLDEIKRNSLRNPVVEKILNQMINVVNEIIKTYGKPDEIRIEMARELKKSQEERELLDAAIRKNTAESEQLRKELEKEFGIQHVTRNDILRYKLYNELKMNGYKTLYSNTYIPREELFSKRFDIEHIIPQSRLFDDSFSNKTLEARDINIEKGNMTAYDYVAGKYDEKYLADYESRIEDLFAQKVISRTKRNNLLMKAEDIPSDFLARDLRDSQYIAKKAREILEDLVPFVVTTTGAVTSRLREDWQLVNLMQELNWDKYDALGLTERYTDKNGNIVKRIKDWTKRNDHRHHAMDALTIAFTKRSFVQYLSNLNARSDKSSSIYGIEQKELHRDEKDHKLVFNAPMPLNEFRAEARKQLESILVSIKAKNKVVTKNINKAKTKDGHLNKVQLTPRGALHNETVYGKIQNYEAEYRKVDGKFTEDVILRVSNQKCHEALLKRLAEFDNDPKKAFTGKNSLEKNPIWLNAEHSYAVPLKVKLYKVVDVFTIKKAVDKDLKLDKVIDLKVRAILQQRLDEYDGDAAKAFSNLDDNPIWLNKEKGIAIKRVKIRGIANGEAIRVKRDNKGAIIKDENGNPIPNDFVNTGNNHHVAVFRDANGKLQEHVVSFYEATTRATLGYPIVDKNYNRSEGWEFLFSMKQNEYFVFPNEKTGFNPQNINLLDANNWRQISPNLYRVQKFTTGDYVFRHHLETNVESENALRDITWKRIRAIQNLDGIIKVRLNHLGNIVAVGEY

SEQ ID NO: 7216 - protein, 1398 aa, unidentified
  REGION 1..1398: note = Description of Unknown: Cas Enzyme sequence
MKKILGLDLGTTSIGWALVNEKENDNEKSEIIRLGVRVNPLSVDEKTNFEKGKSITTNADRRMKRSMHRNLQRYKLRRKNLIECLLNHHIITEDTPLFEQGNNTTFKTYRARAKAVTEEISLEDFARVLLMINKKRGYKSSRKVKDSEEGELIDGMEIAKRLYEENLTPGELLLDLYNKGKRTRPTFYRSDLQAEFDRIWEEQAKFYPEILTDDFKKSIHGFNKTQTSGAFYGVHKIYTAKNSGKEGYAQSLMWRTEALKRQLDIEEVAYALADINGAINNSSKRLAMISDRSKELYFNHQTIGQYLMQRLDENPNNSLTNIIFYRQDYMDEFEAIWEKQAQYHPELTNELKKDIRDIIIFYQRDLKSCKNLVSYCELEHTEREINIDGKKKIILTGCKVCPKSSPLFQNFKIWQILNNLQVSVVGHQRKRIKKDNPQLTLFNDAETGALNRFLTQEEKDILYNELSIKDKLSKKDVLKLLFDNPKNLDLNYKEVEGNRTMATLFKAYQDIISLSGNGEYDFAKMPADEVMTTVKEIFTGLGYKTDFLTFDPLLTGKALEQQPAYRLWHLLYSYTGDKSATGNEALLDKIKEICGFEKEYATILSNVSFELDYGSLSAKAIRKILPHMMNGYEYSEACKMAGYNHSVRSLTKEELAKKEYKNRLDEIKRNSLRNPVVEKILNQMINVVNEIIKTYGKPDEIRIEMARELKKSQEERELLDAAIRKNTAESEQLRKELEEEFGIQHVTRNDILRYKLYNELKMNGYKTLYSNTYIPREELFSKRFDIEHIIPQSRLFDDSFSNKTLEARDINIEKGNMTAYDYVAGKYDEKFLADYESRIEDLFAQKVISKTKRNNLLMKEQDIPSDFLARDLRDSQYIARKSREILEDLVPFVVTTTGTVTSRLREDWQLVNLMQELNWDKYDALGLTERYTDKNGNIVKRIKDWTKRNDHRHHAMDALTIAFTKRSIVQYLSNLNARSDKSSSIYGIEQKELHRDEKDHKLVFNAPMPLNEFRAEARKHLESILVSIKAKNKVVTKNINKAKTKDGHQNKIQLTPRGALHNETVYGKIRNYEAEYRKVDGKFTEDVILRVSNQKYREALLKRLAEFDNDAKKAFTGKNSLEKNPIWLNAEHSYAVPLKIKLYKIVDVFTIKKAVDKDLKLDKIIDLKVRAILQQRLDDFGGDAAKAFSNLDDNPIWLNKEKGIAIKRVKIRAKVSSETSVPLHIKKDLFGNDLKDANGIALPTDYVNTASNHHVAIFVDEDGNWHEHVVSFFEATVNALQGLPIVDKNYKSEEGWKFLFSMKQNEYFVFPNEKTGFIPSEIDLLDPNNYPLISPNLYRVQKFSSLFYIFRHHLETNVEEPNDLRDTTWKSIRSVKNLDGAIKVRVNHIGAIVAVGEY

SEQ ID NO: 7217 - protein, 1438 aa, unidentified
  REGION 1..1438: note = Description of Unknown: Cas Enzyme sequence
MKKILGLDLGTNSIGWAVVKEAEKADEQSSIVKLGVRVNPLTVDELTNFEKGKSITTNADRTLKRSMRRNLQRYKLRREHLIEILKANGFISDDTILSETGNRSTFETYRLRAKAASDEILLEEFARVLLMINKKRGYKSSRKAKNTEEGRLIDGMSIAKRLYDENLTPGQLSLELLKNGKKYLPDFYRSDLQSEFDKVWDAQRQFYSELLTNDLKENLQGKSKTQTWSICQKPFEIVGIKRKTKGNEQKVENYSWRVKALSEKMDLEELAIVLQEINGQIYNASGYLGNISDRSKELYFNHLTVGQYQMAQLDKNPNYSLKNQVFYRQDYLNEFETIWETQAKYHKELTPELKKEIRDVVIFYQRPLKSQKGLISFCEFESRQIEIEVDGKKKLKTIGCRVCPKSSPLFQEFKIWQRLNDVEVSGLIVPNMQHDLFGFAKDYTYGKRRLQQEEKEMLFAELNYKEKLSKNEVLKLLFPKQKEVDMNFKELDGNRTQAELFKAYQTIAEQSGHDVGELSKKTAKEIVGCISEIFATIGINTEILSFNSNLEGKEFEQQPMFRLWHLLYSFEGDNSAIGNEKLIEKLRDTFGFEKEYAAVLANVVFKEAGDYSSLSTKAIRKILPHLKDGNDYSVACEYAGYRHSKQSLTKEEIQNKVLKDKLELLPRNSLRNPVVEKILNQMINVVNSVVDTYGKPDEIRIELARELKKSAKEREELSKSINETTRLHEGLVQKLQKEFGLSHVSRNDIIRYKLYNELESNGYKTLYTNTYIPREKLFSKEFDIEHIIPQAKLFDDSFSNKTLEARQANLDKSNTTAFDFVATKYGDEFANGEYKTRIDKLLADKVISKTKHDKLLMKEADIPSGFINRDLRDSQYIAKKAREILEELVRFVVPTTGSITDRLRDDWQLVDVMQELNWNKYDQLGMTEIIEGRDGQRIRRIKDWTKRNDHRHHAMDALTIAFTKCSFIQYLNNLNARVQKGVDDWIDLDMVEFADLSKEDKTKAVCAIEKKELYRDNHGKLRFNPPMPLKEFRAEAKRQLENTLISIKAKNKVVTRNINVSKKKSGANKKVQLTPRGQLHLETIYGSSKRYETKEEKVNASFDAEKIKTVASKRYREALQSRLNQFDGDAKKAFTGKNALDKNPIWLNAQHTDKVPEKVKTVSFETIYTIRKEVSSDLKLDKVVDVRIRKILEDRLAEYGGDAKKAFSNLAENPIWLNKEKGIAIKRVTITGISNGEPLHDKRDKDGNLILDEKGNKQPVDYVNTGNNHHVAIYRKPKLDKNGQPAFDANGDIVYELDEKIVSFYEATSRAMQHLPVVDKTYKQEEGWQFLFTMKQNEYFVFPRYDADGNMTFSPLEHDEAWFKNPENYAEISLNLFRVQKFSYKNYVFRHHLETTIDMSSYNLRGITWTDFRSSKGLDQIVKVRVNHIGQIVSVGEY

SEQ ID NO: 7218 - protein, 1354 aa, unidentified
  REGION 1..1354: note = Description of Unknown: Cas Enzyme sequence
LAWIILNFNQKRGYNQQRDEILEASDDKKEEYMCLTVSSVTPDEDAKGKDIWYNIRFENSDIIYRRKSKYPLNWVGKKRNIIVTTKLDEEGNPKLKKDGSIDYSVKSPNDDDWALLKIKTEQDLKASHQTVGQYIYAALLANPSEKIRGGLVRTIERDFYKDELEKILQKQSEFHAELKDRSLYEQCIKELYRNNETHRNNIAKNDFTYLILEDVLFYQRPLKSKKSLIDDCPYESHQGIDRETGEICTYPLKCIAKSNPYFQEYRVWKFLSDLRIIANTKEINGHIHTDVDITNELLPDNNSWSNLFAWLNDKGHITQSDLLTYLGIKKKEQSKFRWNYVADKHYPMNATRHAILNRMKEGEVLSREMEQAIWHLLYSTTSKAEIDKSLSPSDNPKGIFKKLIETGISVESIEKIKTIKLPDEGYGGYSEKAIKKLLPLMRCGEFWDERNIHPATLKRIKEYQTGNCMDDFSERVKQLMSTMIDIHSYQRLPEWLACYVVYGKHSEANDIVKWKTPDDINIYLNNFKQHSLRNPIVESVILETLRVVRDIWKRYGNMDEIHIEMGRDLKNPSDKRAQITQRVLQNENTNIRIKTLLAEFLAEEYKIDNVRPHSPSQQDLLRIYEEDVLAHNEPDEEIQNIINNLSNPTKQPSRTQVLRYKCWLDQKYCSPYTGQPIPLSRLFTSDYEIEHIIPQSRYFDDSFSNKVICESEVNKLKDNQLGYEFIKRHHGQTVQIASGRMVRVLEVDQYEQLVKNIFAQNKRRKLLMDDIPAEFIQRQLNDSRYISKVVKGLLSNIVRTTDEDGNLEREAISKNVITCNGSVTTRLKRDWGLAEVWNAIVLPRFQRLNKITGRDCFTALNSHHQEIPAMPLELQKGFSIKRIDHRHHALDAIVIACTTRDHVNLLNNESALPENQANKHALSHKLRHCEEVVINGKKRTVYKEFLMPWNAFKSDTFNSLQEIVVSFKQNLRVLTQATNLYTKYMDDEKKQQAQHSPDHFAIRKSLHKDTVFGHVNLQRITTVKLKDALKNVNRIVDKRLKKKIKELVCKHYNEKQLLVYFKDYAYEWKGYDFNKVKVFYYTDEKEMMVATRFCNDLVSVFSGKTKKQDIEKTIEQITDTGIQRILTNYLNANLEQIEYAFSADGLEKMNENIATYNNGKQHKPIFKVRLFQPKGNKFQVGQTGNNSKKFVVADAGTNLFFAVYQTSDGNRKFKTIPLEEVLARMKMRLHPVNETDEEGNTLLFSISPNDMVYLPTPDELSDGHINKENIDANRVYRFVDSSGTTANFVPSKIANVIYHLKKDQAELFCQGDTIQDELGKGSPQSKNQKAITGEMVKDLCVPLIVSRIGEIKIK

SEQ ID NO: 7219 - protein, 1383 aa, unidentified
  REGION 1..1383: note = Description of Unknown: Cas Enzyme sequence
MKKILGLDLGTNSIGWAVVNTDNNGTPTHIEGMGSRIIPMGRDKIDYEKGVTITKNADRRTKRSARRMGKRYKMRRNKLLYILAKLNMLPEQIQFKTDFPEATKIQDLELLPIQKNTMQLDSLQHYELREKALHQRITLQELGKIFYQYNRLRGYSGGGDDDDSKKEKAEDEDNKKYEVRVQKFILKDVVRSDDTYTAKSGKDKGSELPIYNIIVFDEDEEIEGTTKLQNLSDKIGDEIELEIRIKRTKKGESIAFALPQKTNWRKQMETTELTLKEKNYYPCQLFAEDLRNNKWTKIRNRVILRQQYKREFDAVWDEQAKYYPILENCPDDILNEIVSYIFPGPSDSQKELREIGLKNGLKYIIKEQIIYYQRPLKSQSDLIGTCQFEKEEKVIPITHPLFQEFRCWDQINRLYIRSKQQVWNEKKGKFVLQYHNRYLTEEQKYSIYNRLQEQKQLGFKEVAKIVNLGDDKSEFLNGLHIKAKLSGCDTRISIKKIIKGYCEPETTLIENIWEAVYNNVHEGSEYDESSKRVLSIENVLPETLGNERRTELALKIAQNIKFVRKYASLSMKAIENILPIMRPNPEVVPEKVKKNFEDIKWLIDTGEVIDESILQDYIIDFVKDNPQALEHGGLMYAFASSLVYGRHTKEDVKPQLKDYHDIKYVERNLRNPIVEQIANETMQIVKSLWKQYHLNPEELEIRVELARDLKNSAQEREKIFKGQTNNRNINESIKKRLIELKQEVNDRNIELYKIWSRQENTHDGDGRPISRPKYKDATNPTKEEIEKMRLWEEQHYVSPYTLAPIPLSKLFSPDRLYDIDHIIPKSRYFDDSMANKVVCESNINEEKDNRTAWEYISQQNSQYNILTPEDYLKHINQIFYGQKKKNLLAEKVPSNPVARQMKDTQYISIAVKDELAKIVGSEHVKTSTGGVTDFLRSQWGLKKLFMVLTEERFKQMELWNLNEDGSPKESWIKKGFDVTTQKKVYEIKGWSKRFDHRHHAIDALVVALCNEKLIKRLNDLNKYFQDELAKHKDSIPVTDEESLEEAFFKLSKENRNKIMQVIESSRKFEVPFDNLVAEAKCLLESMIVSQKPKDKMSIKEDLNGKKQLKIRAALHQETYYGKTNGRDTKTVAISMLKAKDIPQIVDKVLKNEIDSHRKKYESMKEAFTGEGLISFNESRFQTKNKSALKPPVYKVRLWYSNKEKESGNLQPLYGKNAKKTVITGDNYMFIVMEKGGKRVFDIASLFDSVALAKEYVKQGIVDIDYIKKKICDDLRIYNSNNSKGNKADKVLFYLQQNDLVYMPKEDDEILRFNELEFKNWLSNTNNKVDFVKRIYKVVKFTGKDCFFIPNNYAKEINMPKDLSEKEKNIIKEQYKDKSIPKQE

SEQ ID NO: 7220 - protein, 1157 aa, unidentified
  REGION 1..1157: note = Description of Unknown: Cas Enzyme sequence
MKEKVVGIDLGTGSLGILLRNLELGDNIIDQMEWFSVTTFDSGTGMSQTGEYTLASDRRSHVQSRRLKEHSRYKRWATLDLLIEYDMCPMSPESLEKWRVYDKTRNLKREYPVDDQAFNQWIKLDFNGDGIPEYASPFQLRRELVEKQLDFSLPENRYRLGRAIYHIALHRGFKSSKGETLAELEEGNKDSQISTDDLEGAMKKSEEKKSKDLTEYMESHQLKTVGQAFACLEDEGVRIRNSRYQAVRSQNVDEINEYFQFQQGLHDYQDLHKRLISTKKGIGTLFYKLPLRPQKSHIGKCIFEKNKRRCAISHPEYEKYRAWAFINNIRYKASVEDVWQELPLEIKNQLYQEVFVSKVRKDFNFEVIRKFLEKHLGLAFVNTEKTKTINYKDNTLVAGCPVTARLQNIADYFGTDIEHFEQKGTKTRDTHTKRPEREKHTVVYHAMDLWNFCFDTDEKEDVTVFAHHSLGWDEQATDRLSKLWNAMDQGYATLSLKALRNINRMLVYGLKTSDAVFLAKVPDITGMTEEGVKELIDIYLGRVKEQVNQEVRICRIVNTLIANYKSMPIRDRFADHNYDYQLGDDDKEAVVKCIVDNDKGFSLLDATEQQEIINRVTSLYQSFFADIHRDFVKAPRIVDALKEELCKKYPGIDDSKWEKTYHPSMLSDFPRDKDNANHLGSPNIGAIRNPTVMRTLNVLRSVINKMIDEGLIDPQETRLVVETTRVNNDINKRWAIQKYNEERRDENKAIKDILQEYYPEKDINDDDVDAARYVLEQSGEDLYGGNDRFQHVIKKYKLWLEQGCQCLYTGHIIKLSNLLNGEMFDEEHTVPRSISFDSSDKNLTMCDSYYNRHVKKNMIPSQLPNYEHDVVIDGHTYTAIKPRLQMWEEKVERLSKNVTFWKNKAKRAQTESYKNTCTRQKLLWQMEFDYWRSKLDRFKMKTSDLTDGFRNSQLVDTGIITKYALLYLKTLFKSVEVQNGQSTSAFRKIFGIPKKDRSTHYHHAVDAAILTLIPASAQRSRMLKLFYEIDEMKRGGHEYSGLQFQLNKEIESCGIGKGVATIDQYIEDHVLVNYYKQDRTLQDANYIRGKLHAETFLGAITQWNGEEKKYVKRVELKYKKSSLDSGFKSWEDLETAIVNKQLVQMMKSQFPEGTTFQ

SEQ ID NO: 7221 - protein, 998 aa, unidentified
  REGION 1..998: note = Description of Unknown: Cas Enzyme sequence
MKKVLGLDLGPNSIGWAVIDGEGHRILGAGSRIIPMDGAEMAAFESGNLQSKASVRTGYRGTRRLYERSTLRRERLLRVLHTLGFLPAEFESQIDFERHPGQFKDGKEPLLPYQKDSAGNNRFIFEDSFQEMLRDFTESQPSLVAEGKRVPHDWTIYYLRDKALSRAITKEELAWILLNFNTKRGYYEREEDDGKADNKREEYKVLTVAGVEAEDANKKRPGQTWYKVTFEDGTYRKVSSPSSPYNIGDKVESIVTTTLTPDGQTKYNKEGEPMISFRLPKDDDWNLMKTRTEHEIEQSKETVGSFIYHHLLSNPDVKIKGKLVRVIERKYYRRELRQILECQKKFIPELTDKTLYDACTHELYPNNEEHVNSMPKCDFTYLFDNDILFYHRPLKSKKSLINDCPYERRSHVDKETGEVILSPVKCMSKSHPLFQEFRTWQFIHDLKILKREGEANGKTVFDQNVTDLFIPSLEAKRELCATLSSKKEITQKQMLALFRINKKPLSEKEYRWNYVEDKTYPLNPFRHEVRKRLDKIQSQISLTPVQEDQLWHLLYSINNNDELRKGLYSWVRRNAETWIPGADKEAVRNLANRFADTFARFPKFASDYASYSHKAIAKLLPLMRDNGLTKTEACEQVYGKVHNSDERIFSTPDDLAWFTRYELRKEGLRNPVVESVLGETLRVVHDIWKEYGRPDEIHVEMGRDLKQTNEQRAYNTQKILDNERANLRIRTLLQEFAKPEYKIDGVKPYSPLQQDIFKIYEENVLSGEASSLPDDIASIVKDLGGNTRHVSPSEMMRYKLWLDQKYKSPYTGQPIPLARLFTADYEIEHVIPRSRYFDDSFNNKVICESEVNKLKDQMLGYEFIRQCHGQIIFCHGLGREVPVLDVKQYEDFVKLHYKGNSKKMKQLLMDEIPASFTQRQLNDTKYLARKAMEILSGVVRDKDDEGALSSNLVSLNGNITTRLKTDWGLNDVWNTIVAPRFERMNRLTGTTDYGRWIA

SEQ ID NO: 7222 - protein, 910 aa, unidentified
  REGION 1..910: note = Description of Unknown: Cas Enzyme sequence
YDERIKNRVREKAISLTDISHFRGLPVWLACYIVYNRHSEAKKIEKWKKPEDIDQYLKTFKQHSLRNPIVEQVITETLRTVRDIWKQEGQIDEIHLELGREMKNPADKRRQMTERIQQNENTNLRIKAMLMEFMNPEMGIENVRPYSPSQQDILRIYEENALDNLSRDDKEYDFVSRVSKMAQPSKSDIIRYKCWLEQKYQSPYTGEMIPLSKLFTPAYEIEHVIPQSRYFDDSFSNKVICESEVNKLKDRQLGYEFIKNHAGEIVQLSQGGTVQIQSVEAYEKFVKDYYANNRTKMKKLLMDDIPDGFIERQMNDSRYISKVVKGLLSNIVREKQANGEYEEEAVSKNLISCNGSITDRLKKDWGMNDVWNSIVLPRFQRLNQLTGKDCFTTLNREGHEIPNMPLELQKGFNKKRIDHRHHAMDAIVIACATREHVNLLNNEAAHSKHNANRYQLQRRLRRFETVTINGKEREIAQEFLKPWDTFATDAWQALSNIIVSFKQNLRVINKTINHYQHYDAKGRKGFNKQHHGDSWAVRKSMHKDTVFGEVNLRMKKMVSLNEAVKKPENIVNKEFKKKVRELLTNGYDAKFIKKYIEDNKDIWSDINLSKIEVYYFTKDEKKRNGEPKERYFATRKPLDTSFDQKKIKESVTDTGIQQILLAHLASKENNPEQAFSPDGIDEMNRNIVALNNGKFHQPILKVRVYEKAEKFAVGQTGNKGKKFVEAAKGTNLFFAFFETERENKVSNRKEAVRSYMTIPLNVMIDCQKKYGARWRNNIEAFLKDKDMVETEAKLLFILSPNDLVYLPTKDELQNGILSIDKQRIYKFIDPAQNKGNFIPYPVASVIFSTKFSDQRKQGTSYPIQDEFGLGSQGSKSPRATTGEMIKETCIPIKVDRLGNILKIGYDSRTV

SEQ ID NO: 7223 - protein, 1002 aa, unidentified
  REGION 1..1002: note = Description of Unknown: Cas Enzyme sequence
MKDLEYTLGLDMGVASLGWSVVSTKKRFIDSGVRIFPAGTDNFNSAKEKHPNVDRREARGMRRRIRRKAERKKLIRGILQELGWMPTDSEKLEDWLNLNVYELRSRAISEQITLEELGRIILHINQRRGFLSLRKTEESSADAETKGMLGEISALQKDIESTGAKTLGNYLYQIYDKEGIQIKIRSRHIRRSMLHDEFALIWEAQSKYHSDLTDQLRFGRIGKLEKPTKVVTPAPREKNKSMLEQFGIENITFFQRRVYWPASSIGNCELEPSEKRSPIADRRFQEFRMLQEINNLKILDNSNPDIPQERNLTEQERELAIAYISGKKEVKFEQLKKYLCKNKDLKGTLPEAYSQISFNLESGGRSKISATPTDALLAGKNGLGKDWLDLSEASKNKIIEALTLPAATDDDIRSALEEIPELKSDKVIALLKLSLPTGYCHLSTKALEKLLPHIREGKLYMAKDEADSAMHAAGYTRRDEKKHTTVNLLPTFDALLNPNSKDYDPHQVEINNPVVLRALTELRKVVNGLVKKYGTPTHINLEMARDVKMSPKQRSEHQKQSRQFEKERDQAAKALTDYGIIPNGDAINMYRLWQDQDEVCIYSGKAIGISQLFGGEVDVDHIFPFSRSADNSFTNKVVCFAKENRDKGNKTPYEWLYASEHEKFEEILQRAKKLPRGKYKRFIATEIPEGFVNRDLNDTSWMAKAALHYLARLLPKKHHILAIKGRHTATLRSQWELHGLLRDDALNLKNRDDHRHHALDAIVIALLDQNRLQQITKKIKYQMRDKEAKEAGKRIYRLKARGEKLDLPWDSFRLDVAESLNSMWVSHRSKRKVSGALHKETNYGKTRDGLLVVRKPVQGLSKKEVEGICDPMIQQVIKDHIKDNGGDRAAALAAISEESPLQMPSGIPIRKVRTAIPYAHITIREGTEHETYVQSASTHHLAIFSLGDEKYHFEPVTLYEASRRKRSKEPIVQKTYDEMPAEAEFLFHLCSGDSMMATIDGE

SEQ ID NO: 7224 - protein, 1391 aa, unidentified
  REGION 1..1391: note = Description of Unknown: Cas Enzyme sequence
VMSFSFASIPQKKGLSPFLLQVKKYFYPLLFVNFQPLIRIYNKELGLKRMYPVWDIRFEAWIKLDFNGDNRPDFDSPYQLRKYLVENKLDFNSPTNRYMLGRALYHIAQHRAFKSSKKVKLEEDAKETTDVGAEKKKNENLRKEFEKIGIPFDESKTIGQLLAEAERFFKERGYGRIRNELHPYVTRKMLQQEVEQIFKFQFGESWIDKFKEIFETEKISKSSIFWQRPLRSQKAAVGKCTLEKNKYRCPVSHPQFEIFRAWSFINNIRYKFDDSDEYKDLSLEIKNKLYREVFIKANDFNFSVVRKWLTKEFGKKIQLNYRDDTNISGSPSIYYLSKILGENWETNKIHHTPIKRLKKVNGKYQEYDSKKDYYTYEDIWHVAFQLDDEEEVEKIAKNKFGFNDDQTENYLKMFKNMPVDYARLSLKAIRNINYFLKKGLIYTDAVLLAKIPEILGKNVYSEENEKLIIDSLNQIINENRKKKNIVNITNALISEYKLNHWHERDYDYQLKEDDLQNIKKAIENYFGKSKWNAFPEGERNEYIEKIKNEFQSFFQDRKREYRKLPKLIDDLKTFLSDNFDSLNEKQLNKLYHPSAIDIYPKLTDKDKAKDGKLYLQSPKTGSWKNPMALKVLQELRQLINYLIKTDQIDQETKIVVEIPRELNDANKRKAYEIWQKRKEEENKEFALAIGQLLNEFKHLKANPQNDSDIDKFRIWYEQCFDEVSQEFTDKGSNELKTEKKKKKNKKGEETEEELQTWAENNYSKINTSLWFKILKAKDNTLEKYRLWKEQKATCIYTGEIISLSDLFNEDTIDVEHTIPYSRSLDNSLANKTVCLKEYNRKIKANRLPSECPNYDEILNRIKPWQEKIEAIKKHLEFWKNESKKASVKKRKDECIIQKHLWTWELEYWENKVERFLMKEVTSKFVNAQLVETQLISKYAFHYLKTLFENVQVQKGSVTADFAKVLGVRDKYKSKNRDKHTHHVVDAFVLSLIPDSARLKSILEKYGEIQELKKINEDAATDVREINQRRIEILESELQKLLIESRIPLNTLHKIIQKIETETINFTPHKHKIFATAKKKIKKGKLKGKYASGDTVRGQLHKESFYGKIKLVERDENGKPKRDENGNWIWAKGKDGKEEYAFVKRDPVDENLKIENIVDPVIKKLFEDAVKNKSLKKIKEEKGLIFQDPKTGKTIRIRHVRCFQKPTELLQIKQQSHKSKYDYKNYYYADNAENIYYALYEDEKGNRTFEMLNLFNAIKIKKYKEINKLEDFFEPTKKVGRGKNISDAKLKAILQKYQRVIFFKENLEELKRLDKKSLSNRLYYVYKFKKDGRIYLQNNLEARPDKLLGDGPSFIDFSNLQPRYFISKENFNFAIEGKDFELKIDGSVSWLF

SEQ ID NO: 7225 - protein, 1087 aa, unidentified
  REGION 1..1087: note = Description of Unknown: Cas Enzyme sequence
MDPCMSTASQHIWSFDIGTGSFGIAVRQGLTFKYVDSLLIPDGFASIDMARTRRRMWRTREAHNAREQWLRDTFHRAGLSAAVLTGRKPVKTSGTWRTEKGDYRLEREFPPQESSRTKDGAPSDPAGAETCYCGAVLRIRLLQGQPLLPWQIFKALHNAIQKRGYDPDLPWKSQERTSAKNPKDEAAVTLNRANEAEDKIKRLPPECQFPCYLEAQLMGLWHPDAPEKTAIRQNHEAGSAKNLIFLRRSVEAEISALIAAAAQQLPALAPHAEDLLYGPGQAAYASYKNPKAQDRFKERTGKVLIRGKADDWQGVLAQKVPTFDNRAIDRCALITRFHAAKCEPRKLKDGTFDPESLLPAEVTFLMKLKNFRFALAGGQDAGFTVEQIRTVFEDRQREVIAKQNAESFKLTKSQLQKIIGRFGGVALLPNQTEVEAPRLSGRSRFSKPALKLVKKLILSGKSPAAAHADALAELNGNTDPLKGLIPGDLQFFLNVRSSGGHAATWENFYLPDESLSFVENAGQSPDAKIRALIGRQNNPIVRHRLETLWKLLRELQDAHGMPDHVAIEFVREDFMGPKAKLELAKFQKERREARAEARHEAGSGRDGLRYQLMKDQGAQCMYCETTIGLVDLPNTHLDHIVPDALGGPGAYWNFALCCASCNSAKGRRTPWQWFHEDHRPGWDSFVERVRTRTFQLRPKKVRLLTQQDAPDQVQRYQTLAETAWIARLAQMVVCLFFGWPRNFVGGPRKVVVLPGGLTARVRRKYHLNSLLGQDIAALEQKLNEEGSAKTESEIDKKCRADKCHHALDAMVLSFLPQWTSDPTKQVSVRLPENVNRDTIRVELEKVVPTNLCFEKPRLEESFYGARRTKEYKGAVATKRCALNELGYTGLNPVFQLKTLGKDVAKILDPGIRAAIENFIRDNDPNADAWQHFCKSFQQPSKNGNGAPVKFVRLVVAEDLTEFADLSKGDSRPSLRKGERHRGYYLYADAKGKVRVRPVYVFQSPGNVRKELLALQGTEVSEIINFFQSGCAVELDAAVDHPKTPLKPGVYKLNSIKLDGRARVTSATGVVSEDIALAKFLAAGLHRK

SEQ ID NO: 7226 - protein, 1380 aa, unidentified
  REGION 1..1380: note = Description of Unknown: Cas Enzyme sequence
MEKVLGLDLGTNSIGWAIREIDNSLENQIIDKGVLTFDKGVSEDKSGEHPMVQKRTESRGKRRNYQAEKYRKWHLLECLIENKMCPLQMEDLNAWRHYKKGQGRKYPLDEKFIQWLRFDFDGDGKPDFERFGFNKHESLYIFRVLIVDSSKKEIFINEPQIIGRVLYQLVQRRGFNDDQNIDEIEKDELSKTIMKGGGESGALGVNQIQPFVKEHKTLGAALYYSQKEQNTRIRKRYNLRSHYESELREICNIQQINHLYNILWASIIWQRPLRGQKGLVGTCTFEQNKSRCPASHPLYEEYRTWVFINNLKIEPIDNDLFESDSEWQKQLKQVLKEKVYPQFFKAASDFKLSSITKELKKLGYQVTAKFPEDTKIKSLSFLYKMKEIFGEDWASIIEWNELIAGTPKSRKYNIDDLWHLHFNKSDNKLSNETSSTYLQRFAKEKLLLSDTKAEEFSKIKLRQGYATLSKNAIKKILPYLQEGFIYSEAIYLANLHKVLGIQNLSQDVVTHFSEEVRRLTKYHSREKKQIQVVNELISNQLNGDTRFGMDTSYELDDDDNNDIETKIIEVFGRRTWDNLNKDSREEVTKYVSNSYLAFLRKRIHEKGAYVKPSRFHDKVFNWIKDTYNIPDENKKFLWHPSEQEIYLPSIKKDGKEFLGSPEPTSKGFKNPMAMKTLHKLKKLINFLIAVGKIDSDTRVVIEIARELNDTNKRKAIERWQKDREKENESYKKRIDEINELGNSNFNREDKNLINKIRLWEEQNRRCIYTGTTINLSEILVGSKYDFEHTIPASMSFDNELKNLTIADKKYNQQIKGKRLPSECPNYETEISIDATNYPPILSTLQSVFGRLSETEVKINGKNIIKRSFEKIVELEKLFVEWKSKTSDDKTIKDNIIIKRHYIKMDLDYWRQKLNSFIITEYKSGWKNSQLRDTQTVTKYALPYLKTVFNKVEVQKGSITADFRKIFQIQHRLEKKERTKHSHHAIDAAVLTLIPTPALRDKILLQYNEAQEIQQNFHEKPRQWTKFQTHHILSIENDVLINYQAQDRTLTPTYKTVRKRGKIQFVKEKLPSGKWQYRLNKEGKKIPLIAKGDSIRGRLHKESFFGAIQINGELSLVERYPISSFTSINDCKNIVDKAVRKHIEETLTNRIAAGMSFDMAKSEPISFPNNKVLIKKVRCKVAAGRGYLTPEKALEIRTHTLASKTSYKQYLYAQSDQNSYCLYYENEENGKRQRAFRIVGLFELSKLGLNKDSDLYLDSFYNNYEVGKGNKKIILPLISIIKVGTKLIFVKDHIEELKELSKDDLLKRIFNVYKFNMPSSSYVYCQNHVEARDNDNLGNGDTEIKFENYQPRVFLSASKFSAAIEGKEFSIKPDGEVIWLF

SEQ ID NO: 7227 - protein, 1063 aa, unidentified
  REGION 1..1063: note = Description of Unknown: Cas Enzyme sequence
MKKRTLGLDLGPNSIGWALVEEDSQQKGGCLIDMGVRVFTEGLDAFDTGKESSRNEKRRVARGMRRQTARRRKRRKEMTDALTSVGFWPSTAQERDNLMKLDPYELRAKAVSNVTLTPFELGRVFLHLTRRRGFLSNRKTDATGKEGEGLLHEIEENETKRVQSGHPTLGSWLNEKQQTQDPKNRKEDDHVRRRHLSRKQYQHEFDLIWKSQSGFHPKLLTDRLRWGNLGPIEFPCKPLPKTDRSATNLELFGVEGLLFFQRKMYWPTAVIGRCELEPKKRRCPLADRRYQRFRIWQEINNLRYIDPDSGRESQLTPGQRTLLFGKLWDVDKLEFSKIKKALGFLESVKFSLEKGEKSSIKGNATDKIAKGIWGKDWIHLEEALKDEIIEALTNPNLDDREFVNLATSKWGFDTEQISRLMKINLPSGYGSLSLKAIKKLLPHVEKGLTYSLQDEENSALHAAGYLRRDQLKKRIYDFLPSPQVERSAPIGDIPNPVVKRTLTEVRKLVNAIIREYGKPDEVHVEMARNLKIGAKKRKEITTENEKRAKKREDIASKLRDHGVLANRENILRYQLWEEQNRQCLYSGRTISVSQLLGEGAGVELDHILPRSRTLDDSQTNKVLCFRDSNQSKGNRTPSEWLASTNTAQFDEIIQRANILLRSGLMPYGKYKKLLQKDVNTDEFVSRQLVDTAYITKVTGEYLRCLFDADHHVLGLKGALTAELRWQWGLETILEQLPDSPAWATKDEMRPGEKNRADHRHHAIDAVVIALTNRSRLQSLAKSMSDRTNQREGELLDEPWENFRDTIKERVAKVWVSHRVDRKVSGPLHEETQYGKTERPDWWVSRKSIEKLEGNDVPNIRDPLIRDLVISKLKQAGIDVRRDAKVDQKRLKDVLADLKMPSGVPIRKVRVLKTDKTIRAIRKRKSETFVKPGSTHHLSIFEWEEKGKRKRDAIFLAMLDACIRVKKGLNLIEYRPPNGHLDIPSHARFVMSLSTRELILVEREGRTTILVFRSAKSTTKQMSFAEHSDARKSKQIKEFSFYPNTLCGRKVTVDLLGRIRNAGD

SEQ ID NO: 7228 - protein, 1047 aa, unidentified
  REGION 1..1047: note = Description of Unknown: Cas Enzyme sequence
MTYRLALDIGANSIGWCLIDLDAAGAPCGLRDMGVRVFPDGRDPKTLASLAADRRLARGMRRRRDRYLQRRTALLHALVRYGLMPAEEAARKALAALDPYALRREALHRKLAPHELGRVIFHLNQRRGFASNRKTDRSNEAEQGKIKVASDRLKAEILRAGLPTLGAWLAERHDRQQDVRARLSGTGAKADYPFYPTRDLVRAEFDAIWAAQSGWDPLLTDAVRDVIAGVLFHQRPLKAPPVGRCWLEPAEFRAPKALPSTQAFRISQDLSHLVIRRVGEPDVPLDATQRAKLADLLNPGSDLSFHQVRKALGLSRGETFNLESKARDKLKGAETAARLAGKKGPLAAIWPLLDAVARDAVVRALLDAETPQAAIAALAALGIPANAAEAAERVTLPDGHASLSSKAMLAILPHLETGLTYDKGVQAAGYRHHSDDRDGVIHDRLPYYGAALTERIGTGTGQPDDPEERRFGRAPNPTVHVALNQLRHVVNAVIDRHGHPAQIVVEVLRELNQSAFERSRIEREQKENAKRREEWAEDLRKLGQRVNGRNLAFMRLWSEQSGDPKERLCPYTGERISLARLFSGEVEEDHILPFAITLDDGFANRVIVMREANRRKSRQTPYEAFHAQPDWPDIQARAALLPPSKAWRFGPDALEKWKGEHADFLARHLTDSAYLARLARMYLRAVCDPDQVWCVPGRLTAMLRDALGLNSATLLGKGGARKDRDDHRHHAIDALTVGLVDRSLLKRVATAAGRTQDRGRRMFDDVGEPWAGFVAEAAARVQAIVVSFKADTSPSGRLHNDTAYAALPDAGPKTPNVAHRVPVQNLAGWKPEEVREALGDALLARRVIAALEGVSGKPAQAAALGALAHDAEGRKVRRVRVRERLDGTAAIKDRRTGQPYKRVKLDANHRVEFWRLPAVGGRPGKVQMLVVPMMVAAADAEAARLKRPLPDRRPHPAAKLFMRLHKDDVVAFGVGEARRLLRVVKFSERQIALADLHESGPLKARDADKAYPFKYVYPGISRFAAERARKVFVDPAGRVLDPGPLPW

SEQ ID NO: 7229 - protein, 1267 aa, unidentified
  REGION 1..1267: note = Description of Unknown: Cas Enzyme sequence
MKKILGLDLGANSIGWALIQQDEENNAGEILGLGSRILPMDSFVKSATGAESKDPYQDFMSGQGLSKAASRTKARLARRRLERKKLRRSRLFRILNKIGFLPEHFANAIDFVHRKGQFLGHAEPKLAWDTLPNGKNLFLFMPSFREMVIELNEGKSSQKKNELYPYDWTVYYLRQKALKAPISKEELSWLLLHFNQKRGYYQLGREEVKTEKNKKEEYLLLEVENVLSIQPDLKDKNKKWYELQLKEADGRPYPHIYKKPSYKENENFIGRKLQLVITSTLDENGNVIKDKEGKAKVSFRNPKEDDWGLQKLRIEDLLKRQGLTPGEFIWKTLKENPAVKIKGGILKVVEREFYQAEMQLILQEQIKYHPELQDIDLFAQCVEELYPYNETHKNQLLALKQADRWIHLLLNDTLYYQRPLRSQKSNIADCAYETKIFIDKNTGEEKREALKGCTKTHPLFQEFRLWQFIHNLKIYELNKTVDGKRHELFDSTNEFLQTEQQKAELYEFLQNQKTIKQVDVLVYLTNLKAKGIEDRYRWNYPTDKQYPGNLFRHALLSLTHEAFVDSLDESQLERIWHILYSVDDKYQLIKAFTGTGRKKTKAQKKLNELLVAHGIENRQLENFANIFLSGDEGAYAAYSQKAIKKLLPWMRCGKFWKEENCSTNGLNRLKELEVRFDAMAKIEDGFTSIAQLADDQVPKALLSSFQHKSLKGQGYATHLACYIEYGRHAEAAETLKWNNPQEMTDWMKRNMKGSYLRNPVVEQLLKETMLVVGDIWNHYGNGEADFFDEIHIELARELKNSNDERANISQQQSKNEIRNERIKYLLAELKSAYNDIEINPYSPAHQEKMKIYEEGVLQQEKSKQENKGKASENTNTGLFDGLEYATNFKLSESRNEINRYRLWLEQKYLSPYTGKAISLSQLFTKKYEIEHILPQSRFFDDSLSNKVIVEQAVNTDKGNKLAYEYIKSRGGARVELGNGQTVEVLTEGSYLELLDQVFGKKPSAKKRKLLMEDIPDTFIERQLNDTRYLTKYVKKLLSNITRMPGELAETSVKVIPTNGSITAKLRNDWGLDEVWNKLVSPRFMRLNELTGSNHFGEMVEKSGKVWFQCRFPDAITKSASTENEKSEAAETSKTEKIEKSKKRIDHRHHALDALVVACSSRNHVNYLNNENAAASKKEVRRDLAYKLKRQEIIEIPDHQKPGSYKKINVSKEFLKPWATLPQDALQALEKVSTTFKTNQRIFSQGRNYYSRWMKNENTGNFEKTTVA

SEQ ID NO: 7230 - protein, 1051 aa, unidentified
  REGION 1..1051: note = Description of Unknown: Cas Enzyme sequence
GSRIFPVGVKEDSYAKSGTEESRNAARRAARSIRRGYDRYHQRRNELERILTERGMMFDKTVSIPTKELYGLRRKALDHALTLQEMGRILFLLNQRRGFKSNRKDAGKSGEAEKELTGMKAAMSELEAKVKASGSRTVGEYFASLFDNQPENWHNPNEPVERIRRRFVNRKMYEQEFELIWETQRQHHPGVLTDELKTEIRDRVIFFQRRLKSAKHLVSKCRFEPEKRVMPKSHPLFQEFRLWQRLNDIRITIENTDRVNSFLTNDECATLTAELGGSRSMTLPAVKKLMSWPKSTKFNDIGEKIVGCTTVAAIKEAVGEDWYFKQTPERRLQLWHTLYFATDDGWVERYAQEKLGMNDEQAIRFAEVKLEQDYGSISYKAASKILPYLVEGYDFAGACVQAGYHHSQNELDAVDRPLDNKVNTAKVEPLRNPLVQMTVNETARLVNAIIEEHGKPDLVRVELLRELKKPKAVREKMRNRMRDKEKQRDEYRDFLKAKGIIADPRMSDIKKFELWLELEYSEDNLSKLDPSVDLRAFAKFAEAVNSKDREKFYLWLECERISPYTGNPIPLHKLFSEAIHVEHILPYSRSLDDSFANKTLCEDAVNDEKGNLTPLEYFEQKRAPAELKAFKQRIQNFSQGKLDKFLATDVKDDFLKSQLTNSAYIGTEVRKLLRTVFKDVRVTNGQLTGLLRRVWKLNELLNVGEDRKNRDDHRHHAVDALVIACTSQRLVQRISTESQFDYRGNQRVPDIGVPWNVFRADAAEHLNGMLVSYKGGKRLLSTKKNKYIHSKAHEGKPEKHQRTKAVRGPLHEETLYGRITITGRGEKQETYVVRKALTALTDVKQLDLIVDPVVQRVVKEHVAAHNGKLKDAMKESVFMPVKPGKEGLQVPIKSVRLRVNTEEMVELRPNTYVEPGSNYCIAIYEDEKGKRAYRTISFLKASQLALRKEPLYPAEIEGKKLLMTLQQRDLVVLYDEHPDEIQWNSPSWMAQHVYMVRSMDRKGELHLVLHKASNAKSGDVAQKEAGLYLRRKVGNLKVVPIHINPLGKIVR

SEQ ID NO: 7231 - protein, 951 aa, unidentified
  REGION 1..951: note = Description of Unknown: Cas Enzyme sequence
MKKILGLDLGTNSIGWALIEQDFGKKEGNIIGMGSRIIPMDQAQLGDFAKGNTISQTAERTRLRSVRRLKERSLLRRERLHRVLNILGFLPDHYVQAIDFEKRLGKFIDHTEPKIPYRRVQNSDQIKYEFIFKNSFNEMLDDFKTHQPGYLIGDNGKPRLVPYDWTLYYLRKKALTRKVEKEELAWLIMNFNQKRGYYQLRGEEVEDTPNKLIEFHSLLVVDVIEDEIKSKKGDVWYSVVLENGWIYRRSSKNPIYDWNGKRKDFIVTTELNDDGTIKTDKEGNEKRSFRSPGEDDWTLKMKKTEHDIVQSGKQVGEYIYDAMLKEPSQKIKGKLVRTIERKYYKKELELILNKQSEFHPEFSNEETYNQCIRELYCHNQAHQLELSKRDLIHLLIDDIIFYQRPLRSQKGTISNCSLEFRKYKSKDGVEQVQHLKVISKSNPIYQEFRIWQWIYNLSIYTIDKDENVTSSFISNADDCEALFEFLNNRKDIEQKPLLKYLLEKKGFKGKAASSEIEKYRWNYVVDKKYPCNETRAILLTRLDKVSGLSVDFLDRDKELNLWHIIYSVTDKGQYEKALKKFAIKHSLNVEQFFDAFKNIPPFKSEYGTFSEKAIRKLLTLMRIGKYWKWDNIDTPTQKRIEVLINGEYEETISDKVREKVKLLQHENQFQGLPLYLAQYIVYGRHSEASDAVKWNTVSDLNQYLKDFKQHSLRNPIVEQVITETIRVVRDVWEKYGNGQPNYFDEIHLELGREMKNPKNERERMTKRITENENTNQRIKALLAELANDTSVENVRPYSPNQQEILKIYEEGALESVVDIDDDILKISKTAQPSATDLKRYKLWLEQKYRSPYTGAVIPLNKLFTHEYEIEHIIPQSRYFDDSLSNKVICEAAINKLKDNQLGYEFIKNHHGEKVQIGNTTVKVVEVKDYEDFVKTQYARNRAKLYKLMLED

SEQ ID NO: 7232 - protein, 1022 aa, unidentified
  REGION 1..1022: note = Description of Unknown: Cas Enzyme sequence
MRITYNDFVKGLVFGFDMGTASIGWAVRHGNRFIDTGVLICPEETNDLSARRTLRRQRRTIRNKRFRRRWLKKELAKIGLPFPANALKEHPVESRCRAVAGGCLSPEQLHAALSHLWKRRGYSEVPWADDADREEDREAKEEKGVIKKAMGSLKKEMDEAGCCHPCQLLAHRMKEGKKQRKEYWPRDLLIEEHRAICDAQKGNYPKLHAKMDWLLYGDLSKKVEEFRVYDSLDEGRNPGVVGLRWPRFENRNPALDALAPLDERGLPRHVVRKNKQAYLDAQWELALMNFRVIDIQTRKIVDPIQAHPKFIAELQKEWEAKGKVTLARLKRLAAPYAEQFVLDENQKPLTPQISSGRARYSSPTLESIREAIAKGHRVDPPQPVLQRKGETRTKALHRYLREIRHPLVRHRLILLQRLLVKLEKEYGIPDLVVMEAVRSLALSPKRKRELNKRNEEHRQNREQAVTALKTEKQSTSKNSIQRYRLWKEVKGLCPFCKQPIIQRDLYSGAADIEHMVPRHRVDSSEWVNLTVGHLKCNREIKADRTPHEAFASSTLWPSLKKHAEDCFRGRKLEIFLSPNAEELLENKADLQHTAYIARVARHVTLLQFNWLGKDGRDPTPEKQNPALSFQVTNGQLTSRLRRAWGLNQILHPITDGRRWDDLTEAEQEQFKQKNRGDHRHHALDAMVIACTLPWFAHRSVRAKDRSTGEDGWWDLDETTQRSIAINPVFPREGEMRRVAEAQMEKLVVQHHTSRSNHRQAYYTTLYGRKGGNTYVAREPLGKRTPKNLNNIYPTELADYCQAAWLRYEDESPDIATELKKAKRAKRGLPAAFEAKLCFSNFQRWRKQAKRGESHFDWPKEIKIPIRNVKVIGVHDDTAVAPAAPGTHAFVKRGVFKEVRIYPSPDGKTWVPLFIPYGKHDQPVAGEEWDATAKPVKIIRRGDTINLKNGSGPSNPPGLYRVASTMQKQIQLLPVNLADTKEALLASGFLANGANIRWQTFFTAMAHELPHPPSAQPSVTGSD

SEQ ID NO: 7233 - protein, 1048 aa, unidentified
  REGION 1..1048: note = Description of Unknown: Cas Enzyme sequence
MSNIKKRKVLGLDLGSNSIGWALLEEVDKRPQSIIDLGCRIFNKAVEDQTPTPKNVSRRNARLTRRVLQRRSRRKQRMLHYLISLSLLPESLRNDHSPEITLNSIGDPYELRAKALDDPLEKYELGRIFLHFVQRRGFLSNRKTILGDLVDDPDVIAVLAEAEEEEDTSSEQAKEETLFKKQISVLRQTIADKKCRTLGEYLLTVKAPLTRRSRTHSGGQLRTDRQMYREELDLIWKEQARHLSTLTDEVKVQIENIIFFQRPLKLRSDRIGKCSLEPKKNRASIARLECQRFRYLQDISNLQYMLPNQDQYTKLNENEKGILVTLFESKGVVSFTDVKKALDLKRNVKINIEEGGNKKLKGNVTSTTIRKVFSGWDKLDSTQRVALAEDMLTIQKKTTLKKRLTGHWGLSPEIAVELCMLEFEPGHMNLSLNAINKLLPFLEKGMLFNEARVEAGYGYDVDQTEEKDRLGMPPKTSNPIVNKGLHELRRLVNAIIAEYGKPDVIRIEMARDLEMNTKRYQAFVKQQNTNTKANDEATEAFQDVNSQNRHLELGQFPSHTDKLKYRLWIEQEKRCAYSNQSINPTSLFTGEVEIDHILPYSQSLDDSYMNKVVCFASENRQKGQRTPVDAFITNSEKWEQIKQSVFRWGKKLKSKQNRFFMTDSEVQKRDFISTQLNDTRYISRLSLDYLKQLGADITTCKGITTSQVRHWWGLDSLLGEKNTEKDRTDHRHHAVDAAVIATIDRGFYNKIVSTAKQLERGNSSLKMNDLKVAPPWGDFRNDLDKKLKTMIVAHSPSRKIAGSLHEETGVGFIEGQGTVYRKLLNQDMKLNLAEKIIDPQVRAIVLVHLEQYGGDPKKAFAEDVTVFHSDGKTPIRRVRVLQSKTTLNKLEKNKFAVRDRQGKTFKWLTYGNMHHVEIVRDRQNGKVKGEFISMMEASHRAKGIRMPKQPLVQTDHGPNIELLMVLHKNDLVSVEQDGERRFYRIQNLGSSDENDNRLMLRFHTATTEKNPKDGIRKAVSTLVNDLQLQKHYVNPIGKIMIQNDQTYY

SEQ ID NO: 7234 - protein, 1022 aa, unidentified
  REGION 1..1022: note = Description of Unknown: Cas Enzyme sequence
MSRREPVASYRVGIDLGSNSLGWSALRLSRSGEPDYLLRLGVRIFSSGRNRKNGESLAVERRDARQQRRRRDRKLRRTQRLLTALREAGLFPTDPGEAQALKALNPYVLRLKGLSQQLEPFELGRAIFHLNQRRGFLSNRRADRDEPAERGKIATGVKALQDKLQQSRVETVGAYLHSRLLSGAGTRARRTGTEAKAIYEFYPNRAMTAQEFDLLWDRQRSFHPDRCTDSARDRIRGILLFQRPLRPVDAGKCSLDPTEPRAPHALPSVQVFRIWQEINNLRVLQPGERSEQPLSSEQRETLFALLATKPKLSFAGIRRGLQLPRRTDFNLQTRTRDKFLGNLVTATLGHAECMGSAWTRLTLEQQDELVGVLIDDRLPDAEALEKLGTKHGLSSDQASAVLNASLPPGYGRLSLKAIRRLLPLLEKGLTYDKAALEAGYPKLSTDGDGSREELPYYGEVLERHVAFGTGALEDSLEQRYGKVGNPSVHIALNELRKVMNGLIRRYGKPTEVMLELTRDIKLGWNKAQEIQKEQEERQKANDKLRKKLEELNQPVNHDNILRMRLYDELCGSDGLAATCVYTGEQICVSQLLSDEVEVDHVLPYSRTLDDTIANKVLCVRRANRFKDNQSPFEAFGASPADYAWDDILDRARTLTRRRVRRFAEEAMQRADDEGGFLARQLNDTAYMSRLAREYLSHICPPDRIVVTTGRLTSMLRGKWGLNRLLGEGDKKDRRDQRHHAIDATVIACIDRKLVERVARVAAEEERLDTDRLLGTVDVPWSTFRPGLENGLQRMVVSYRPNHSPAGALHNDTAYGALDDDTGDGVGKRPVWHYVPVVNLVGKTPDALRSGVVDPGLGDALAQLMDRQKDEKKSAQRAALAEFAQTKGLRRVRWKETLTVVPIADRRTGRVYKYVKPDGNYCVEIYHGKKDRWTGTVITRYEANQPGYTAFRASTDYRSRTFTGAPLIMRLVGDDTIRLTEADEEQVYRVQSVQSRLLLAHHRVSGDPTRQSLDLGSTQASLK

SEQ ID NO: 7235 - protein, 1056 aa, unidentified
  REGION 1..1056: note = Description of Unknown: Cas Enzyme sequence
MPYVLGLDIGARSVGWALLEKEGDSFTRILRAGVRVFEAGTEGDIEQGRDESRGATRRAKRLARRQIRRRRQRARALYRELSGAGLLPPITPVPGSPMAVPIQEAINRLDCELRRKYAGERAVNQLPYLLRARALDHRLEPHELGRALYHLGQRRGFKSNRKAESGKKAMEDSSKAGEEKSLVYRGIDDLKRQIREAGARTLGEYFATLDPAEQRIRNRYTHRSMYEEEFEAIWEAQRRHHAALTRELKDRLWQILFEQRPLRDTEDLVGEFAWIPDEKRAPVWSLDYQRYRVLQTVNHLRVAENRSAPRPLTHEERWRLLEELEKKPKVTIAQAKKLLGLKKAEFTVEEGGEKELPGDKVAAQFYEKLGESWSRLNPEERRALVECVATAESDEQLSETLQQQWGLSADQANKVVREVHLPSGYAPLSLKAIRAVMPYLEQGMDVQRARLAAGIPLDRPVTVHPLLPPVADSGMAVFNPAVERALTEMRKVVNAIIRRYGKPDEIHLETARELRKSREERMKESRRMRDREKEREEIIRRIRDEVGIPEEKISRDDVLKGLLWQECEGRCPYCGESLGGFASLFGGNSPAQIEHIIPFSRSLDNSFVNLTLAHVSDNAYKGDRTPREAYGSDPERWDEILQRVEVFKGSYSKAKLNRFKMDESAVGELFEQFSSRALNDTRASAVAAARYLSLLYGGETVDGKRKILKVTGQVTAYLRDVWGLNGLIPSIHREARGEAEDGQAEARPVKSRDDHRHHAVDAVVVALCNQGWIQRLSEANRGALAARRRLFAPVEPPWVGFKEQLKDILKSMNISFRPDHRVTGALHKESHYGYSKVSESDNPVFKIRKPVYELTKSMVQKIVDPAVRSAVQEKLAAVGGKVEALKGNWPVLQSKNGQSRPIKKVRIQVALSPIEVGKNHRKRFVEVEDTHHMEVFEVPGRLSKWKARVVKMHEAAARLVCGANIFDRHLDSKSRYLFSLMKGDCLQMHGEMSGIWIIKTIRANTQIELVSQYDARPVGSSKGGARVTRKCISEFQKFSPRKVVVLPIGDVVRCNE

SEQ ID NO: 7236 - protein, 1117 aa, unidentified
  REGION 1..1117: note = Description of Unknown: Cas Enzyme sequence
MKKILGLDLGSSSIGWAFITANDSGEPQEIKNIGVRLVPLSSDEKGEFESGNTITKNRSRTLKRTMRRGYDRYQTRKNNLKAELEQFNMMPDYALLLNLSAHELFGIRAKALTQQISLPHLGRALWHLNQKRGYKSLRGTEDDAEGEKKVTDYEQEINDRYSHIKERGITVGQYFFEQLQKNQFARIKQQVFPRHAYIEEFNAILKVQQKFYSNIITDELIENLRDHIIFYQRPLKSQKGLISKCEFTSTKVTEPATGKVTLIGPKVAPRSSPLFEVCKIWESINNIRLQDRFKKERVITLEEKQQLFLELDNKGRLSEAELFKILGIKKSEYNTDALLRKKGIQGNITKTSIAKVIGNNSVYEGWLQFSLKIVEKVNKETGEVREEISPDFENQPLYKLWHLLYSVKEKEPLIKKLIDLKFDEETANKLVKLDFTKGGFGNKSARAIRKILPDLIKGEHYSDAMAFAGMNHSDSKTKQQAENLGTIDKLAPIAKNSLRQPVVEKILSQLINVVNAIIADPAMGKPDEIRIELARELKQSREERNRTFMNNNRRDRENKEIKKHLNEHGLKGSQKNVERYRLWQEFQYLTAYGPYNPEKQVSFAQAFGGNYDIDHIIPQSRLFDDSFANKVFSSRAQNAAKGNRTAFDYMQSLGDETFNAYIAKVEDLYRNDKISRTKRDRLLMSATDIPKEFINRQLNETRYIVRKAKEILAPLLKHKEHDIICTNGSVTAFLRRNWGWEDVLINLNWDKYPEAVKRYETDVNGRRYKVIEGWSKRDDNRHHAIDALTIACTNRSVIKRMNDLNQLANSDTVNDEGLKSYIQKIKAFPTKDVQEWISKILISIKPGKKIVSKSKNKVNGQITLAPRGPLSEETVYGQIRAKGKNEYVVKYKLGIDFKTRDLNYIVDGGLRKIIEKRLAAYDNDPKKAFKDLDNNPVYFNEEKKIPVKSIRMFTNLNAVQAMNFNNEGEPIGFVKPGNNHHIAIYENEKGKRIEKVVTFWDAVVRRREGLDAIDKQPNDGTKLISSIQQNEMFIFNMTKDEIDEAVLRKNTSLLSKNLFRARKLTSGAYWFNHHLETLPRESVEDKKAGRCVQAALSTMNGVKVRVNHLGQITKIGE

SEQ ID NO: 7237 - protein, 1081 aa, unidentified
  REGION 1..1081: note = Description of Unknown: Cas Enzyme sequence
MSESGSLAHDYVLGIDLGSASLGWAAIRLDSTGMAAGLLRAGVRLFDPAVSGDIEKGQDESNAVARRTARLIRRQLRRRAARQSELFRLLQSHTLLPGYEGAEADASQQRHAILNALDLELAAKWTKLGGAGAQVAIELPLYLLRKTALDAALDPFELGRVFYHLSQRRGYKSNRREQTEDKKATGKAKKAEDLGAVEGGIRDLEEAMLSSGARTLGEYFAALDPHAQKIRGRWTARKMYEEEFAAIWTKQAIFHPALLTEELHHQIKHLLFYQRPIKAQSHLIGGCELEPGERRAAWATLEAQQFRVQQKVNDLEIILPGNVTGIPLTSEQRKVVLDLLEHSSEATFKKIRKALGLAENIGFNLQRGGETRLKGNLTNTLMAEAFAERWHEMSDEDKKQVVEDWRNIDLEESLIRRAIEHWKLDEAGAKWLAQKPAPSGYCMYSRKAIIKLLPLMVTGMRFKAAEKEVYGNRLTGGEVHDRIPPVRDALKTLRNPAVERALTELRKVVNALIREYGKPTEVRIELARDLKKPRHERAQAITYNRNREKQRNTAKEKMLKEMGSGFQHPSRADVEKALLWDECQGECPYTGKRFPFSSLFGENPPLQVEHIIPFSRIPDDSFQNKTLCYHEENQHKGNRTPFEAYTDPVQYEAILNRVRNWRTPNPGKQRRFELRTLDELEGFSERQLNDTRYASKLACELVGTLYGGRDIKTDTGSRQVVFASSGMVTATLRKGWGLEAILREAAPSANGQNRGKPRTDHRHHAIDAITIALSRPKMIAALSRNNAQDQNWPWNGRSAPRIQSPWKDFVDSIRPHFEQMQVSHRPEHRLTGALHDETNYGKPRKDGGKDIVHIRKQIVGMSAGDIENIVDPAVREVVRAKASSFGGDLKKWTPKEGSEDWPQLETKSGKYIPVKRVRIKKALGVETIGKGERTRNVALSSNHHVAIFALLDERGRERRWESEVVSLMAAMERKRQLKPIIQTKSASIPDSIFKLSLMWGDTLLIHKDCEHSKNICKPSFWRVRSIWEQGTLTLVRINDARQLNEIRAAKDWLLPSADTLRKLDSVKVVIDSLGRIHEAGG

SEQ ID NO: 7238 - protein, 925 aa, unidentified
  REGION 1..925: note = Description of Unknown: Cas Enzyme sequence
VQDSPIYQLRRRCLQGKRNLEEIGRALFHLGQRRGFKSNRKDSTKDNEKGAVKEGIKNLANQIAASGTRTLGAYFSTLDPHQARIRSRWTARAMYEDEFVAIWAAQAAHHPTVMTYDAMKKIYLAIFHQRPLKSSADLIGFCELEPHHRRAPMGCLIFQRFRIVQKINDLTWKDETGTLCGPLQFDDPRRRQLIDRLDAEGDLSIAEVKKMLGVKKMTLEEGAAKTLPGNRTVAKLKTPLGSHWDNWSAGQRETLVNELISDMDQDVWKKRLVERWGLTEEEAEVVADIGLQDGYASLSRRAMRRLLPEMEAGVPFATAKKKLYGDRGKGRPTLDSLPGVLRPQTRKYLGKINNPAVVRALTELRKVVNAVMRKYGKPVRIRIELARDIRNTRKQRQAITEKIKERTAERETYKTEMARKLPGIFGGREPSRSDVEKWALAEECNWICPYSGKSITPELLFGSQAQFDVEHIIPRSRRPDDSFTNKTLCHADENRRDKSNQTPFEAYHGTPQWDQIIARVKRFQGPGARGKLRLFEVEKIDDDFTHRDLNDTRYASQLAKDYLGLLYGGNDGIDESGTRCVQACCGGITATLRNDLGLNNLLSDDGEKNRQDHRHHAVNAVAIALAGPRTVQLLAEAAGNAALEGRRRYASLPEPWPAFWANVEEVIGRIVVSHRVNQTLAGALHEGTNFSPGKTRQNAKSGKADEVRHVRKKLIGITKGQIENIVDPRVKKAVVDFLGGRDPKTVFKAGSPFPMLGNRKNPNRPVPIRRVRVWEKNSVISVGDGGAARHVAPGENNHLEIIGNKDKRGNLVWDMSNVVSRFEATRRLYAGEPVVKRNWNDGQELVMVLRRGDCLELDIAGVRQVMRVVSIGSAWLQLQPPLFGAPTMEKQDRNAWLFQSGKRLQAANPRKISVSPIGEVKSCNE

SEQ ID NO: 7239 - protein, 912 aa, unidentified
  REGION 1..912: note = Description of Unknown: Cas Enzyme sequence
YAGGFRTKKEGDEGVVEPGINKLKTAMSAANCKTVGQYLQHRFDKGETLRLKEAGIYAHRDMLIDEFNAIWSEQVQHHAILNESRPDPVLGGERSIREQFFNAIFYQRPLKSVAPMVGNCSLEPSLPRAPMAQSAMQAFRIEKQLADLRWGMGRNAEPLSTAQKAVIREMLNDSVEITKKDGKLTFKKIYAALDKKSLMPAGRRSLNMERSSREDLTGNRTLRAMRDLGVIDKWQALNAATQLRIINFLADLGSPEQVDQPNWHERFTKVKKIKNPKSGRWEQKTERRTLDPKLVEFVNSLVDSDKFDRMGNMGFEIGRASYSIRALEKLTAQMRNAECDEHTAIQHCYPPLEKTGELLMHLPQHKSTGNVVVDVALGVVRRAVNEALTALGEPPAEVVIELSRDMALGLKARGAIESKIDKNRRRKENARKELHAHGKLPTERNVLRYLLWEQQDKKHCPYCSEIISLEHALDGNTTNFEHILPRSLTRVGKQRNHLILAHRSCNDAKGDRTPFEAFGHDDERWSAVKYCASVLVGNKQFAKARLLTLAEYEHETLDDESITEFTERQFAETSWIGKLTAQWLQVVCPTPVAVSRGTLTAHLRRIWKLETVIAQARFDAGLPVLDQEGENISLDDFKRYKAFWEGHSGKEYDRTDRKIDKRIDHRHHLIDALVIAQTSRSLYQRMAKHYKDVAERKLAGEPVRMKLFVEPPLANVRECALELVSGAEIRHKPDRQSAGAFFQQTAYRKVWTEDNKSRLKIRVALSQLTDAKGSLDKARKSIADIASDHTRRVVSEEFERRITAGKSVKEALATLITDPQFRTQIKRVAVYQRVGRGFADGSSAFRIEHGNRNPTLEKHYVSDGYAYVSLLHAEGKLLSAESVSVFAANRRVKRLRTGERRFFRGDTLLGKL

SEQ ID NO: 7240 - protein, 1086 aa, unidentified
  REGION 1..1086: note = Description of Unknown: Cas Enzyme sequence
NDCPYEHRSHVDKETGEVILSPVKCMSKSHPLFQEFRTWQFIHDLKILKREGEANGKTVFDQNVTNLFIPSLEAKRELCATLSSKKEITQKQMLALFRINKKPLSEKEYRWNYVEDKTYPLNPFRHEVRKRLDKIQSQISLTPVQEDQLWHLLYSINNNDELRKGLYSWVRRNAETWIPGADKEAVRNLANRFADTFARFPKFASDYASYSHKAIAKLLPLMRDNGLTKTEACEQVYGKVHNSDERIFSTPDDLAWFTRYELRKEGLRNPVVESVLGETLRVVHDIWKEYGRPDEIHVEMGRDLKQTNEQRAYSTQKILDNERANLRIKTLLQEFAKPEYKIDGVKPYSPLQQDIFKIYEENVLSGEASSLPDDIASIVKDLGGNTRHVSPSEMMRYKLWLDQKYKSPYTGQPIPLARLFTADYEIEHVIPRSRYFDDSFNNKVICESEVNKLKDQMLGYEFIRQCHGQIIFCHGLGREVPVLDVKQYEDFVKLHYKGNSKKMKQLLMDEIPASFTQRQLNDTKYLARKAMEILSGVVRDKDDEGALSSNLVSLNGNITTRLKTDWGLNDVWNTIVAPRFERMNRLTGTTDYGRWIATGNQHFQTAVPPAQSYNFQKKRIDHRHHAMDAIVIAACSRNIVNYLNNAHAHDEKSVRQDLQRLLCEKKATDSAGNYKWTLKKPWDTFTQEAADVLAHIIVSFKQNLRIATLSTNRYYRWEKGRKVLVEQTGGDHLSVRKPLHKQTVFGRVRMRQYGKVNVSEALTRLTDVKERDLRTALTELLAAHSGDVKATLKDIKARDYQLQGRDCKKVEITWIPKLEESADYAVRVGVADLKSEADIDKVTDTGIRSILLNHLARYSQSPKPFDDAFSPEGIAEMNRNIQVLNGGTPHKPIYKVRRIEHSDAKFPIGETGNKTTKFVEAESGTNLYFAIYEDADGKRSYETIPLNVALERVKQHAPIAPEENADGNHLLFTLSPGDLVFKPTEDDQNLRPEDIRDARQVLKFVSSGGTMAMFLPATSASPIANKVEFSSQNKSEKPWHSVPIKTDVNPNHRSEDLPEEWFTTAVKSTCLKIEVDRLGRVTKIYR

SEQ ID NO: 7241 - protein, 1128 aa, unidentified
  REGION 1..1128: note = Description of Unknown: Cas Enzyme sequence
MDDQLAGDFVLGIDLGSNSVGWALLRLANGKPCGIIRQGSRVFDAAYENYMQGEKEHTSNVNRRDALHRRRQSKRKRRRIVKVFHILQRFGLLPPTDDVPEPFRKSATWVESSDCNHRERRGDIRQDYFNWLDKTIRSSPWFVDRCRSRTYPEPDQTLPYILRAAACDEPLEPYFVGRALYHLAQRRGFLSNRVRPVKEDEEEGVVASEISELKERMRAENTETLGHFFAGRSPAGQPLEVNQRIRRNRTERRMYKDEFPRIWQEQEGHHADLLTEECKKQLHRAIFYQRGTRQRASAIGWCELEPGRRRARAHLLISQRYRLLQKVNDLRISRSGEPQRDLTREERGALIYELERRGDLKFSEVRDILSLKKSHRFNLQSGGESKMPGNRTASQLYKVFGDEWLSFSDELRQKIVGDVHSILSVRDEDDRKRRATLYLRKYGRESAAEDMAKSTLEGGHLGLSGAAMYKLMPFLERGVSYGHIAPDYRCLSDEIARQLLDKLDQGLSYQEARKGLLPDIAPTTEPLPMLPPARDVVRSLLNPVVMRVLTEMRKVVNAVIRRFGGKPLRIYIELARDLNKSKEQRETMAVEMRANEAARRKARGLIEELTGDPYPSREDIRKVQLFDAQSNGLCPYCLHHMGERSFLGSGTEVDHIIPRNCLLDDSFLNVVLCHTECNGAKGDQTPFQAFSGKPDLYAQMLKAVSKFSGKKGIIEEKLRRFKMDGEELEKFVADFSSRQLNDTRYASRAAAEYLGLLYGGKVGSDGKQHVFTTTGKYTSLLRNIWNLNSILKDGETNHGGWEEKKRADYRHHAIDALVIALTTKRRIDELMEAVRRAQNEGKRRPRLDDPWPGFLLEVRQRVNDIVVSHRVSTKVSGALHQENFYWARGEGRQPGLSIGERRIRKPVDRSMTRERAERIVDAGVRKAILEKLDEHGGDAKKFSDPKNLPSLGLRGELRTPIKSARIADTIKTFTFGEGDNARAVKPARNHHLEIYAETDSHGNEKRWKAKCVTMIEAYRRLRAHEPVVQQEHGSGTKFKFTIAPTEVLRCDGEQDGKALRGLFVVKSVSQEEKARSIKIEMVSVSDARPQPEIKKAHARITKSPNELFKWGAKKVVVSPLGEVSEAHG

SEQ ID NO: 7242 - protein, 994 aa, unidentified
  REGION 1..994: note = Description of Unknown: Cas Enzyme sequence
MGSYTLGLDIGSNSIGWALLKTGKQPGIVGMGVRVFPEGVDRDTKGLEKSKNATRREARGARRTHQRRNLRKRQLLGALRFKGLLPSDDSQLISLFHTNPYELRKKGLDEKLEPYEFGRVLYHLSQRRGFKSNRKSGKAKEDGVVIKGANALQTEMDAKGCRTMGEYFAGLNPEEQRIRGKYTFRSMYEKEFDLLWEKQKGFYPNVLTDELCKKIRDEIIFFQRPLKPTDELIGECELEPGEKRCSRGDWYARQFRILQDVNNLIIQNPDGTEQKLTADQRKILLDELGQKEKLTFDKIRQKLGLIETQKFNAEYRIGKSGKTVESLKGDNFSWAMRNKNIFGPKKWDAIDEQEKMKLNEWLVELEDDQLKEKLRNEYGFDDKQIEAVLKISLPQGYMSFSRKAIIKLLEFMAQGALTSEAIDVVYHDRKAIGEESENLDTLPLPEDLRNPIVNKALFEVRKVVNAIIREYGKPAKVKIEMARDVQGNKRQRDELHWKQRENEERNEDVRKRLREDIGIGNPKRDDVIKYKLWDECDRRCPYTGRQISQEAFFGANTEFQVEHILPYDRSLDDSYMNKTLCEVHENIHVKKNQTPYEAYSHDPERYEQIKQNIKVLPWPKRQKFLQKEIDLDQHISRELNDTRYICKEVVGYLKQLGVNVRGTRGKITGELRHQWGLDGIFTELGLWRDDDHRRHAVDAVVVGVTENEHLRRLARSKYSVTGVFFEPPWSDFREEVREKVKHINVSHRVQRKVSGKLHEETNYGPTDKEGLYVFRKKLEDLMLPMVDKIVDPVAREIVKNRLIEKGINLEGSGKPPKEVWNEPLYMKRTKSDNQVPIKKMRVYNVAENVIAMKDPSGKTYRYVETGSNHHIEIFEYTDSKARTKRDGRVITMFEAVQRSQKGKPVVCKDYGDGKKFVCSLAINEMFILEVEGKEVLHRIQKIIHDGRIVLRPHTYGGKLSDSDSPPAIQRKSPNTLKGYKVMVDPLGRVWRAND

SEQ ID NO: 7243 - protein, 928 aa, unidentified
  REGION 1..928: note = Description of Unknown: Cas Enzyme sequence
EQTLPYILRAAALDEPLEPYFLGRALYHLAQRRGFLSNRLQPAKKDEDLGVVKQGISELRQKMEEAKARTLGEYFSRIPPSEERIRGRWTARSMYEEEFNQLWDVQAQHHPELITAERKNQLRQAIFYQRPLRFDPDAIGMCELEPDQRRAPAYLLTSQRFRLLQTLNNLKILPPGEPERDLTPADRAKLVEALELQGDRTFAQIRQLLGLTKSYGFNLERGGEKIIKGNRTNADFYAVFGERWLQMSREEREQAVQYVYGFEKPDKLKEAAKRKWGLDDATAEKLADISFEPEYMNLSRRAMEKLLPLLEDGLKFMEARKQVYPESFERAEERELLPPAAEALPEIRNPAVMRCLTELRKVVNAVIRQHGKPAEIHIELARELRKPKKQRQGQAERMRANERARKDAIDRILKEAGISNPSADDIRKVQLADECGWKCPYTGRQISMRKLVGPESEFQIEHIIPFSRSLDNTFVNLSLCYVEENKTKGNRTPHEAYSGDPERYEEIKQRVSQFKGDRGIVAEKVRRFQMTPEEVERMLADFSERQLRDTAYASKLAKRYLSLLYGGLSDEDKTQRVYASPGKVTAYLRNEWGLNAILKDGATDKGGTFPKERTDHRHHAVDAVAIALTSAATVKQLSDAAQRAPFERRRRFATLQSPWPDFVDSVRQEINRIVVSHRISKKVSGALHEETIYSAPIAAGEGERHVRKPLASLTKTEIEDIVDPGVRQRVLAKVEEVGGDIKKFAKAENLPFLVAKDGRHIPIKRVRIKKPVSDSDLQLGEGKLAQHVESGSNHHLEVFAELDARGNEAEWDGKVVSMYEAYRRRKLGLPIVQRVHGPHRQFKFSLAAGEVLECDDGRQGRRLLVLRGMTQEAGASPRVFVVPINDARQKKDLVASGLYLRPAVNSLRKRHARKVLVSPLGEVMEAHD

SEQ ID NO: 7244 - protein, 1126 aa, unidentified
  REGION 1..1126: note = Description of Unknown: Cas Enzyme sequence
MNTPPPPEYVLGIDLGSNSLGWAMIGLEDGKPAKLLRAGVRVFEAATEGDRESGQEESRNKARREARLHRRQLWRRARRLKKVFNLLQRFGLLPPVAAVSPPADGGHRPPPRTAQQRQDFLNELDKQILASPWFAAKKISGVYPEPEQTLPYILRAAALDEPLEPYFLGRALYHLAQRRGFLSNRKAAPKKDEKLGEVKKGINNLLDAMKAKGSRTLGEYFARHVSPSEERIRGPRRWTSRKEMYEPEFDQIWRAQAVHHPSILTAEREKELRKAIFFQRPTWFDPGTIGRCELEPEERRAPMYLLLAQRFRLLQTVNNLKVLEPGKLAYELTPNDRAKLVGELDLKGDRTFDQIRKLLELPKEYKFNLEPPKRKKRKGQKGASENADDDENEKSGSAKLKGNRTNAAFYKVFGERWLKEMSDEERDRAVDYAYAFENSEKLREAASAKWGLDQAAAERLSKISFETRPAGLSRKAMEKLLPLLEVGRTYAEARREMYPEKFEARAPLPELPPVQFTADSEILRKWVEKTKALREGANPPDPMGQIRNPAVMRSLTELRKVVNAIIREHAQPAEIHIELLRELRNPKSARERIADANRENRAARDKARRTIKDETGNEHPRDDDIRKVQLFDECKGHCVYCGDSIPRRNFYGDGSDVHIDHIIPCSRCPDNTFLNLVLCHSRCNAEKGDRTPHQAFSGDPARYEAIVDRVRQFQGKTARRKLRRFLMDDEQLKNFLDKFTERQLRDSAYASRLAAKYLGYLYGGVYDANGHQRIICTSGEATAELRKAWGLYRVLGDGPTAEGGTVKKTRDDHRHHAVDAVAVALTSPASIKVLNDAARRGQEIGRRTPSLESPWNDFVDSVRQEINRIVVSHRISKKVSGALHEDTIYSPPEKPTRPPIPPRTRRLIDPRLPGKRLSKAEVKHIADGRVRQIIIEKLASVGTDDPQKAFGDPQNLPVLPNKKGAPVPIRKVRINISEPVFAMGKGPSIRYVTTDSNHHVEVIATLDDEGSEVDWDGRVVPMKDAYERIKGKTAVIDTSCKRGEKYKFSLCPGEVLGCNDEDGSRRFLVYKGVSQYTAGPVVISLLPINDGRKNPKLIRVVPNTLRKWHATKVAVSPLGEVMEAHD

SEQ ID NO: 7245 - protein, 1005 aa, unidentified
  REGION 1..1005: note = Description of Unknown: Cas Enzyme sequence
MEESRQMPYVLGLDIGSNSIGWAMLVTENGKPVRILNTGVRIFEAGMSEEKGTIEQGREESRNKARREARQIRRQLWRRARKMKKLLHILQRANLLPTGEATQVLEKLDKEFLQRYEKVIGKHLMAQVLPYFLRKKALDEKLEPYELGRALYHLAQRRGFKSGRKAPKKEEEEKKRQKETEQLDLSDDIKKKLDAGELTLGEYLIDLAIKENHIRNIWTSRTWYETEFEKIWSKQAEFYSDILTSELKKEVHKTIFFQRPLKTPLYVQETRKIDIVGNCPFEVDEKGKPRKRAPWALPSAQKFRYLQKLNDFRIIPPDGPEILLKEDKEKREILITALETKKEMTFGGIRKRLKLSKEHDFNFPGDEESKIPGNKTATSMIDVFGEERWLKFSLAEQDQIIKDILKKIEEDASYYWTHLNEKDVTEKVPNVKEKIIKYGKEKQGLDDTAAQKLFELVLEDGYCNLSEEALAKLLPELEKGTQYATAVKEVYPDKPLDKISAFLPSVVTELGELRNPTVMRVLTELRRVVNALIKQYGKPENVRIELAREMKKPKKERQKVWEGNQRSKKERDTVKDELEKETGTSDPKAYAILKGRLAKECKWHCPYCNKGFSWATLQQAEVDHIIPWSRSGDNSFFNKTLICWECNHQKSNRTPFEAFGNTDRWEEILTRVNGFTGFAAKEKLSRFKMEEEDLKELFDEFTTQQLNDTKYASKVARNYLGLLYGGLSDEKGLRVQAGRGGITAHLRNVWQVNFLGGGEKKRDDHRQHAVDAIVIALTDATKFKMLSEASKYLSRDRIAGFAKDEIELPWQGFTEEVREKVEKIVVSRRVSRKVQGPLHKETIYGKVEKDGEILFRVRKKLEDLTETEVKRIADKNVKKLVFEKMEELGTDNPGKAFKEKKNHPCFVAEKDGRRIPIHKVRINARIEEGAFSIGKPEPPRWVESKENHHMEIVEVLDENGQTKGWDGHVVSLYEAMQRPKNAVIQKDHGQREKFLFSIAPGEIIR

SEQ ID NO: 7246 - protein, 920 aa, unidentified
  REGION 1..920: note = Description of Unknown: Cas Enzyme sequence
ALDGPLPLDALGRAIYHLCQRRGFKSNRKAATSDQTEDNDKGTVEPAISKLHEEMGRIGANTYAQYFVSESFLNSGERIRHRWTSRAKYKEEFEEIWKSQQRYHPCLTGELKKRLERAIFHQRPVRIRKSSIGKCSIERGRRRAPIACLDFQRFRYRQMLNNLQVLHAVREDPTLTLAEYDTLAQRLEVDGDLEFSKVRALLGLDKKPKGSKTGYKFNLELDEEDCLIGNRTGARLREVLGEAWTAMSDAEQNRLVEEVLAFENEEALGRRLAKVFPSLAEDKARGAARVRLERGYCSFSRKALRALLPKMVERKSLAEAKKEVYPERDEARAVCEELPPIRRWQPDIRNAVVVRALSELRTVVNHVIRSFGKPKLIRVELARDLKHSRKRREKITRLNLADRKARRTIVSRILKDLPNWKGDSQSRTDIVKVQLADECGWRCPYTGEQICMSTLLGPNPQFQMEHIYPRRYGDDSFANKTLCHHTANARKADRTPFRAFGGDAQRWREILYRVRRFSGKFKKTKLQRFLAPEVPKDFVDQQLNDTAHASRLAREYLGLLFGTTRYVQVSPGRATFHLRRAWKLDGVLHEKTLRDAIPTDKEGKNRSDHRHHAVDAIVVGVTNAKMVATLGDAAQRAEARGTRLSVEMPAPWPGYLRAIRAAINPICVSWRQSRRIRGTLHKETLYRQPPPGSKSTGNVRIPLKNIKNEKQIESIVDGRIKDLVRAKFKQHAADADKSPFENDNNHPYFKTKDGRIVFVHSVRVKPEKGVSVTRIGKGVRRRWVDPGADNHHVEVVALVNQDGKGKSWKYELCDRLEAARRVSAKEPVLRTKFGLAREFLFSVAKNEYVEMEYDARMKRLYRVVGVSGKEIEFHLHTDARVTKMKDSKRKRVRCKAGGLFKAKARKVVVDPLGNVLPAND

SEQ ID NO: 7247 - protein, 903 aa, unidentified
  REGION 1..903: note = Description of Unknown: Cas Enzyme sequence
MNKRILGIDTGTNSLGWAVVDKKEDGSYSLIRKGSLIFQEGVKVEKGIESSKAADRTSHRALRKHYFRRRLRKIEVLKVLVEFGWCPYLSPEALHQWHVKKLYPMDEAFMSWQRTNDNFEENPYYYRHLCLHQQLDLNKESDRFILGRAMYHLAQRRGFLSNRLEQGNDDETGKVKEAISSLSKSMTDTGCEYLGDYFYKIYKEKGNTERIRTHYTDREEHYKKEFYAICKRQHLSEEQISKLEKALYYQRPLKSQRQGVGKCTFEPKKPRVADSHPAFELFRMLSFVNNIKIKGPHDVELRPLSNNEYEKVKPVFFRKSKPQFDFEDIAKAIAGKGRYQDIKEEGDKEYKFNYRMTQSVTGCPTIASLMSVFGDDYISAIAERYTLSDGKTPSQMVNDVWNVLYSFSDKDKVVQWGKEKLQLDDEEAEKFSKIKLTHSFASLSLSAVKKILPWLEQGLIYPHAVLMAKVPDIVGEKVWKSRGESITKELLSLIANFNPKDVTMQGTLDLCIKDILKDMCELEPGAAEKLYHPSMIETYPDAKKNAQGVYQLGSPRTNAVRNPMAMRSLHQLRKVINTLLREGTIDSQTEVHIEYARELNDANKRKAIAQWNKDRENLRKKYAQDIRMLYKQECGKTIEPTDDDIVKFQLWEEQNHICLYTGDSIGITEFVGPNPSYDIEHTVPRSVGGDSTLENMTLCSSKFNREVKKAKLPTQLSNYDEIMSRLKEWRTKIEKLRKDVDHVKTHSSMDKAVKDRLIQKRHLLKLEFDYWLGKYKRFQMEEVPEGFARRQGAGIGLVGKYAGLYLKSLFHKADDRNKSNVRVVKGTTTAEYRKMWGIQDEYEKKSRDNHVHHCIDAITIACIEPGEYNATAKYYQQLEEYERTNANKPSFPKPWPTFTEDIK

SEQ ID NO: 7248 - protein, 1209 aa, unidentified
  REGION 1..1209: note = Description of Unknown: Cas Enzyme sequence
MTTKVLGIDTGTNSLGWAIVSRDEEMGTCHLEDHGVNIFQEGVKREKGIESSKAAERTEHRSSRKHYWRRKVRKIILLRILVANHLCPPLSNETLKAWRSKRLYPMDELFMQWQRTDDKYNINPYYYRYLCLTKKLDLELPDQRFILGRAIYHLNQRRGFLSNRKSQDKEDETGKVKSGISELSKDMEKAGCEYLGEYFYRLYEKGEHIRNHYTSREDHYLKEFKAICERQQLDDSLVQKLENAIFYQRPLKSQKQNVGRCPFEPKKPRCPISHPLYEEFRMYQVLNNIRMKGPNDPEMRLLTDVEKDKIKPLFYRKSKKLFDFADIAKTLADAKNTKKCAYYKSDATGAQYLFNYQMDFGVAGCPVTAQLRDVFGEDWLEEVSALYIQTAGKTEQQIMDDIWHVLFNFDDETHLKKFALEKLQLSDDTAVKFSKITVPQDYASLSLCAIRKILPWMKETGLRYDQAVFMANLDKVLPPYVLENNETRQSALNMLLEVVNNYDSKNSETTLEGILKNYIVQYWPESNVQHIYHPSMIELYPKVKPSKDGLYQLGSPRINSVKNPMAMHSLFRLRHVVNTLLKEGKVTPDTVINIEFARELNDANRRKAIERYQRERMKIREECKKKIQEHLGARTEVSDTDILKYQLWIEQDRQCIYTGEGIGLEDFLGDEPKYDIEHTIPRSKGGDSTQANLTLCSSRFNRDTKRTFLPSELREHDEILQRIASWKEKYEDFDTKYRIAKRRSKAASTKEQKDRAIEDKHYYSLQRDYWKGKYQRFLMATVPEGFARRQSVDISVISRYARLYLQTVFKHVYIVKGLATSDFRKIWGIQEEYTKKERVNHVHHCIDAITIACIGRNEYGQLAQYYHEFEEWKWFHKEKPHFPQPWGTFAADVKKIGDDLLVAHTTPDIMPKHTKKKADDGTAIQGDTARGALHLDTFYGAIDRGEGVKYVVRKALDGLKETDLKNIVDDVVREKVLKAVAEANGSMKAALATGIWMNEEKQIPIRKVRLYTPNVTRPMKDFKKHRDVSPKDYKREYHVMSERNYLMAIYANPNNPKKREYELISYQQAAAFFKASNVMKKEGYTLVPIKSEKNGYPLLYTLKIGQMVILYENTPEEIWGDTKSSISKRLYKVVGLSYSPVTPSLSYGTISLLYHQEARQSKVLNLKKGAYKNGEMIRPLMSLYHTQINALIEGVDFRINDLGEIVRLI

SEQ ID NO: 7249 - protein, 1241 aa, unidentified
  REGION 1..1241: note = Description of Unknown: Cas Enzyme sequence
LWRDDVAVTDQHILFCDKRFTDKDYFHQYPTIHHLIYELMNNEAPHDVRLVYLAVAWLVAHRGHFLNEMKKDDVESVLKFDTIYAEVRQYMRQNDMSEWQEEKSDALQELLPQRQNITTKEKALIEILYEGKKPKTADEELINLAMSLKLLAGGKVNAVKLFPQSGYDDSISLCFADKEENFVSAVAQLNEEAQWVLLLRRMYDWALLKDALKDGDSVSAGKVKIYEQHHRDLHGLKLFIRKYMPDKYGEIFRRIESNNYVAYSYNVKSVKGDIAKVKKASAVDFCDYLRRKVKDIKVEAVDQFFYEDMLARLEAHTFMPKQVNGENRVIPYQLYYHELVCLLNKAEQYLPFLQATDHDGISNRDKLLSIFTFRIPYFVGPLNKDSSFSWLKRRGEGKIYPWNFAQQVDLDKSEEAFIRRMTNKCTYMPGEDVLPLNALIYQRYMVLNEINPLKVNGRPIDVAAKQKVYELFVQKRRVTSKAIAKCLHDNGYMQKDDILSGVDKNLNASLKSYHDFNSLLERKVLTTNDVERIIERLTYSEDKKRMYNYLAQEFPQLEESDRKYVAKLKYADFGRLSKKFLMGFKGVNKNTGETATIMDFLWETNDNLMQLLAQDSYTFNAELEALRKEYYASGEQSLTEMLDDMRIANSVRRSIYRTLDIVKDVCKAKGNPPKKIFLEMARGGGEKGVRTVSRREQIQKLYKEVDKEYANDVKELSAKLSSISDNRLQSEVLYLYFLQLGRSMYSGQPINIENLKDSTLYNVDHIYPRCFVKDDSLDNKVLVTSNENGNKGDSYPIKEEIRRKMAGLWKKYLQCGLISEKKYNRLIRSTAFSDDERMGFIQRQLVETRQSTKALAEIFKKWYPDTELIYVKAGLVSDFRHEFNMLKCRSINDLHHAKDAYLNIVVGNVYHSRFNRQWFNPSDTYSIKTGTLFGHEVKAGAQIVWHGSEDIGRVRQVLQKNNIHYTRYAFERHGGLFDQMPVKKGSGLVPRKAGLDTEKYGGYNKTTASYYLLARYVLEGKKPQADVMFVPVTLMADRQIKSQQLEYKEYVKQAIAEITGKDRKLVTEITLPLGLRHIKINTMLAFDGFLTCITGKSNGGKIVKGVSMMSLILPLEWEIYIKRIESFLQKYQDNKKLNIDNSYDGISVEKNEELYDLLVSKIENAPYNKVFSNQISTLSEGREKFIHSTPQEQVNVLTNIISILKVGRSSPCDLSGIGGKGAVASYTLSSSLKTLANRMRC

SEQ ID NO: 7250 - protein, 1178 aa, unidentified
  REGION 1..1178: note = Description of Unknown: Cas Enzyme sequence
MNKRILGIDTGTNSLGWAVVDKNEDGTYSLIRKGSLIFQEGVKVEKGIESSKAADRTSHRALRKQYFRRRLRKIEVLKVLVEFGWCPYLSPEALHLWHVKKTYPMDEAFMSWQRTNDNFEENPYYYRHLCLHEQLDLNKESDKYILGRAMYHLAQRRGFLSNRLEQGNDDETGKVKEAITSLSKSMTDAGCEYLGDYFYKIYKEKGNTERIRTHYTDREEHYKKEFYAICQRQNLSDEQIAILEKALYFQRPLKSQRQGVGKCTFEPKKSRVADSHPAFELFRMLSFANNIKVKGPHDVELRPLSQEEYEKAKPMFFRKSKTQFDFEDIAKAIAGKGKYQFIKDVGDKEYKFNYRMTQSVTGCPTIASLMSVLGDDYVSAIAERYTLSEGKTPSQMVNDVWNVLYSFSDKDKVKQWGKEKLQLDDEEAEKFSKIKLTHSFASLSLSAVNKILPWLEQGLIYSHAVLMAKVPDIVGKEAWKNKGESITKELLTLIANFNPKDITMQGTLDLCIKDILKDMCELEPGAAEKLYHPSMIETYPDAKKNAQGVYQLGSPRTNAVRNPMAMRSLHQLRKVINTLLREGTIDSQTEVHIEYARELNDANKRKAIAQWNKDRENLRKKYAEDIRTLYKQACGKSIVPTDDDIVKFQLWEEQNHICLYTGDSIGICEFVGPNPSYDIEHTVPRSVGGDSTLENMTLCSSKFNREVKKAKLPTQLSNYDAIMSRLEEWRTKIEKLRKDVDHVKTHSGMDKAIKDRLIQKRHLLKLELDYWVGKYKRFQMEEVPEGFARRQGAGIGLVGKYAGLYLKSLFHKDDDRSKSNVRVVKGSTTAEYRKMWGIQDEYEKKSRDNHVHHCIDAITIACIEPGEYNATARYYQQLEEYERTNANKPSFPKPWPTFTEDIKAIAQEMLVVHSTPDNMPKRARKYVQTSNGNSKKLALGDSARGSLHNDTYYGAIERDGQIKYVIRKELSSIKETDIENIVDDVVKEKIKQTIAEKGFKKAMEEDIFMNEEKGIKIKKVRCYTPSVTNPLHIRTHRDKSRKEYKRQFHVTLDGNYCMAIYEGEVKGKMKRTYEIVNMIDAASYFKKSADLTKRYPIAPETKNGLKYRCTVRTGTQIILLQSDDKELNLANKEDLARRFYFVAVMRGDGRIVLRYNQDARDATTLKKERKSGAYKVGE

SEQ ID NO: 7251 - protein, 1126 aa, unidentified
  REGION 1..1126: note = Description of Unknown: Cas Enzyme sequence
MKKILGLDLGTNSIGWAIIERGNGTGHIIKSGSRIIPMDTATLGDFANGNTKSQTKERTAKRTARRMRERYLLRRERLHRLLHLLGFLPKHYEEEIGWDLENDRKHYGTFLDGKEPKIAWKINDDKKYEFVFQSSFLEMLEDFKKYHPEIISDDKKIPYDWTLYYLRQKALSQSISKEELTWIILNFNQKRGYNQQRDEILDASDDKKEEYMCLTVSSVIPEEESKSKDIWYNIHFENSGIIYRRKSKYPLNWVGKKRNIIVTTKLDENGNPKLKKDGSIDYSVKSPNDDDWALLKIKTEQELKTFHQTVGQYIYASLLANPTEKIRGGLVRTIERDFYKDELEKILQKQSEFHTELKDRSLYEQCINELYRNNETHRNNIAKNDFTYLILEDVLFYQRPIKSKKSLIDDCPYESHQGIDKETGEICTYPLKCIARSNPYFQEYRIWKFLSDLRIIANTKEINGHIHTDVDITNELLPENESWSNLFAWLNDKGHITQSDILAYLGIKKKEQNKYRWNYVTDKHYPMNATRHAILNKMKGGEVLSREMEQAIWHLLYSTTSKSEIDKSLSPSSNSNGIYMKMYKAGISVESIEKIKTTKLPDEGYGAYSEKAIKKLLPLMRCGDLWDKDKIHPSTLQRIHEFQEGNGMDDLSEKVKRLISTMNDIHSYQRLPEWLACYVVYGKHSEVNEIVKWNTPEDINIYLNNFKQHSLRNPIVESVILETLRVVRDIWKRYGNIDEIHVEMGRDLKNPSDKRALITQRLLQNENTNIRIKTLLAEFLAEEYNIENVRPHSPNQQELLRIYEEDVLSHNEPDDEIQDIINNLSNPTKQPSRTQMLRYKCWLDQKYCSPYTGQPIPLSRLFTTDYEIEHIIPQSRYFDDSFSNKVICESEVNKLKDNQLGYEFIKRHHGQTIQLASGRMVRVLEVNQYEQLVKDNYAQNKRRKLLMDDIPAEFIQRQLNDSRYISKVVKGLLSNIVRTTDEEGNLEREAISKNVITCNGSITTRLKRDWGLGEVWNSIVLPRFQRLNELTGRDCFTTLNSHGQEIPAMPLELQKGFSIKRIDHRHHALDAIVIACTTRDHVNLLNNESALPENQTNKHALSHKLRHCEEITINGKKRTVYKEFLM

SEQ ID NO: 7252 - protein, 1001 aa, unidentified
  REGION 1..1001: note = Description of Unknown: Cas Enzyme sequence
DEIDAIYNSGKELPDIYKVRAEALDRKLDTEEFVRLLIHLSQRRGFKSNRKVDAKEKGSEAGKLLSAVKSNKELMVERNYRTIGEMLYKDEKFAEFKRNKADDYSNTFARSEYEEEIREIFRAQQEYGNPYATEELKDSYLEIYLSQRSFDEGPGGDSPYAGNQIEKMVGSCTLEPDEKRAAKATFSFEYFNLLTKVNSIKVVSSAGKRSLNEDERKRVIKLAFAKNAISYASIRKELNLGDGERFNISYSQSDKSIEEIEKKTKFTYLTAYHTFKKAYGSVFNEWSAEKKNHLAYALTAYKNDNKIKKYLTENGFDAVETDIALTLPSFSKWGNLSEKALNKIIPYLEQGMLYHDACTAAGYNFKADDTDKRMYLPAHEKEAPELGDITNPVVRRAISQTIKVVNAIIREMGESPCFVNIELARELSKNKAERSKIEKGQKENQARNDRIMERLRNEFGLLSPTGQDLIKLKLWEEQDGICPYSLKPIKIENLFDVGYTDIDHIIPYSLSFDDTYNNKVLVMSSENRQKGNRIPMQYLDGKRRDDFWLWVGSSNLSRRKKQNLLKETLSDDDLSGFKKRNLQDTQYLSRFMLNYLKKYLTVAPNATGRKNTIQAVNGAVTSYMRKRWGIQKVREDGDTHHAVDAVIISCVTAGMTKRISEYAKYKETEYQNPETGEYFDVNKNTGEVINRFPMPYAWFRNELLMRCSEDPSRILHEMPLPNYATDEAVAPIFVSRMPKHKVRGSAHKETIRQSFEEDGKKFTVSKTPLTDLKLKNGEIENYFNPESDVLLYNALKERLIAFGGDAKKAFEAPFHKPKSDGSEGPLVKKVKLICKSTLTVPVLKNTAVADNGSMVRVDVFFVEGEGYYLVPIYVSDTVKKELPNKAIVAHKPYEEWKEMREENYVFSLYQNDLIGIKLKKEMKFSLVQKNSTLPKNINVKDGLFYYKGTNISGANISVINNDNTYTVESLGVKRIPVIEKYQVDVLGNVSKVGKEKRVRFQ

SEQ ID NO: 7253 - protein, 901 aa, unidentified
  REGION 1..901: note = Description of Unknown: Cas Enzyme sequence
GFGDNFVENFCKIKPFKKEYGSYSEKAIKKLLPLMRTGKYWNFKDIDSKTQDRIQKIITGEYDETIKNRVREKAIDLTDESHFKGLPVWLACYIVYDRHSESKEIRKWETPEDIDDYLKKFKQHSLRNPIVEQVVLETLRTVRDIWNKEGHIDEIHLELGREMKNPADKRKQMTEKIQQNENTNLRIKAMLMEFMNDKEIQNVRPYSPSQQDILRIYEENALDNLSKDDKEFEFVSKISKQSQPTRNDIIRYKCWLEQKYRSPYTGEQISFSRLFTDDYEIEHVIPQSRYFDDSFSNKVICEAEVNKLKDRQLGYEFIKNHHGEKVQLSQGKIVTIFDVAEYEKFVKEHYSNNRTKMKKLLMDDIPDGFIERQLNDSRYISKLIKGLLSNIVREKDANGELEQEAVSKNLISCNGTITDRLKKDWGINDVWNSIILPRFRRLNELTGKDCFTTTSTEGHEIPAMPLELQKGFNKKRIDHRHHAMDAIVIACATRDHVNLLNNEAAHSKHNANRYQLQRKLRRYEKTIIKGEEREVAKEFLKPWENFTADVYNALQNIIVSFKQNLRVINRTKNHFQHFENGKKEIAKQTQGDSWAIRKSMHQDTVYGEVNLKKKKPVSFNEALKTPDMIVDKELKQKVKELFALKKNFKQIKKYFEDNKDVWREVNNGKIMIYYFTKDTNIRYFATRKPLDTTYTEKKIRESITDTAIQKILLAHLAAKNGNPELAFSPDGIEEMNRNIKALNDGKNHQPIYKVRYYESGEKFQVGQKGNKKDKFVEADKGTNLFFAVFEKKLNEETKRSFLSIPLNVIIDCQKKYTKDWRNNIENYLKEQNLVAENLHLIFILSPNDLVYLPSKGSLEIDKSRIYKFVSCTGNEGHFVPAYIAFPIVQTIELGSNNKAQR

SEQ ID NO: 7254 - protein, 901 aa, unidentified
  REGION 1..901: note = Description of Unknown: Cas Enzyme sequence
SLTDDEKRMIIPLFKRKSKRTFQFEDIAKKIAGKNNYCYIRSNEEKAYKFNYQMDTQISGSPVNAQLEEIFGEDWLSGVCEIYTLASNKTRFQIMNDVWHVLFFYDDEDKLKEFAKNRLQLDDELAEKFSKISIPNDYAALSLKAIRKIMPYLRNYGLIYSEAVFLANLVDVLPQHVWGVKEMREAAIESVVDVMHSYDNNNIDGITLEACVKSFLKQRYQVSDENLKKLYHPSMSEPYSRQRPNDEGVFQLGSPRISSVKNPMAMHSLFRLRKVVNLMLKKGYITPDTKINIEFSRDLNDANKRWAIQTWQRENEKERERCRKEIEKYIDSPSDTDILKYQLWEEQNHKCLYTGDEIRITDFLGDNPIYDIEHTIPRSAGGDSTKMNLTLCSSRFNRDEKKTKLPSELANHDDILERIKDWKEKYEDLDKQIRKVSTKGATSKEEKDSKIRRRHYLVLQRDYWRGKHQRFTMTEVPEGFSRRQGTDISVISRYARMYLKSVFKQVYIVKGIATSDFRKMWGIQDEYAKKERVNHVHHCIDAITIACIGKAEYDKLADYRHKYDEYLFNGKTKPTFDKPWPSFVIDIKHIQDELLIAHYAKDIMPKQAKRYVRDSKGKKVLTQGDTARASLHNDTYYGAIEVDGEVKYVVRKNLTGLDEKDVKNIVDAEVRSKVENAILLHGSLKKALEETIWMNEDKQIPIKKVRIFTGSVTRPINIRQQRDQSRHEYKRQYHVQNDRNYMMAIYVGHDKKGKEKREFELVNNITAANFYRRSNDRVPTDGQLVPLFSENGYELRYKLKIGTMVLLYENGPEEVWELDKVNLQKRLYKVTGMSSLVIQKYVYGTINLVHHQDARPSTEVKQTNGVFKASDEFRAGIKLYHTQFNALIQGVDFEINDLGEI

SEQ ID NO: 7255 - protein, 1040 aa, unidentified
  REGION 1..1040: note = Description of Unknown: Cas Enzyme sequence
LLEKEGDSFTRIIRAGVRVFEAGTEGDIEQGRAESRGATRRAKRLARRQIRRRRQRARALYRELSSAGLLPPITPMPGSPMAVMIQEAINRLDCELRRKYAAERAVNQLPYFLRARALDHRLEPYELGRALYHLGQRRGFKSNRKAESGKKAKEDSSKAREEKSLVYRGIDDLKTQIRQAGARTLGEYFATLDPAEQRIRNRYTHRSMYEEEFEAIWEAQRRHHAALTRELKDRLWQILFEQRPLRDTEDLVGECAWIPGEKRAPVWSLDYQRYRVLQTVNHLRVAENRSSPRPLSPEERRRLLNELERRPKVTVAQAKRVLGLQRAEFTIEEGGEKYLQDDEVAPQFYQKLGESWSRLNPEERRALVGCVATAKTDEQLFETLQQQWGLSEDQAKKVVREVHLPSGYAPLSLKAIRAVMPYLEQGMDVQRARLAAGISLDRPVTVHPLLPPVADSGMAVFNPAVKRALTEMRKVVNAIIRRYGKPDEIHLETARELRKSREERMKESRRMRDREKEREEIIRRIRDEVGIPEEKISRDDVLKGLLWQECEGRCPYCGESLGGFASLFGGNPPAQIEHIIPFSRSLDNSFVNLTLAHVSDNAYKGDRTPREAYGSDPERWDEILQRVEVFKGSYSKAKLNRFKMDESAVGELFEQFYSRALNDTRASAVAAARYLSLLYGGETVDGKRKILKVTGQVTAYLRDVWGLNGLIPSIHREARGEAEDGQAEARPVKSRDDHRHHAVDAVVVALCNQGWIQRLSEANRGALAARRRLFAPVEPPWVGFKEQLKDILKSMNISFRPDHRVTGALHKETFYTRIGKNEKGGDVVRVRVPVTGLGSKDVEAIADPAVRAIVRAKLEEVGGNAKKLENNWPLLPNRNGKPVPIKKVRVNLNRAVVSVGKGRWQRWAEPSETHHIEIYEVTSRGKTAWSGDVVTMRDAIGRASRGEPVVRRNGGPNSRFLFSLAKEDTLRLHGKKAGIWVVKKIKADTELMLVPQFDARKEKDKSNGRDSFRPTASGLQKYSAEKVLVLPIGDVVQCNE

SEQ ID NO: 7256 - protein, 1129 aa, unidentified
  REGION 1..1129: note = Description of Unknown: Cas Enzyme sequence
MNMAVSPQSLESSIARWKGHDFFNSAVVLGLDVGLEGLGVCVRRGREIVYAKTWQYDVPEAARLESRRQMRAARHCRANRKTRLHRLKKLFEKHGLPWVDEKSETSLHTDPYLLRHRAVRPTGSGLASKEALSLAIRHCVSHRGYDYEYFNDEGAYPWGDSIEFKKVLKELSTIWLTAEDASNARCEAVSFEWSDEQMAEFDKILASRTGGPDIIEKRLSQHAKGEQNHRRIPAKGEAFPRKFVWQHLEQIIKRHEHLINDPHGFLAALAVNPKNGGSKEESIFYYHRKTPAEMREHFEKKRARCPYAEWLGLGNFFAEKREHQSIRRFSLLEFTVTRDIQLADGRKVPVGEKMTKRFLDWIATNLNARTAKEAKPVIDELIEALKKEHNAKPAPNTKSPLNKSFFETLRDLLAPSVANRRKNGVMSSAAADHLYTIATASGYSREAVNSALKDCQPTSGTRFKSLYDFRRSPTSDLYGVYPQVEFLLGQRIKKDRKPSSGRKLRGTLAHDGKLQRLFKELAPQLSGKLAPDYCVVETARDLPHNLKQKQEIEAEQKKRREEREKLFAKFGVTDKGKRNERLRIKLYSQQDGVCPFSGEKLGDDPLSGTLDIEHLYPESRGGLTVDENLVLTFATINRTEKKNHTPREYAATGARSFEEMLKHTAKMRWGQFKREVFAWNSPYEIPPFGNITRTAQLAKQLHAELTRWMGIEGDSNRIAERLGTPSGFQTAACRRAWLLPEKDRNDLTHHLVDAAILAHIPPREGQNFTRYGGIFFPHWIPEKKRVVLDVLPSLGPDPQHIGVLTAADALECPILRHRSSSNKRSIHDKTIFRIMSDGTLAYRDEFPAKETIASVSALRELLTSSGIPLTYRSSLGVEKPLIPSDSVLRNWLDKPGDEPLRLLNGTSVRSRWKFSGKGSLKDDPSGFHAQWNEQGQLTGIKSILGRWDSLELWRGWNEKKKRWEYYKRLIPSPAVMRSLRSLGYSWSKKNKRPWRTEAPTSDVSLEKLLGSNLPPYARRAVHPLTKKPVVFSLGDTFLAGCTADGKLAKRGQTPARQEWVRISAIMAEGGGRIRFTSVQYSDRKPLEPMSADDFAVIAGLLPPDDSSPYPHQRAARPAHPSGEVDFRLQ

SEQ ID NO: 7257 - protein, 1032 aa, unidentified
  REGION 1..1032: note = Description of Unknown: Cas Enzyme sequence
MSSCHYVLGLDLGPSSIGWAVVKTDEKGDFCGLAAIKDSNNNIPAIGARIFPAGIDNINQGQREEPKNKKRREARSVRRMLRRRRARKLKLLSVLTANKLMPVGDKEREYELNKNPYELRAKALCEKTSLFEVGRVFLHIAKRRGFQSNRRQAEKDAEAGLVKEAIERLAQEIGDKTLGQFWAAKHPKPGEIPLEAIRNRRSNYHWIAQRQQYRDELNRIWQKQSEFYPKILTNKLKEQISEIIFRQIDFELSNMKKRKVIGTCTLIAGKPRLSMSNRKAQEFRLLQKVNDMKVFRKGREIRFDRQKLYEELMISKDRDFKQIRKLLGLNEDDRINLEYKKSKKLIGNQIDGMLTGNKFFGKKTWVPLNEQQKEAVWNELQQYLRNSNISAEQIAEKLKNEYGLKVGDMAALEKLSEPKGNLNFCEEAVNKLLPYMREGKDLYEAIEKANFVKGWTQQNFLPLPSKDNGINISNPIVTTVMFQLRKIVNALVKELGKPGKIVIEFARELKASKDLRKEIVEEQAINQDERERCTQRIREYHRWDEDVQVPATDILKYRLWERQKEFCPYSLIKIGVEKLLSTETEVDHILPYSMSLDNSMNNKVVCFARENQAKGQNTPIDWLGETSERFIKITDAMEKGMFDFDKAKRERFFVHNEEIAEKYTPDRLLQDTSYIAREVRSYLKRLYPASEAEKCVKTTKGGITAELRNIWGLNAILRDGELGPKKRDDLRHHAIDAAVIAITEPGMIKKITDRLQNNWPRRPSRTAVDEPWNGFGLELARAAEKINVSHKVLRKIKGALHKETNYWKEINGKHAGKYITRKELNGNFTNNWAEQICDEEIKRLVKDRLAEYENDAKKAFAEPLYLPNDKDKQIPIRKVRVWQTSSNMMQLRPNIWVEPGSNHHVEVFETKDKKGELKYEGKLISMYEAAQSIKNKQPIIQTNLGSDKKFFMSLSQNEMILLKLEDGSEVLHRTQKMSQSKESISIIFRPHTYGGKLSDYDKPPLIQRRSPSTLIGRKVVVDPLGRIRWAND

SEQ ID NO: 7258 - protein, 1179 aa, unidentified
  REGION 1..1179: note = Description of Unknown: Cas Enzyme sequence
KIPEVPRTMGGQMITLGLDIGSNSVGSAWVDTRRRLIDLGVGVFPAGVEQSERKRGRPVNQTRREKRQQRHSLARRAERKRRLRRVLTQAGLLPSDPPVLDALMDINPWHLRRKALSAPLTPHEFGRVLVHLNQRRGALGITLDPKDKEEGPVKQAMDRLCARMKEANAPTFGQFIADLMDKRKAESPSKPGIHILQPVRNRQYRLSPEDHLYADRQLIREEFSILWDRQKSFNGPLADLLGDELKTRLDDLSGDETWRHHGIIFGQRRTYWDTGTLGRCDLEPTDERCPLADMYAQEYRVVETVNNIRIEERGKAPRPLRPQERDNLIAVLRSQKTASPKTVRRALGLDKKALRDFFALNIERDKEREINTDWFYREIVHGAFTEPAWRALSPAQRDSVNRAILNFDPDNPQHHDRLRAGATAWWGLSPDAAETLLHAWKTRPRPEKRVNLSRRAIRNLLPYMNQPVGDRWLTQIEARLCLAEDAEAIDQTTGRLMSYEQRQRYSLNASRLTRRERLFLRKHPDLLPPAPMLSNPVVRKAIHEVRRHILAYLRKYGRPPDRIVVELAREAKQSALVRDKRLALNRRRNKTRAQIDNDFTLSGLTEHQRRLAEDRVLLCRQQGEKCPYCEETLTEAAAADGTDIETDHIVPYSRSGDNGLANRVVCHTRCNRGKGRQTPREWLTPENFEALESRMAHLENAKTSHEDYFTAGDSRRKWENLHREVREEDEWRNSQLTDTAYAARQVQNYLAEALYGGQEKRQRIFFTKGSYTAILRRDWQLEDDRLGKRRGDHRHHAVDAVVIALADNARLQDLADHAAAQEEAKAASGQWPKREPLPPPWGDVQTFRAQVMESVGALVVSHRPVKRRISGALHEETAYGPVLESGGEISQTNFSNRIPADQLTPNHLRMPPRSESIEKQLASNDLSPAERRAAWRKLRALTDQKPGKSGIVRDLPLRLEIRRCLRQHRLDPDHFSEAQMKDLVTKGNLRMRSGMPIKSAILLRTINDPVLIPRKVWDPRSNRMVPDPDPRTRRVYIGGNNHHIEIREDKRGRWHGEIVTTFEAARRVRCLKRPDAVDRSDRDNMQFIMSLAEGETLHMKHPKAGAPGYFVVFKLDKPQTIHFIHHWDARPSKPTEEQEPREDIPVTASNLRALEPQPGRPPYKVRVDPLGRITPLKND

SEQ ID NO: 7259 - protein, 1052 aa, unidentified
  REGION 1..1052: note = Description of Unknown: Cas Enzyme sequence
MNNERIILGLDIGVGSVGWGLVKLAEEKYTDEKPDGTIEERYRITDGKIIDTGIREFQLPQDEKGKSLAAKRGQARRSRWTIRRKARRLKELIELAKEFNLISEDYKRDQALIPKKGDKKEKWDIWRFRKEALERKLTDDEFFRVLYHIAKHRGAYFHTKAEFLPEEDENKLNKYTKQQEEKSEEEKEKEKVKRGLRRIQKMLKDSGYRTIGKMFYETFKNKRKRNAPNKYEHSVRRELLRDEIIEIFKEQQRFGNTKAKEELMQRYIEDILMKEEGIDEEKLQKMMSRCEFTGDLCAPKESYTAERFTLFNQLNTLELVDTKNKDKHISLDDTQRRKIKALAYKNAKVTFAQIRAELELQDKLHIRFNRPYAEKNPEYNKKLECEVKDGKLLFEEKHNVLIVDINTGEVKLLGDKIKEIFIKRKESWKKAKKLYIYYSDIRKQLSLSSDYRFADLKGYTKSAVELGGEEKYIKQFEDDTFVALKGYHKIKKAIEEKCSSEKWAQVSGDTAKLDIIAEALTYCKSDQTRAEYLQQHNINDKEIIDAVLTINMKQLATYSKEALINLLKYMDNEDWMLFNDAKEKCGYGKIKHKKQAILEPYSGPFEKNPVVARVISQTRKLINAILRKYKDQYSIDQIHIEVATELAASKKRKADIAQGQKRYRDEKTAAEERCREFGLDPEEGQNLLMFRLAEQQNYFCPYTRTKITLRPTGAANEVYIKDCEIDHIIPMSRSFNDSLNNKVLCCQKANQDKIDRIPFEWFEDTYGKESQQWAEFENTVKKMYEMPYPKRKNLIRKSWTDKDKEKFLSRNLNDTRYAERQIAYYLRKYFDFSKSQRDDIKDISRIQVRSGGVTSFLRYMWGLNKNREENDLHHAVDALVVACSTYGHVYLVSNLSKDLERKGKNWYKHFDFIRNKFKPWPTVREDILTNVNNVFISRMPRHKVTAEAHKETVESLAEMPSNKRVIKVNKGYAEIGEMVRADVFTDDKGKNYVVPIYTKDIFTKKPLPDKYVPDDRLLPYGKWPSVNDKNLKFKFSLFKDDLISINDKKYYV

SEQ ID NO: 7260 - protein, 1080 aa, unidentified
  REGION 1..1080: note = Description of Unknown: Cas Enzyme sequence
SKRLDQPFVLGIDLGVQSLGWAMLSLDDDDNPTGVVRLGVRCFDSGVGSEEEVAQGKEESQNVERRGARLLRRQTWRRARRIAKVFHTLQRFGLLPAEPAPTPEQRDAVIKQLDADLRAEFLPAGDRAAFHLLPYRLRALGLDQPLPPFAFGRALLHISQRRGFLTNRKAEAKKDEKDGVVKEGISFLQNELVRTGARTIGEYFAGIDPEEQRIRGRYTARQMYLDEFEKLWAVQAPHHQLDEAAKKAIHQAIFFQRPLKSQSGLIGMCELEPNQRRAPAASLEAQRFRYLQKVNDLQIITPDGFILAPSDEQRRSLIDYLEHHAEITFDKLRTLWGLKLPRKSKKKSPAASGSDGDSDLASDAAQSDDRPGYNFNLERGGEKKLKGNVTRARIEAALGCDLDELPASVREPLVADALEYENADALQRRLVQRYGLSEEQAAALAETHFEDGYFSLSLVAIRKFLPLLEQGIAYAAARKELYQQSQQFQPHNTLPPLFMVKAQLRNPAVSRGLNELRKVVNAVIRRYGKPKYIRIELARDLKQPRKVREERSKSMRKNEALRQQIIDDIRRFGIANPSETDILKVRLADECNWQCPYTGKAISMETLLGPHPQFDIEHIQPYSRSLDNSFTNKTLCDVHENRMAKRNLTPFEAYSGDEQRWHEIIARVRRFRGPAGPAKLRKFLAKELDSDFAERQLVDTRYMSRAAAEYVGLLYGGIIDSQGKRRVQVSSGGVTADLRRLWGLNRVLPRDPGDDDSRPAKKSRSDHRHHAVDAAVIALTSPAMVHQLSRCAQDATLIGSRRFVALELPFPSLIDDLKQAVDEIIVSYRVKRKVRGRLHDQTYYSPPKPYCDENGRTVECRHVRKPLASISADRIEKIVDPVVRKIVQEHLARHGGDLKKAFGNPNNLPYLTAGDGRIIPIRKVRIRENISVLPIGKPPQLRFAAPGTNHHMEIVEVTDARGRVRWEGKLVNMFEAYQRRRQHLPVVCRDHGPNAKFLFSLACGEYVEMEHVPGQRKVYRVTTISEGQLEFRLHSDARPIKELKIAGSRARVRRSPNSLLEAKARKVFVDPLGNVYPAGD

SEQ ID NO: 7261 - protein, 1407 aa, unidentified
  REGION 1..1407: note = Description of Unknown: Cas Enzyme sequence
MKKILGLDLGTTSIGYALVLEGETPEQSQIIQIGARVNPLTTDEQINFEKGKPVTLNADRTLKRGARRTLDRYQLRRENLIDALLKANIITKDSILAEDGKQTTFETWQLRAKSVSEKIEKEELARVFLSINKKRGYKSSRKAKNEDEGQAIDGMAVAKRIYEEKLTPGQLAFQLINEGKKTVPDFYRSDLQAEFDKVWNTQKQFYPEIFTDEFYKELQGKGQRATSASFWGKYKFNTAENKGKSREEKKLQAYKWRSDAILIQLEIEEVAYVITEINNNLNNSSGYLGAISDRSKELYFNKETVGQYLYKQLQQNPHSRLKNQVFYRQDYLDEFEAIWEEQSKHHPELTDALKSEIRDITIFYQRKLKSQKGLVSYCEFEHQEKIIHGHKKTIGLKVAPKSSPLFQEFKIWQILNNVLARKKGSKKRAPKSTDQTKKLAEDKEIFAFDLATKQILFNELNIKGNLKSSKVIELLGYKPSDWELNYSDLEGNRTNLALYNAYFKILELEGYDIKDLLKVKSHKDEVELNDVDVSAMEIKSMIHQIFETLEINTAILDFDAELDGKDFEQQASYQLWHLLYSYEGDDSLSGNEKLYELLAKKFGFKREHAQVLANVSLSDDYGNLSSKAIRKIFPYINELQYDKACEMAGYRHSAASLTKEEIENRPLKDNLELLKKNSLRNPVVEKILNQLVNVVNALLAKNRAIDPNFKFDEIRIELSRELKKNAKERAEMTTNINAAKITNEKIFKLLQTEFGVKNPTRNDIIRYRLYEELKNNGYKDLYTNTYIPREILFSKQVDIEHIIPQSKMFDDSFSNKTIVFRKDNLDKGNKTAYDYIESKFGADTLEEYLKRLESLYKLGKDEGISKAKYQKLLKQEGEIGDGFIDRDLRDSQYIAKKAKNMLYDITRSVVSTSGQITDRLREDWGLINIMQALNFEKFKALGLTEQVEKKDGTFKEKIVDWSKRNDHRHHAMDALTVAFTKHSHIQYLNYLNARKNENHKLHGNVIAIETKETELRIDDEGNKKRVFKLPIPNFRQVAREHLENVLVSHKAKNKVVTKNKNKTQSKNGEKVKIELTPRGQLHKETVYGKYHYYVNKEEKVSGKFDEATIAKVSNPLYRTLLQQRLKESGNDPKKAFTGKNTLSKMPIYLNDTKTETVPEAVNLNWLEADYSIRKDITPENFKDEKTIEKVLDKQVKDILLARLKQYGDSKKAFSDLDKNPIWLNKAKGITIKRVTISGVKNAEFLHFKKDHLGKEILDKDGKRIPVDFVSTGNNHHVAIYKDEQGNLQERVVSLFDAVQLVNSGEPVIDKTYNQSIGWQFKFTMKQNEYFVFPNEKTGFKPEEIDLLDPKNKKLVSPNLFRVQKISSKNYVFNNHLETKAIDGEILKSKKELSGIMYHFIQTPSNLF

SEQ ID NO: 7262 - protein, 1048 aa, unidentified
  REGION 1..1048: note = Description of Unknown: Cas Enzyme sequence
MIRETTPAVATTPTVLGLDIGAKSIGWALMRGPDSGDPQIVGLGVRVFEAGVEGDIESGQDSSRAAVRRMARQMRRQTFRRVQRKRKLFSLLQGAGLLPATADTLSVARDATIKALDKRLLAGLGTTYGAHGATAQKLPYVLRAEALLRPLTAEELGRVLYHLGERRGFKANRRTDRQSEETGKVYDGIAEIRSRKGTKTLGEYFAAIDPTQHRIRNHYLGRADYEEEFQRIIAFQQPHHATLTPRFLRRLKRCLFWQRPLKSQKSLIGRCSLLTNRRRCPMAHPVAQEFRLLQAVNHLTVISPDGEIRALTDAQRQSLLNTLRTQGDMTFAEVRKRLGLKKKDARFNLEEGGEKKLPGNRTHKAMTDVLGDKWIALPDDQQALLVGIVRGSPDQASLRGQISQVFPDLLPFCDGLDKVALEDKPAAHCKKVLVSLVERMKDGISYATAKSDFEATHNLGGASDPVDQLPPVRDFLPGVTNPAVIRALTELRKVVNEIVRVYGKPDVMRIELARDLKKPRKIRQLLAQKMRDRETERSRAGQMLKSAGISSPSRADIEKVLLAEECGWTCPYTGKAFGMNDLVGENASVDVEHIFPRRFLDDSFANKTLCVASENRAVKKDRLPFAAYAGDEARYRAILDRVRVFRSEMRDEKLRRFMADKVEDGFASRQLVDTAYASREAAKYVGLLYGGVVDVRSDKRVRTSTGRLTALLRGAWRLNSILGTDDSPKGRGVDHRHHAVDAIVIALSSDGVIKQVAEAASRYAERQSGRWRVDVPEQGDLLDHARDAVKTIVVSHRADRRLAGRLHEDSIYSPPRPDGEGGTYHVIRKPLVRLTPADIVGDKIVDPTVRKLVQQRYEMLCKTLSKTKPSDVFAAEGNLPTLPNRNGKPVVIRKVRLRVRDKAIRIGDEAHRARHIMRDADGLHHTVIFARRKGHQETWVEQPTSRLEVQNRKRKGESVVRTVWGEESEYVFHLCKGDSVELDDANGNRAIYVVRGVAGTDIKVVPCWDASTDNRTADTRIRSPNKLRDRRPKPVVVTPAGRVFPRGG

SEQ ID NO: 7263 - protein, 1065 aa, unidentified
  REGION 1..1065: note = Description of Unknown: Cas Enzyme sequence
MGKKVLGLDLGPNSIGWALVDVGDSKSQTSLIDMGVRVFAEGVDAFDSAKEVSRNEGRRTARAMRRQTKRRTLRRRRLTAALVSVGLWPANPAAQKELLQRDPYELRSQAVDPASDLSPYELGRVFLSLSRRRGFQSNKKTDKGKEAGDLLQEISANEKEREESGAPTLGAWLHQKTIAFDHRHRVANDHVRRRHLSRKEYLDEFDQIWETQKAKHPQLLTDRLRYGLAGENRYPVVPTARPNPDDRLLDLFGLHGLIFFQRKMYWRTSVIGRCELEPKQKRAPIADRRVQLFRILQEVNNLSYIDPNTRETTFLDEGQRKCLIAKLMTEDKMTFDDIRKALGKLDGVRFNLENGKRRNLKGHRTDHTMAQKKYFGPKWYDLEDSLRTEIVEALLDPNLDEFQFAERASNTWKFSPQQMERLLAVDLPTGYGSLSTKAIEKMLPYLQKGMIYSSSNPENSALAAAGYLRRDQLKRRLFDFLPSPARTKNTPIGNIPNPVVKRTLTEVRKLVNAVVREYGKPSEIHVEMARDLQMGREKRKEVSSDMRKREAKREEIADRIKEAGERPTRDNILRYQLWEEQNRMCIYTGRSISQTQLFSEVGGVDIDHILPRSRTLDDSQSNKVLCFREANAEKGNRTPYEWLAQKDPERYEALTGRVLSLLKSSGYAFSKYQKFLLKELKLEDFIARQLVDTAYITRATAEYLRCMFDADHHVLGLKGRLTSELRWRWGLETLLEELPDSPAWAEASKLRPGEKNRADHRHHSIDALVIALTDRSTLQKLSATLGDRFAAREETQFEPPWPGFRQQIKEKVASILVSHRVERKVSGQLHEETLYGPTDKPGEWVVRKSIESLSLSEIPRIRDHAIREMVMKKLSAHGIEVGRGKEKDAKKLKELLSNLTMPSGVPIKKVRILKNEETIRPIRSGASTSYVKPGSTHHLCIFEWEEKGKRKRDAVFVSMLEATYRVKTGQPVIDRIPPDSHRTIPNDARFLMSLSSRELLLQNQEGRSQLLVFKTAASTQGQIYFALHSDARRSGDAKKYVCNANTLQGRKVVVDLLGRVRWAND

SEQ ID NO: 7264 - protein, 1034 aa, unidentified
  REGION 1..1034: note = Description of Unknown: Cas Enzyme sequence
MGMTLGLDIGSNSVGWALVDESTESLIAAGVRVFPEGVKRGQKLEEQPKNAERRLKRGLRRRLARVARRKRAVRKALVEAGFCGSEADLLTGPDPIELRAKGLDEQLSLTEFARVLLHFSTRRGFLSNRKVDRSDDKDASKLLEAMAELQLAIEAKGCRTLGEFLHRERCEAAEPGRYTMRRRPTRRQMYLHEFELLWNKQAEFHPILRDETLALKYGTTGRQEYPVKPQQLRRSEHGKSLLRQFGFHGLLFFQRQLYWPKSSIGRCELERGQRRCERADRVAQRFRLLNEVGNLRVLPPRGQTRALTAEERTRLLKELSKRKDATFDDVRKWLSLPENTTFNLEAGGRGKLDGMPVDKLLDKKKLFGKRWWEFGEQVKDAIVRALIDCTEEEIQRQAVEDWGCTEEEAAKLSQFNPATFIRGQASLSRVAMARLLPHLEAGKPLMTRDDTESALAAAGYLRPDQRTRGAIRQLPPPPPQITNPLVRKAMFEVRKVVNAIIREWGMPQAIHVELAREVQGNAEQRAERSKQMRDREKERDRLKADAIERGYTPTHDTVERFALWREQGEHCLYSGNPISKSQIGLCEVDHILPYSQTLDDGLTNKVLVFREENQQKGQRTLWEWLGESDPVKYERILHWAEKLRSPTKHVKLRKLQTRTVSLDDFLNRQLSDTGYITTQVTSELKRLEGVDVVTVKGQVTAELRHAWRLNRVLRLDDINAKSRDDHRHHAIDALVIALTTRSRLAQLARLRFSGDSVALPWSGLRDQATETINAIWVSHRASRRVSGALHEDTIYGSGAPAPHTPRRNTRPRATNAAVVHRSLVELKPKEVARIIDDRIRTLVFARLNEHKVIVEKVKEIPPSVWAEPLLLTPIRPKSSSRPAVIRRVRISVTDATIQHIGNRNGMVKPGNTHHISFFESMNTKTGKSRRVVVFVSMLEAAARVLTRRAVVSREHPDDPNARFLFSICRGDTIHGEIRGTKTIWVYRTSPSTRDELRLTAHNDSTGKLTSAAANTLDGYKVVIDPIGRMRQARD

SEQ ID NO: 7265 - protein, 1014 aa, unidentified
  REGION 1..1014: note = Description of Unknown: Cas Enzyme sequence
MEKVLGIDLGTNSIGWAIREINTGLENQITNKGVMTFDKGVAEDKSGEHPMVQKRTESRGKRRNYQAEKYRKWNLLECLINNKMCPLTIDELNEWRYYKKGTGRKYPQSPKFIEWLRYDFDGDGKPDFERLGYSKHESYYLFRALIVDKSKTNIFKTEPNIIGRVMYQIVQRRGYNDGQNIDEADFEELSKTIMKGGGEAGAIGVDKIVPFIEKYKTLGAALYFLQKENNNVRIRKRYNLRSHYENEIREICRIQGIDHLFQFFWGAIIWQRPLRGQKGLVGICTFEKNKRRCPISHPLYEEYRTWVFINNLNIRPIEEGEKTSGNQQKQNLRDVLHGIVYPQFFKVATDFKLSSIAKALNKAGYEIGARFSEDTKVVSFSFLQKMKEIFGDDWPEVTGWHELLNRKPKAKKYNIEDLWHLHFTKSDNKTTNETSYDFLVKFAANSLQLDTPKSESFAKLRLQQGYATLSLSAIKKILPYLREGFIYSEAVYLANLHKVLGVGELSEDVITHFSEEVKKLIDQTRVERKLVQSLNELISDHLNSETRFGMEASYQLDDDDRNDISRKLEEVFGKRSWENLNKSEQEDAMKFVGEKYLAFLRKRIHEKGAFERLDRIHDKIFNWLKLTYDIPDDRIKYLWHPSEQESYPSAIEKDGNLYLGSPEPISKGFKNPMALKTLHKLKHLINYLTKTGKIDADTRVVVEIARELNDSNKRKAIERWQRDREKKNDSYKKRIDEINEETNSNFNREDKNLIDKLRLWEEQSERCLYTGKTINCKEILDGGKYDNEHTIPASMSFDNELKNLTVADKKYNQQVKGKRLPAECPNYESEYVLDGVTYPSILATLQSVFGKITVTQKKVNGRTVVKRNFEKVEQLENQYEEWKSKTSEDKETKDNIIIRRHLIKMDLDYWRYKLNTFLISEYKTGWRNSQLRDTQTITKYALPYLKTVFNKVEVQKGNITSDFRKIYKIQHRLEKKERTKHSHHAIDAAVLTLIPTAAVRDKILLRYNEAKETD

SEQ ID NO: 7266 - protein, 940 aa, unidentified
  REGION 1..940: note = Description of Unknown: Cas Enzyme sequence
FHYNRKTRAEMEQHWKKKTRACPYVEPLGIKSTTKDDKCAPLSDWSVRRWLILEFIATRRLMIEAPAAKPKGAALIKKRGSGLPHRPSADAIAAILARAQADHAVRTGEATTGNPLTRAEVRELLLDDARRVTGIEKAKLSSATKETDPNYSYFSQLWDLVCPSAAGMRGTSSLCSSSAEVLFAIATGLRDGGVTPDYDPTSIHRRLTECEYYLWKRRPRFEFGCFPQVEKLTGPYPALCKSYQAAKAASTPGSRIQGLHCGGLLGRIFNECRESLPAGCTSPDYCVIEVVGDPPRNSEQKKEILKEQAKRRADREAAFAEASKADSGVASRRRRIALHRQQGGICPFTGQELGDPLGDGLEIEHLFPQSRGGLSVDDNLVLTTRKVNATKGNRVPSAFAKDSGVSWDEMLEFTRAMKWSAKKREIFAWDTARNSGESEQPAFPDFGNTTRVSQLARQLKAAVQMWMGVFDDADESTRRIGTPTGWHTAQARRTWLPPLNNGTSKVRDDNVHHLVDAAVLSHIPPGVGLNSVACGGIFYSEMEQFTLLVPSTGNTRGVWRPVTRALPGLLAHERIAHWRPENLDYLTCPILKLSSPNKWRSLGDSTFWRQVYPNRPTVAQRTPLKPEDYQDADALLADLRRMTPSDPDAAALWERNLPSVSAVSDWLRKATAATKKEAKDIQQANVPLLLRDGTPIRTVWKFDSKGSMGSGLGWTGEPGEDQRIHHLRSLTDKYDRIELWLGYNQKKKEWQYQTRRVPAVSALKHLKRMGLKWWRDKSVKAPMFLQPKPDAPPEQWKSLREIICSPLLPFSVKVGSIARGDTFRLALDATGTITQSGQPVWAGWYGVTAIKGGGTVELKSLQFKDQKSTPLAHLKRDPLCHQPSSPATLAFIAALPSACEQAAILALHPPKNKGNDSPPDSGRGRRRPSSRSGEADLGLA

SEQ ID NO: 7267 - protein, 1036 aa, unidentified
  REGION 1..1036: note = Description of Unknown: Cas Enzyme sequence
MNDYMLGLDIGSKSIGWVLLKTKEKPSIPDIGVRVFPEGVERDKGSETSKYKSRREARGTRRVIQRRRFRKNKLTKILSQAGLLPQNKELLRELLLDRKIDKKQRDLHPYKLRAKGLSEKLELFEFGRVLYHLAQRRGFKSNSKNKQREEKNKISEEISDLQKKINAAGCQTLGQYFSTLDPHDQRIRGWYTSRKMYEDEFNLLWKEQSKYYPDILTGELLKDICDETIFYQRPMRWDPQTIGDCELEPGEKRCPRGDWYARRFRILQDVNNLKIRNRDGSERNLTEKQREMVLGELARKAEVSFSGLRKKLQKLSGNDGMYETELFNLEEEGRKPKVKGDEFAAAMIKILGNKIWDTIEEYKKIEVNTSLLELEDDKFAEKMAKEYNLNQEQIEAILNIDLPSKYMHYSRRAIQKLLPEMEKGSLTTEAVKEVYEEHDDKPKTKYAERDILDMPPNLRNPLVQIALLEVRKLINSLIAEYGKPSKIVIEMARDVKGSKEERLKLQDNMRENEKVNKNAIKKLKELGYQITADNILKYKLWEELRGHICPYTGRSISDVALFGQYPEFQVEHILPYSRSLDNSYMNKTLCEVHENNHVKKKQTPYEAYGHNPEKYEQIKQRTAALPWPKRKRFLPPKEGENSINLDECISRELNDTRYICKEVIKYLKRLGGITIKGTKGRVTSDLRHSWGLDTILDTSGSAVKNRADHRHHAIDAAVTAVTTNEHLHRLAESKCPENNVEFLRPWPHFREELAEKIKHINISHRPTKKTSGKLHEETSYGLTDETRQYFQDGKMTRLSPNAWLCKETLNYIYSRTPAEIFKTVSDLDVISKDSKNVREAIEKKFIQNGINIKDKHAEIPESIFDEKIYIETKGGKKIPVNKIRVRVPMSNMIIFTDQNDSPYRACPAGVKGGNHHVEIFEQTDETGETQRIAKIISRIEAVQRRRERKAVVQKDSVSNTKFICALAINDMVLMPTKNGDRDLYRVQKMDVNGTVCFRHHTAATLDDNSQRIFQQAHLFSGKKVDVDILGRIMSCE

SEQ ID NO: 7268 - protein, 1013 aa, unidentified
  REGION 1..1013: note = Description of Unknown: Cas Enzyme sequence
MARYTLGLDLGSNSVGWALIAQDGTLFDNRTPILAGARVFPAGVADLETGKEKARGQERREKRSQRRILYRRRTRRGDLRHALADAGLCPTGRDDVRRWLALEPYTLRARGLDERLHPREFGRALYHLCERRGFKSNRKTESKDDNKVTKGASALQAKIEAAACRTLGEYCAKRLASTDHRADSDQRIRGPYTLRAMYEQEFDSLWDSQRRFHPDLLTDDLKRRVHKTIFFQRPLRFDPKTIGDCELEQGEKRCARAHWASQRFRMLQEINHLRVMDTGGDRPLRREEREKLADALGQKKKMTFDQIRKCLGLRKDQPFNLEEQGKRDWLHGNEAQAALRGKALKAWYETLPEETRIQVWDALADVQDEDELRRTALGPWGCTEPQADQLIKISLTTGHFSLSLKAIRKMLPFLEPSHVCDDRCRELFPERDTEAGHVVSEAKQLAGYALLPEVQIHDRLPPAQTLFKQITNPLVRRALTETRKVVNAIVREFGKPEEIVLELARDLKHSRQQRQEIHWENRNRGKENDKIRERLQREFNILTPSRDDIIKYRLWEECQNVCVYTGQSIPKTKLFSPEVQIEHIYPLDRSLDDSYLNKTLCYGAEVNRRKGGRTPHEAYDGTPEYEQILQRAKTLPWKKRRRFEVKDVQFDEFARRQLNDTRYASRMAMQYLRSLGVPVRPVKGQTTNNLAHYWGLYGVLGTDYSKTRDDHRYHAIDAITVALTTRSHLQALARAMHSRHSRAAAHKLAPPWETFWDDAQAAVERINISFRPTRKLAGKLHEETAYGPTEKPNNYAYRVPVERLTPAMVAGIRDTVIRGIVRKRLKEHAIEEKGSGTLGKVLTEPTLRMPSGVPIKRVRIGTVEKTAIEIRRVNGQAAKFVLPGGNHHVEIFQKPDGSWTGRCVSRFEAHQRLRQGKGVVDHQGEQDWTFLMSLCINDMVQLTDPDTGEVKLYRVQKISSGSHMVVLRLHTAAEIEDEASDGPSDSCNQLRRWRMEKVQVDPLGRVFPCDERA

SEQ ID NO: 7269 - protein, 1049 aa, unidentified
  REGION 1..1049: note = Description of Unknown: Cas Enzyme sequence
MEDKRATPYILGLDIGASSVGWAVIDLDRGKPAHLIRCGARVFDCGIEGTNFSAGKDNSRSATRRQARMARRLLNRRFRRQRRLFNLLVKAGLLPAGDPAQVLPALDATIRAKRLAAFPAKSAERRRQEHLLPYRLRALALSEKLDPHEIGRALYHLGQRRGFLSNRKAPPRKDEKPGEVKAHITELGEKMKAAGVRTLGEYFASLDPEQERIRRRWTSRQMYLDEFAAIWAAQASHHPAILTDETRKRIHRTIFHQRPLKSQAGLIGTCEFERGRKRAPWGLLIAQRFRTLQQVCNALIVARSGITRDLTTAERDTLLTVLDRQGELSFAKARKRLKLPPGSTFNLESGGEDRFLGNKTNARLAEVFGDRWWRMCPWGQDQVVEDVLSIQKDEALARRGRRWGLDADAAARFGQTSLEDGYCALSRQALAKLVPLMRQGTQGKPCSYSTAVDQVYGKRLSEPVDFLPPPAPTYPHLRNPMVLRVLAELRKVTNAIIREYGKPDAIRVELARDMRRSKKQRHESWQRMRQNERERRKAAEKIAAEAHIDNPSRADIEKVLLAEECNWTCPYTGKSISMSSLLGPTPQFDVDHIIPFSRCLDDSFMNKTLCEVRENRDHKRNRTPHEAYAADPEKWEEILARVGRFKSNARGEKVRRFRLETLEDLSDFATRQLNDTRYATRQATDYLALLYGGRYERGGRLRMQASKGPTTAYLRNEWQLNTILGDGGGKSRDDHRHHAVDAVAIALTDAGTVKMLSDAAERAEREGRRRFGRVEDPWSGFLEDVRQSIDGLCVSHRVSRKVNGPLHEETNYAPSKARDAAGNPRHFAVRKRLEELSPKDFKNIVDDRVRDLVTAKLAELGGEPKAFQDPKNHPCFALKDGRRIPIHAVRVRRSEAAIPVGKDARERWVQSGSNHHMEVFEVKDAKGKTHWKGRVVSRYEAIRRLAKREPLVDRTPPDGGRFLFSLAHGEIIHLTDANGEVVFYRVRKVSQAKSGSIEIAVARLNDARLKDDIIKAGDWLRITSMDTLARMACRKVIITPLGEVRNAND

SEQ ID NO: 7270 - protein, 1089 aa, unidentified
  REGION 1..1089: note = Description of Unknown: Cas Enzyme sequence
MARYTLGLDLGSNSVGWALIAQDGTIFDNRTPILAGARVFPAGLDMAKDKVGKPPGQERRLSRSQRRTIRRRRQRRRRLIDILAPAGLWPEPSCPRGHWVFGNHQDCRTCADSGACALREIACMEPYFLRAKGITDELTPYEFGRVLYHLCERRGFKSNKKVRTSEEEQKKAKSTQDAEKALRDRLGAENMTLGQFLARFATPSEKEEARKSAHKDPENKTEWIRNRARNPHYQHRALREFYEAEFKRLWSRQRELWKGADPNEKCLSEDLGKKVYEAIFTQGRVWWPADSIGKCELTSEPRCPKGHWYGQEFRLLQEVNNLTVYDKRTRRSRPLTAEQRATLVQQLRPLKEMKWAKMSKILELAPGEEFRSFEAGAKRKGLQGNAVEAAFMTSPLKEWYAAAPPTIREELYDALVTFEIDRKKNRVYGPDETGLRAKAADWELSEKQAEALIAIEDELPSDYFEFSLSAMRRLRPHLEKGLLVNDAVAGAGYVRKPRMENLDFLPPVSVFDPYLTNPLVHRALTEARKIVNLLVAKHGKPEEIVIELAREMRQSRKHRRELLKQNKRNEEVNEEAKREVTRAGGDPKGWESRLRYKLWREFRDKVGDPATCPYCGKVIPADPHTGWLSANFEVDHIVPRSRRPGDNSFNNLVLCCAACNQAKGNQTPYEWLVDPDPARYEAVLPRVEKLPHQKKDRFYLQTVEELEACIHQLIDATDPLLKATQHTSRAAVAYLQTLYPADEKRRRIRCVKGFTTAELRRFWGLNRLRGLPGPSDKKNRRDHRHHAIDAIVIALTTHKHVHDLARAYARLEKTLAPDMPPPAPYADRETLRGDVQTIMDQIGLGDKISVSFRPSRQLRGPLHDQFGYGPAKDLHNQIIPHTYVTRKKVQDLTPAKINDDRAIRDPRIRDIIRAECITRGLAEMVPEGKVRRKSEKDQATSGKKLVWQLNNQGPYYTVTKRPGKKLSEPPPLLPCKSGGAIPIKRVRIQIVSSTAKCVHTPGGNKVKFVLPEDNHHVEIFQKPDASWTGRCVSRFDACERLRKKLPVVDITGENGWKFLMSLCINDMVQLTEPDTGEVKLCRVQWISDG

SEQ ID NO: 7271 - protein, 1074 aa, unidentified
  REGION 1..1074: note = Description of Unknown: Cas Enzyme sequence
MLAKESGGEMATRLGLDVGTNSIGWALIDTDNGLIIDLGSRIFSDGRVPKSGESLAVGRRDARAARRRRDRFLGRRSAFLETLISFGLMPDKAEEAKLVETRDPYVLRARGLDERLEPDEIGRALFHLNQRRGFKSNRKAERGRKESEDGKIETGAKALDAAMAEVGARTLGEFLHKRLTATDGLGDPDPKPARVRMGGESQAYDFYPQRRHVEDEFARLWAAQAPHHPALLTEAARAALHRILFFQRDLKDQEIGKCTFAGWNGVPDNERRLAKAHPLFQERRLYEEVNNLKIVSPGASDRELTRDERDRLILKLKTTRKSSFSALGKLIRLGEGERFNKESETRKDLLGDEIFAEMSDRKRFGDRWAFFDLDEQLRIIERVQNEENPEILLDWLKTEYGLDEETAVAVGKARLPEGYGRFGETATRALIEALKAEVVTYDKAAEAAGFHHSDLRTGEVWDRLPYYGQILTSEIAPGKADYGDESERRFGKITNPTVHIGLRQLEKLVNAIVDVHGRPDQIVVELARELKLNEEEKKKQEARIRRDTVAAVARGEKLQAEGIPDTGANRMALRIWEELNPSNPLDRRCPYCGEVIGIRALFSGEADVDHIIPYSQSLDDSASNKVVAHRHCNRAKGNKTPYEKWGHDDARWEVISAQVSRMHHSKQWRFGPGARERLEKDGGFEARQLTDTQYLSRATARYLSSLYTPDEGRRVYALPGRMTAMLRRVWGLNSLLPDHNFVENAHSSSPKNRLDHRHHAIDGAVAAVTDASLIKRIADAAGKAEAKELDRLFEELSPPWPTFRDDLKDRLARVTVSHKPDHGRRGRPSKHRDVTAGRLHNDTAYGFTGQVAADGKTPIVVHRIPFASLKPADIADPARIPDGALRDALFEATRDLSGKSFDQALARFASEHPVFKGIRRVRVREALNVIVIRDREGRAYKGYKGDSNARYDVWRMPDGKWVADSVSMFDAHRPDGGDRRPHPAAKKVLSLRQNDMLAIERDGGEPQIMRVVKTSTNGIVLAGAPEAGPLKTRDATPGDPFKYVYVGGGGLKKVKARQVRIDPLGRVFDPGPRD

SEQ ID NO: 7272 - protein, 918 aa, unidentified
  REGION 1..918: note = Description of Unknown: Cas Enzyme sequence
IGWAVLQQAGAKPADINILGCGSVVYRADDCLASSRRAYRRQRRHIRSTRQRIARMKTLLKQMGVLTEAELNQPGCAWPWKLAAQILQGGKLLTWPELWDVLRWYAHNRGYDGNRRWSGAEADAQSEDSEKEANARTLMGKHGTKSMAGTFCAIIGIDPLGKKKSANLPGNKRPKGQNAAFPRETVEREVRQILQAHAGKLKCVDTDFEKCLFSDWRAILCPDLKLPKRFAGGLLFGQLVPRFDNRIISICPISDQKVPTRNCSEFLNFRWAMQLANIRTGKSKDRELQPLTVEHRRVLDKQMRGRGYLTPKELKDTVRGITACERDNLDTMLMHPDAKEALLVDPVQKMISSDDFQPFWKVLPERLQKRLRGQWRRGKSFSLTQIRKQLEALGDTAEFDAELQRQLDAQNTNAKRKDKQSTREELLQRHFPARPLKLIGRAAYARHLLKQAYEDVLAGKPHPKEEGGCLFITPEIQLKQANREIADQTNNHLVRHRLLILERLLGDIIKEYAGSDKNRIGKITIEVNRDLREMSGKTAKEKAQDLGLKIANHHAVAEKLEKAFAEEGNGKPIPITAGLIRKARIADDLGWCCPYTGIDYEPKDLVTHRVDKDHIVPRSERASDSLDSLAITFSAINKWKGKRTAWQFVTEEQGKPVPDLPNLSIMSLTRYKKFVEGLETYKGHEDDKRRKKKRKDLMLLPKYEEKEFTPRDLTQTSQLVRLGAQVLKHAFKDCEQSPVVVSLPGSVTGTVRKGWRLEGCLSLANPQVLDENGNVKTKTDIRDITHLHHALDACVLGIAANYFSNQKLGASSLWELLVKRKYNEQEKTALRALGIFQFDNDGNGRLVTLPEAIKEQICQRLAEKRVVQHVPARMDGLRVEQNIWRVVIEKDGEVTLRQRIRQPDGSRPQKVAEEKASK

SEQ ID NO: 7273 - protein, 1073 aa, unidentified
  REGION 1..1073: note = Description of Unknown: Cas Enzyme sequence
VDYKLSINLGTTYLVWCLLDLDSNGKICDLRDMGIRIFRDGRDPHYKEPLAVGRRAARHVRRRRDRYKSRQRRLMTLMTKHGLMPEDDAARKQLEQKDPYELRVRALDEKLSLHDLGRALFHINQRRGFKSNRRTDPADSDTGAINAGIAELRHALQSAGSRTLGEYLARKHRCKETVRARPRIEARHAAYDFFPDRAMYEHEIDAILHKQRTYYPDLFEKIGHELKRIILYQRPLKPPAPGRCILEAGEARARIAYPAVQSFRILNQVRALELATLIDAHPPLTDAERAEIIGMLHESESLSFAAIRKLLKRGTDVKFNYEAAEGRKGMQGNATAFYLAAKECFGERWYRLTDDQQNAVVDLLLDEADPDTASRRLVAEHGLTPEQAERAVHAPLNDEYDRLSLKAIHHLLPHLKRGRDYTEACRKAGYHAPTRETWHRLPYYGQALPHAASRGTYAPTDKDSPETYYGRINDPSAHIALNQLRKLVNAVIDLHGLPTEAVVQVAPELKFRRDRLQAWTKRQKANQARTARIDAELQQRGITPTDETRLRFKLWEDQAQDAGRRCCPFTGRLIGPDDIFSGAFVIADLLPFCRSFHDSPANKVLSHRSAILLKGTRSPYEAFGPTPEWGAILARAENLPPSKQWRFRHDAWDIAAAGHGDVITRHLNDPAYMSRVVRDYLACIVPQQDGQGGLYSVSGHLTPLLREAWDLNTLARDVTQGKLRDLLSAKRADPALLDSILGDELTHFHCAVDVFVVGCTDRPLLESLGRESSKMLENGRSLTTPTELSGTLPEPFPGYAEQVRDCLERIVVSYKPDHGNARAAIHALRPRTVSKLHQETAYGLADPRPDNSSALYVTRKPIAAFTSRADIESVADLRWRLKLLAAVEGFKDGSAQFKAAVAAFAQKQGIRRLRVLIARAPETMIPIYQPHDKGRPDARPYKHYARGSNYGADIYCPDKGPQAGQWGIEIVSCFHAHQKEFIPQWQKDHPTARRIMRLQIDDMVAYSEAGVTRICRVKMLALDLVYLLDHRLAKDDGNRLYRKLSPRQMQKFAFRKISVDLLGCVRDRLGKVS

SEQ ID NO: 7274 - protein, 1115 aa, unidentified
  REGION 1..1115: note = Description of Unknown: Cas Enzyme sequence
MSVKATDSLTIGLDIGIASVGWAVLASNRIVALGVRAFDKAETAKEGDSLNLVRRMARLMRHRLRRRTWRLKKLTRLLKQYGLVDDTQVFQPNHPFSRSLWRLRLEALDRQLSAEEWARVIYHVCKHRGFHWTSRAEEKQAEADTKGEGGKVKQGLAGTAKLMHEKHYRTAAEMVLAEFPDAQRNKQGDYGKALARTLLGEELALLFERQRNLANPYSGPELEAAILGSGDCKSGLFWAQKPALAGNDLLKMLGKCTFEKTEYRAPKASFTAERHVWLTRLNNLRIVIDGSTRPLNEQERRIALPLPYLQAGDFTYKQLGSALVKAGCVEPDKFKFAGLSYPSEKQKAEGNAKDPEKAALVELPAWQDIRLTLKKAGLETEWQGMAGAAMDGRPELLDQIAWVLSVFKEDEEVSAELRKLTLPGADKMIDALLTIRFDKFHALSLKALRQIVPQMEAGLRYDEACERVGYHHSQLHKVGEGEEKYLPPFYSGRDKTGRMVFSEDMDIPRNPVVLRALNQARKVVNALVHEHGAPHAVHIEMARDLSKPIDERRKIEKGQAEYRDQNEKDKARFAEHFGQMPKGLEFEKWRLYREQQGKCAYSIEAIDIDRLLEPGYVEVDHALPYSRSFDDSKNNKVLVHAKENRDKGNRTPYEYLGGAENSPRWRQFVAFVESAKSYRLAKRSRLLRKDFGDKEAKEFKDRNLNDTRYICRFFKNYVERYLKLTDGSDAKRCVVVSGQLTSLLRARWGLTKMRAESDRHHALDAAVVAACSHSMVQRMSNYARRKELDQVREGFVDAETGEIVNPAMYQKLREHFPDPWPHFRDEMEARLKIDDPVQLRTEMERLGSYPAEALLALSPLFVSRAPQRRNGGAAHKETIYAQPERLKAQGGVTQKIPLTSVTLKDIDTLIDPHRNEKLYGAIRARLEQHGGKGGKAFPPNNPLRKPDRDGNPTGPVVRTVTQVIDKLSGISVRGGIAKNDTMLRVDVFTKAGRFHVVPVYVHHRVAGLPNRAVIAFKDENEWTLIDDSFDFYFSLYPNDLVRVTLRKESHLGYYASCNRSTGAINLWTHDRSQKVGKDGMIESIGVKTALSIEKFHVDILGHLYPASPEKRRGLA

SEQ ID NO: 7275 - protein, 1053 aa, unidentified
  REGION 1..1053: note = Description of Unknown: Cas Enzyme sequence
MSYRLGIDLGVNSLGWCAVEIDRSGDPKRIVDIGVRIFTDGRDPKTGTSLAADRRLARQMRRRRDRYLRRRKNLMEALAGIGLMPADARERKTLETLDPYKLRAHGLSEKLTPHEFGRALFHLNQRRGFKSSRKNVSDEKKEAGLIDSAVADLKGAMAEADARTIGEYLWKRHSQRQSVRVRLQGAGKDAHYEYYPQRALLEDEFEKLWAKQAGYHPGLLTDPAKANLKNIIFYQRPLKPVVPGRCTLDPSERRAPWALPLAQRFRIYQELANLRIERFGTSEYLTRAQRDAVFAKLERKANKLTFDQIRRALKLDSTHRFNLESSTRAGLKGDETGTRLAKKKLFGKAWWELSAERQNQIAEIILATDDDEKLAEIARRDWALADDNAKAVARVALRDGYASIGRTAMSMIVPIMVEQGLDYHHAAKEAGYEPSDFRGDGSMDALPYYGEILNRAVVGDSGDPNDPPEKQFGRFPNPTVHIALNQVRAVVNALIARRGKPREIVVELARELKQNKEQKDAHKKRITDDTARNEQIAEKLATLGVENNALNRKTYKLWEELGSPEDRRCIYTDKPIPASKIFSADVAIDHILPFSRTLDDGMDNLLLCSATANRAKTNLTPHEWKGSSPEWDDILLRADKLPQRKRRRFHADAMEWWLREEADFIARHLTDTQWIARAAKEYLGGICPADRVWATPGRLTHLLRGKWGLNTILQDLRRGTRTNDPAAGDDNASLPGVTKNRNDHRHHAIDAFVIALTERGILNRAARAAGQSSPDRIIDDMPEPWPGFRDDLHRHIGNVLVALKSDRSKQGRLHEDTAYGLIAHPEDWGGHNVVYRKAFAELNENEISRIRDPDLRGQVQKHIAETKAGGSIAGVALKAALASFRDRKGVTPRRVRLTKREAPLIHVRDRRDGTFYKALTPGENWCIDIFEQPDGTWSGAPVTVFQANQQTALDEKRKGHPAARRILRVHKGDYLKLEHEGGERIFRVVRLRAKARQLMLAEHNEAGNLADRHKDSADPFRWLSASYNELRRRHARKVSVDVLGRVRDPGPPK

SEQ ID NO: 7276 - protein, 973 aa, unidentified
  REGION 1..973: note = Description of Unknown: Cas Enzyme sequence
VGAVILGLDLGPNSIGWALIDEDEQRIVDLGVRVFPEGVDNFDTKKERSRNEARRIARGMRRQTKRRAARKQKLRDALIQIGLFPADEAEQERLYELDPYELRVRALDEKLTPHEIGRVLLHLNQRRGFLSNRKKDRGDSEVKGMLEEISNLAQQIQDAGARTLGEFLFRKYGSFDHASRAEDDHVRNRHTRRSMLEEEFDEIWDSQAENYPDLLTEQLRYGHVGKQSYPCKAVRSSEQKLHRFGKGANGQEVARLKLEAFGVQGMIFFQRKMYWPKSVVGLCELEPKQKRCPRGDRHAQRFRLLQEVNNLRIIDDARKVERPLNADERALLLDRLFQKNELKFDDIRKLLGQLPDSPAPEQMHFNLERGKRTKLQGMVVDQALANKNIAGPAWHNRPDEEKDAIARMLLDNERDDDAIARRLVEEFGFSANSVDAALAYDFPPGYVNLSLMAIDKLLPHMESGLVYQSEGDPEKSALHAAGYLRRDELQRRLFDRLPDPKRTNPSDCPIGEIPNPVVKRALVELRKVVNSIIREYGKPDAVHVEMARSVRMGPKARSDYNTMIRQREQERDNAATEIRSLKETYPALNSLRVNRDSILQYLLWEEQNHECIYCGQAISQQQLFGGDMDVDHILPYSRCLDDSHANKVVCHRHCNHGKGNRTPYEWLADANPDRYERIWQHAASLMRRGRFPYGKYRRFLQKELDLDKFIARQLTDTSYITKATAEYLRCLFDQPHHVLGLKGQHTAELRWQWGLNSILRDDDENRKSRDDHRHHAVDALVVALTNRSRLQKLSHIRKAGHFDRQTGEIYEIPEPWQDFRTEVEQRVAAINVSHRVRRKVQGALHAEMPYGPTSEPGVFAKRKAITELSANEVDKIRDSGIKRIVADHLNANGLEFGRGKKVDTKKLKAALTNLRMPSGVPIKKVRLLVPEQTVQPIREHKAEQRDDETCVALVRPGDNHHACIFEWEENGKM

SEQ ID NO: 7277 - protein, 1573 aa, unidentified
  REGION 1..1573: note = Description of Unknown: Cas Enzyme sequence
MKKILGLDLGTNSIGWAVVNADVSTRKDDTTYLKPNSISCAGSRIIPMSADILGDFDKGNSISQTAERTRLRMMRRLLERNHLRRERLLRVLKVMNFLPEHYDTKVSRYGKFMDDSEPKLPWYMGEKGKMEFLFQDSFHEMLDDFMEHHPQMMADGKKVPYDWTIYYLRKKALTQRITKEELAWILLQFNQKRGYYQLRGEEEEENANESVEIISAKILSVEKKEKDKKYEKYWYEMHLDNDMTYRATFYNDVTSWEGEAKDFVLKRTTLKDGSIKNELSFLPSTEEIDRMDEQRKARMYAKIKLRTEKEIENSHKTVGSYIYDSLLENPDQKIIGKLVRTVERKFYKDELIRILEVQQELIPELKDDALYQRCIEELYPTNEAHRKSLAKPDYVNLFVNDILFYQRPLKSKKSLIDDCPYEFHVSKDGKQYPIKCVAKSNPFFQEFRLWQFVQNLRIYQRERTITDGQLDLFTNATTGKLQTDVDVTSEILQTEDDYVKLFNWLNDRSSIKQDTLLSSYFKVKKEKGKDKYPYRWNYVEDKEYPCNETRAAILSGLAKCNISADFLTHENEMQLWHVLYSIEDKSELYKALNKFAQRHQLEESFAEVLSKTKPFKKEYGSYSEKAIKKLLPLMRMGCYWNEEQIDAHTRERIERVINGEYDENIKNRVREKTINLTDIQHFKGLPVWLACYIVYDRHSEAKEIEKWEKPEDIDHYLRNFKQHSLRNPIVEQVITETLRTVRDIWKQEGQINEIHVELGREMKNPADKRRQMTERIQQNENTNLRIKAMLMEFMNPEMGIENVRPHSPSQQDILRIYEENALDNLSKDDKDYDFVSKISKVAQPSKSDIIRYKCWLEQKYQSPYTGKMIPLSKLFTPAYEIEHVIPQSRYFDDSFSNKVICEAEVNKLKDRQLGFEFIKNHAGEIVQLSQGKTVTIMSVEAYEKFVKDYYSSNRTKMKKLLMEDIPDGFIERQMNDSRYISKVVKGLLSNIVREKGENGEYEQEAVSKNVISCTGSITDRLKKDWGMNDVWNHIILPRFKRLNEVTGKNCFTTYNREGHEIPNMPLELQKGFNKKRIDHRHHAMDAIVIACATRDHVNLLNNEAAHSKHNANRYQLQRKLRRFTTITINGKEREIAQEFLKPWETFTTDAWQVLSNIIVSFKQNLRIINKTSNHYQHYVDNGKKGFEKQQKGDSWAVRKPMHKDTVFGEVNLRLKKTVSLNEAIKKPENIVNKEFKKKVIELLSKGRDAKFIKKYIEDNKDIWSDINPAKIEVYYFSKDEKKRNGEPKERYFATRKSLDTSFDEKKIRESVTDTGIQKILLAHLAAKDNNPEQAFSPDGIEEMNRNITTLNNGKFHQPILKVRVYEKADKFSVGQAGNKAKKFVEAAKGTNLFFAFFGTEKENKQNGTKEVVRSYMTIPLNVMIDCQKKYGKQWRQSLENYLREKDMIDADAKLLFILSPNDLVYLPREEDRNGCIMPLDKQRIYKFIDPGMNTGNFIPFTIAKTIFSTKFTDQKKIGVSFPIQDEIGIGSQGSKSPRATTGEMIKDTCIPVEVDRLGNVIEINGKPLQSTSL

SEQ ID NO: 7278 - protein, 1357 aa, unidentified
  REGION 1..1357: note = Description of Unknown: Cas Enzyme sequence
MKKVLGLDLGTGSIGWAVVNEAEKESETSSIVRLGVRVNPLSSDEQAQFNAGKPITTNAERTQKRAMRRNLQRYKLRRENLIEILKQQEWIDDNTILSEQGNNSTFETYRLRAKAASEEITLEQLARVLLMINKKRGYKSSRKAKGEEDGFFVDSLDVARQMYDEGLTPGQYGFRLLSEGKHLIPDFYRSDLQSELDKIWTYQLAFHPDILTAELRKDIDGMSGRLISAEFRKRFGIFTMDIKGKKFERNKVLYSLRNDALQRELNKEELATVICDINGQINGSSGYLGAISDRSKELYINHKTIGQKLIESLDKDPNVSLKNQPFYRRDYLDEFEQIWETQAGFHPELTDELKHEIRDVVIFYQRRLKSQKWLVSNCPFENRKVSPKSSPLFQHFRIWQTLNNLVVRTEDEEYPLDEDQKQMLFDELLYKEKISKTEALKILFSKTRGFDLNFSTLDGNRTMASLLKAAGSVVELSGHGEWDFSKMPSKDIVSTIQGVFNGLGFDSSWLDFDSSKQGEALDREPQYRLWHLLYSFEGDNSATGDEKLVERLMELLKMPKEYARLFAGVKFEDDYGSLSVKAIQKILPFMAAGHVYSEACALAGYRHSAQSLTRDEIDNRQLKDHLEQLPKNSLRNPVVEKILNQMVNVVNGVIDAYGRPDEVRIELARELKKNAAERKQMDETIRKNTQESERIKTLLQKEFGLTHVSRNDIVRYRLYQELETNGFKTLYSNEYISREDLFSKKIDIEHIIPQARLFDDSFSNKTLELRDVNIEKGNATAMDYVKDKYGPDGAAAYKARIDALFQKGAISPAKAKKLKMTVDEIPSDFIERDLRNTQYISRKAQEMLRDIARTVTATTGSITDRLRNDWQLVDIMQELNWDKYERQGLAQVIVGRDGQRIRRIDNWTKRNDHRHHAMDALTIAFTKPAYINYLNHLNARDKDDIRAIERRFLERDGNGHLRFKSPIEPNFRSEAKRHLEMILVSIKAKNKVVTRNTNITKSKNGNHKKIQLTPRGALHKETVYGCINILRTKPMTVGSKMTAEEIAKVQNSSYRKALQTRLDTFGGDPKKAFTGKNSLEKNPIWLDEKRSQCVPDTVLIKWYEPHYTIRKKIDENFKAEHINKVIDVGIRRLLEVRLKEFDGDSAKAFSNLEKNPIWLNRERGVRISKVTIAQNKKPKPLHIKHDKDGRQMLDANGNIIYTDYVDLQNNHHSAIFIDADGNIQEHLVSFYEAVVRVVELGLPVIDREYNKDKGWQFLFTMKQNEYFVFPNPSQGFDPNEIDLLDERNYAHISPNLYRVQKMSNKDYFFRHHLETSVENTKELQGITWKRVTALSNLKGIVKVRVDHIGRIVKVGEY

SEQ ID NO: 7279 - protein, 1362 aa, unidentified
  REGION 1..1362: note = Description of Unknown: Cas Enzyme sequence
DLGTNSIGWAVVNEAENQNEKSSIIKIGVRVNPLTVDELSNFEKGKSITTNADRTLKRSMRRNLQRYKLRRSHLIEVLKERGFIDDSTSLSENGNWTTFETCRLRAKAATEEISLTELARVLLMINKKRGYKSSRKAKSTEEGQLIDGMEIAKKLYDENLTPGQLSLQLLQDGKRHLPDFYRSDLQTEFDRIWQQQKLYYPELLTDQLKEELKGRNKTQTWAICAKPFQIVGVKSSKKGQELRKEYYRLRVDALAKQLGLEELAIVLQEVNGQISNASCYLGDISDRSKALYFNHQTVGQYQLAQLENNPHYSLKNQVFYRQDYLNEFETIWEMQAKFHTELTPELKKEIRDIVIFYQRPLKSQKGLISFCEFESRQIEVEIDGKRKTKTIGLRVCPKSSPLFQEFKIWQVLNNVQVWGKTMPKRFLFQEEKEKLFAELNYCEKLPKSEALKLLFGTQKDYDLNYKDLEGNQTQAELLEAYKTIIEMSGHDDLDFTKMSSSKIVESVVEVFAGLGINTGILYFDSSLEGHALEQQPMFKLWHLLYSFEGDKSELGNANLIQKLHDQFGFDKESATVLAGVVFPDDYGSLSSKAIRKILPHLKDGLEYSVACEYAGYRHSKGSLTKEEIENNVLKDKLELLPRNSLRNPVVEKILNQMVNVVNTIIDEYGKPDEIRIELARELKKSAKEREEMTKSINETTRLHEGYVKVLQGEPFYLEHVSRNDIIRYKLYEELEMNGYKTLYSNTYIPREKLFSKEFDIEHIIPQAKLFDDSFSNKTLEVRQVNLDKGNATAMDFVNEKYGAQAVEEYVARIENLYNKKVISKTKRDKLLMKEADIPSGFINRDLRDSQYIAKKAREILEEIVRFVVPTTGSITDRLREDWQLVDVMQELNWNKYNQLGLTEIIEGRDGQRIRRIKDWTKRNDHRHHAMDALTIAFTKRSFIQYLNNLNARVQKGVDDYIDLDMVELSLLDKDQRSAAVYGIERKELHRDSHGKLRFNSPMPLEEFRAEAKRQLEAVLVSIKAKNKVVTQNVNVSKTKNGRNKKVQLTPRGQLHLETVFGSCKRYVTKEEKVNASFNVEKINTVANKRYRDALLARLQQFDGDAKKAFTGKDSLDKIPIWLDDLHTIQVPEKVKIVAFETLYTIRKDITPDLKIEKVVDAHIRQILQERLEAYGGDAKKAFSNLDDNPIWLNKEKGIAIKRVTITGISNAESLHDKCDKDGQLILDENGRTQPVDFVNTGNNHHVAIYRKPKLDKNGRQLLDDNVQPQYELDERIVSFYEATSRAIQGFPIVDKEYKKEEGWRFLFTMKQNEYFVFPRYDEQGNMVFNPMDYDEAWYKNPENYAVISPSLFRVQKMSKVAS

SEQ ID NO: 7280 - protein, 1201 aa, unidentified
  REGION 1..1201: note = Description of Unknown: Cas Enzyme sequence
MAQKKIFGDYYMGLDMGTDSVGWAATDMEYKLLKLNGKAMWGFRLFQEAQTAVDRRTSRIARRRIQRRSQRLALLQDLFKDEVCAVDPSFFVRLSESMLHEEDKTVRGRNALFGDAAFDDKAYHKLYPTIYHLRSELIHSDKPHDVRLVYLAIHHIIKYRGHFLFEGSVDTANSFDLIMRDFGADVQNCLDVPFECSNTDEMKRLLCNRDMTRTDKQKKLFTLFSCKEYPVLRDLLKLITGAPVKLTALFDYAKDSEEEIKIEFGSDQYEQLTPRLEAMLGDDYIILLKAKAIHDWALLENTLHGCEYLSDAKKELYDRHAADLKLLKSLVRRFVPDQYDNVFKNPDSDRNYCAYSGTAKLKGKKVPIKKRCTQEDFNKYIESLFSKVKEPDLELEAMRARLAARTFMPKLRAKDNSVVPNQLHTKELQRILENASRYLPFLLNKDQDGISVSEKIMQILTFRIPYYVGPLNDRDPKAANTWVARRSHDKIYPWNFDQIVDRELSASRFITRMTAQCTYLKDQPVLPQSSLLYARFMVLNELNNLKLNGEPITVELKQDIYRDCFERTAKVTLSGLLKYLKSKGIDLKPDQVTGIDNGFKSSLRVYGEMRALLGDDYREDIAEEIIRLSTILGDDRKMFLSKLRQEYGAVLPADTIEKASRKRFTGWGRLSAAFLTQIRDSRCDPKTGEYRNIINSLWETNENLMQLLGGEHGFAEAVAKHNSGLNQELGLHYATVRDLYVSPSVKRTIWQTMQIVREVRKITGHDPKKVFIEMARGGGEKGKRTESRKSKLYQLYKKCKDDTRDWLSEIDAKDEGDFRSDRLYLYYTQMGRCMYTGEAIDLDKLFDKNVYDIDHIYPRSKVKDDSLDNRVLVTRRANLEKGDSYPIVQDFRQRMHAYWSMLLQKDLISKSKYERLVRATELTTDELTDFIARQLVETRQSTKAVADILKQLMPDTEIVYVKAGLVSEFRQERDLLKCREVNDMHHGKDAYLNIVVGNVYNTKFTKDPRNFFKETEHKYSLNRMYDYVVKRGSTVAWVPGESGTIVTVRDMMRRNNVLVTRMVLDQSGQLFDLQPVRKQQWQLPLKKSPACLADPAKYGGYNSIKGAYFMLVEHTEKKVRKRSLIEMPLHLSGLDPRSEACLDMLRRDKGLTDPVILIPHIGINSILEIDGCRMHLSGRTGGNRLIYCLAHQLIIGYENEK

SEQ ID NO: 7281 - protein, 1005 aa, unidentified
  REGION 1..1005: note = Description of Unknown: Cas Enzyme sequence
NYVEDKEYPCNETRADILKSLDKCAISHDFLTHDVEMSLWHILYSVEDKIEIGKALKKFAEKNNLPETFADVFAKIKPFKKDYGSYSEKAIKKLLPLMRMGKYWSLDNIDANTKERIGKIITGEYDENIKNRVREKAMNLTEFHHFSGLPVWLACYIVYGRHSEAKEIDKWGKPEDIDDYLKQFKQHSLRNPIVEQVVTETLRVVRDIWKQEGHIDEIHLELGREMKNPADKRKRMTERILQNENTNLRIKAMLMEFQNPEMGIENVRPYSPSQQDILRIYEENALENLSKDDDDFDFVSKMSKTAQPSKSDIIRYKCWLEQKYRSPYTGEMIPLAKLFTSAYEIEHVIPQSRYFDDSFSNKVICEAEVNKLKDRLLGFEFIKNHNGEKVQISQGKTVEILSIEAYEKFVKEHYANNRAKMKKLLMDDIPDGFIERQLNDSRYISKLVKGLLSNIVREKLDNGEYEQEAVSKNLISCNGSITDRLKMDWGMNDVWNSIILPRFQRLNELTGKDCFTTLNAEGHEIPAMPLELQRGFNKKRIDHRHHAMDAIVIACTTRDHVNLLNNEAAHSKYNANRYQLQRKLRRFEKKIVDGKEREIAREFMKPWDTFAIDAKRTLENIIVSFKQNLRVINKTTNHYQHYDANGKKVLVKQKKGDSWAIRKSMHKDTVFGEVNLRFVKQVSLNEAIKRPKSIVHKEFKKRVLKLLEEGRDAKYIKKYVDDNKDVWTDIDVKKIDVYYFTKETNDRYFATRKPLDTTFDRKKIEGSVTDTGIQKILLAHLDAKGGDPELAFSPDGIDEMNRNIVKLNNDVVHQPISKVRVYEKAEKFAVGQRGNKVAKFVEAAKGTNLFFAVLGTEKMNTETCETGIVRSYLTIPLNVMIDCQKKYGTDWRKNIEAYLKDIELVPANAKLLFILSPNDLVYLPTNESQKEGFTVIDKGRIYKLVSCTGNEGHFVPVAIANPIVQTTELGSNNKAQKSWNGEMIKEVCVPIKLDRLGNIIELNGK

SEQ ID NO: 7282 - protein, 911 aa, unidentified
  REGION 1..911: note = Description of Unknown: Cas Enzyme sequence
KIPDVVGQDAWKVKEKEIFQFIQGGYCTLKKNVVQHSAIVAITNRLIADFKTMTEDEENQNSDKKKRFDTLINEDDEKKIIRFIENHYGKATWKTFDVQKQQTIKENVIEEYRSFLEDSNRDFRKMPRLGDELAKVMVNDFFQDKSVENDFDKLYHPSMISKFTPIDITGRGDMRLGSPALGNIRNPVYLRAMHILRRKVNALLDAGIIPLDSTRVVIEVPREINDANMRKAYSLYQSRQQKEKEYILAALPKNVKYSDEDIEKVRLLIHSNENYINEDNPIEDKKDSKAKNEKRYENWLKEGGICYYTGNPITLVDIGITSSIRNGEQPDVDVEHTIPRSVLPDNSRMNKTLCFKYYNRKIKEDQLPALLSEFEAEISPRLQPIRDKVERIKSEISTCRSKSRRAADKEWKDYWIVRRHVWEMELNYWHGKLQRFTTEEVPESFRRSQLTDTAVVAKYASLYLKSIFHRVDVQKGSVTALFRKLYGFQEKDETKDRSNHYHHAIDAAVLTMIPTSAQRDRMIVLYYKREEAKEKNEIDRITKELDKEVRTARLGLDLKSLKKCIASIEKKIETSVLVNKNITDRQLKPNRHGDSFRSDMHEITFHGIVKTVKKQIAKDGTIDVTRIPRPVIRVMLSKLTTKDAIDTCLNSIVDGKLRNYLKNVYKQRTEAKVPLKDILKNIHYGTDEKGVRQPLRHVRCYKSNLSYEHMIPIHQHLFQRNNAPMYKQYTYVKSRENSLLLVYEHIDSNGKISWTGRYITSYELSKVANVFRKNGIFTVKTINDIPEETGWKSYVDTLSSLEYHLKYVLKPGFRILLNEDGMILKRKTTTGLLQRLNVVVKFNEADGIWLCHHTLVKEYSTKQEGAKSKSMKQMKKIKISSFMGKQPLFEYVDFEINPNKKTGDIFSWKHK

SEQ ID NO: 7283 - protein, 928 aa, unidentified
  REGION 1..928: note = Description of Unknown: Cas Enzyme sequence
LTVYKEKDYGAYSAKALKRMLPLMRRGSYWSIDSIDPQTKERIEHLITGEADNNIPITVRERFKSIEKIEQCQGLNTWQTCYLVYGRHSEAADTQKWYTPEDINAFLQTFRHNSLNNPVVEQVVTESLRVVRDIWQQTGQIDEIHIELGRELKKTKTEREKMSQTIMQNEAANQRIRMMLVELMNPDCQVENVRPQSPSQQEILKIYEDGVINSGIEMPDDIADIQKRFSAAKNQPTHAEVVRYKLWLDQKYISPYTGRPIPLAKLFTPAYQIEHIIPQSRYFDDSFSNKVICEAEVNQLKDRQLGREFIVAHHEEKVPLSFGGEAKILSVEAYEKLVGEIYANNRAKRKKLMLDDIPDDFNARQMVDSRYISRLMMHLLSNIVRGEDENGNREESVTSRNVIVCNGSVTDRLKRDWGIGDVWNRVILPRFERLNDITGSKDYTSVTANGHTVPNVPLNMRQGFNKKRIDHRHHAMDAIVIACCTRDHVNILNNESAGSSTRYDLMHKLRIKEQYTDKEGNKHDIFGDFIKPWPTFTEDVFNALQGIIVSFKQNLRIINKTSNRYTIIRDGKRINTKQEKGDSWAIRKPLHKETVFGEVNLQLKKKVTLKKALANINSIVDRELKETIKEKKKLKYSDKQILDFLEKNKDVWSEVSDGKVEIYYYTNDTDDRYFATRKELLSYMTGLTTIDAAEKAIDSITDSGIRKILRNHLAAERNNSIEAFSADGLERMNRNIRELNGGKCHQPIKRVRVFEQANKFSVGPNGQKSTKFVEAAKGTNLFFVIYTTPKGTRGYATVPLNIVIEIQKKYEKRWKEHLAERLKEEDLLLMSADDQLLYVLSPGDLVYVPENGNRLVIPEMIDKKRIYKCVSMSGIALDCIPNSTSKMIVDAFEYSRHNKMQRALTGEMIKEVCIPIEVDRLGNIIKIG

SEQ ID NO: 7284 - protein, 975 aa, unidentified
  REGION 1..975: note = Description of Unknown: Cas Enzyme sequence
MERILGIDTGTNSLGWAIVDKDENGYKLVSKGTNIFSEGVKIEKGIESSKAAERTEHRSVRKHYWRRKIRKIRLLNILIDNNLCPPISKDFLRQWRLKKVYPKTDDFMEWQRTEDKANVNPYRFRYICLTQKLDLSDTTQRYILGRALYHLNQRRGFLSNRKESTKESEGAVKEGISTLSQNMMAASCEYLGEYFFKLYQKGEKIRNHYTARKEHYLKEFKAICAKQELDEGLVTKLEHAIFDQRPLKSQKGQVGVCTFEKGKSRCPSSHPLYEDFRMYSLLNNIKVQVNTMFEKGERFLTDEEKKTIIPLFKRKSKRTFVFEDIAKKLAGKNNYCYYKSGEEKPYMFNYQMDTQVSGSPVNAQLEEIFGEDWLTSVCEVYTLTKDKSRFQIMNDIWHALFFYDDEDKLKEFAKNRLQLGDDDAERFSKISIPNDYAALSLKAIRKIIPYMRNNGLIYSEAVFLANLVEVLPQHVWGVKEVREAAIENVIDVMHSYDKNNVDGITLETCVKTFLKERYQVSDDDLKKLYHPSMLELYPRQRPNDDGIYQLGSPRISSVKNPMAMHSLFRLRKVVNLMLKEGYVKPDTKIHIEFSRDLNDANKRWAIQAWQRENEKDRERCRKEVEKYITNPSDTDILKYQLWEEQNHKCLYTGEEISITDFLGDHPKYDIEHTVPRSAGGDSTKMNLTLCSSRFNRDEKKTKLPTQLAVHDDILERIKDWKERYEELDKQIRRISTKGAASKEEKDAKIRRRHLLSLQRDYWRGKYQRFTMTEVPEGFSRRQGTDISVISRYARMYLRSVFKQVYIVKGIATSDFRKMWGIQEEYTKKERVNHVHHCIDAITIACIGKTEYDKLAQFYHESDEYQQGRGEKPVFEKPWPSFVSDIKKIQDELLIAHYSKDNLEKYTKKNLRGKDGRIIRDQQGNKLQMKGDTSRNSLHNDKFYGAINHDGTIRYVYRTNIEDLDAKSIDNIVDPA

SEQ ID NO: 7285 - protein, 959 aa, unidentified
  REGION 1..959: note = Description of Unknown: Cas Enzyme sequence
MLPYAIGLDIGITSVGWATVALDEDDCPFGIIGMGSRIFDAAEQQKNGKSLAAPRREARSARRRLRRHRHRNERIRALLICEHVVSEEQLAHLFEGQLPDIYALRVRALDETVTGEELARILIHIAQRRGFKSNRKAAVSKEDGDLLTAVSTNKARMTEHGYRTVAEMYLKDEVYGEHRRNKGGKYISTVSRDMVEDEVRQIFTAQRKLGNAIATEALEVSYVEILLSQRSFDEGPACGPYAGSQIERMIGKCPFEKEEQRAAKATYSFELFSLLEAVNHIRIVTGRESVLLTPDQRVRLISLAHKTADLNYAKIRKELELSDEQTFNMVSYGKAGDKLSAEKKTKFSHLKAYHQMRKAFESVVKGHFADISREQRNAIGEVLSKYKTSAKIRPALEAVGLSEQDIDIAESLSFSKFGHISVKACDKIIPYLEQGMKYSDACTAAGYQFKAHEGQEKAHLLPPLDEETKNTITSPVALRAISQTIKVVNAIIRERGCSPTFINVELAREMSKDFNERNQIKKEQDENRTRNERLMERIRTEYGKVSPTGLDLVKLKLYEEQGGVCAYSQKQMSLEHLFDANYAEVDHIIPYSISFDDGYKNKVLVFAKENRDKGNRLPLQYLTGKRRDNFIVWVNSSVRDYRKRQRLLKESVTEEDEAKFKERNLQDTKTATRFVLNYITDHLEFAPFLTDRKKHVTSVNGSVTSYMRKRWGITKIRANGDLHHAVDALVIACTTDGMIQKASQFARFRETRYAQAEDTRFIIDADTGAVIKEFPYPWPRFRQELEARLSSDPSRAVRGQGFPLYLAEEIPVRPLFVSRTPRHKVTGAAHMETVKSGKAIADGFLIVRKALTELKLDKNGEIAGYYNPSSDRLLYDALKARLHLFDGDGKKAFAEPFNKPKSDGTPGAVVNKVKVCEASTLNVSVHGGKGIADNDSMVRIDVFHVEGDGYYFVPIYVAD

SEQ ID NO: 7286 - protein, 960 aa, unidentified
  REGION 1..960: note = Description of Unknown: Cas Enzyme sequence
MLSYAIGLDIGITSVGWATVALDDDDKPFGIIGMGSRIFDAAEQPKTGDSLAAPRRAARSMRRRLRRHRHRNERIRALLVNRSILTEDQLLHLFDGQLSDIYELRVSALDRLVSNEEFARILIHISQRRGFKSNRKSAVSTEDGELLTAVSENKERMAQNGYRTVAELYWKDAAYQAHRRNKGGKYISTVSRDMVEDEVHQIFAAQRKFGNPCAGEEIETSYLEILLSQRSFDDGPGEGSPYAGSQIERMIGTCTFEPEEQRAAKAAYSFEYFSLLEAINHIRIINGKDSTPLSKEQRQLLIDLAHRSPDVTYAKIRKELNLPEGQLFNMVSYGKEEPSAAEKKTKFAHMKAYHKMRTAFEHVAKGHFADITREQRNAIGDVLSKYKTSAKIRPALEKVGLSPADIDVAESLSFSKFGHISVKACDKIIPYLEQGMKYSDACEAAGYHFKAHDGEAAATYLPPLDTDAKNTITSPVVLRAVSQTIKVINAIIRERGCSPTFINVELAREMSKDFNERNKIKKEQDENRARNDRLMQRIRDEFHKSSPTGLDLVKLKLYEEQGGVCAYSLKQMSLEHLFDADYAEVDHIIPYSISFDDSYKNKVLVFSKENRDKGNRVPLQYLTGKRRDDFIVWVNSSVRDFKKRQRLLKERITEDDTARFIERNLQDTKTAARFMLNYINDHLAFAPFSGTRKKHVTAVNGSVTSYMRKRWGITKVRANGDLHHAVDALVIACTTDGMIQDVSRYAQYRESRYMQETDSRFIVDPDTGEVIKEFPYPWPRFRQELEARLGSNPRRAVRDQGFPVYITGEVPVHPLFVSRMPRRKVTGAAHKETIKSGKALDDGILIVRKPLTELKLDKDGEIANYYNPESDRLLYEALRARLQEFRGDGKKAFAEPFFKPKSDGTPGHPVNKVKLTEPATLSVPVLGGKGVANNDSMVRIDVFHVEGDGYYFVPVYIADT

SEQ ID NO: 7287 - protein, 920 aa, unidentified
  REGION 1..920: note = Description of Unknown: Cas Enzyme sequence
RAKAVEEEISLEDFARVLLMINKKRGYKSSRKVNNDEEGELVDGMEIAKKLYNENLTPGQLLLNLFRKGKRIRPSFYRSDLQAEFDKIWLFQSSFYPEVLTEDFKKSISNFNKGQTSGAFHNVYKISTAKNSGKGGYEQALIWRTEALTRQLDIEELAYVLSDINGAINNSSKRLALISDRSKELYFNDLTVGQYLVKQMEEHPHKSLKNIIFYRQDYMDEFEAIWEKQAQYHPELTPQLKKEIRDIIIFYQRDLKSCKQLVNYCEFEHAEKEVVIEGKRKKILTGAKVCPKSSPLFQDFKVWQNLNNLEVSVVGHRRRKTKAQNNQLFLFSEEDEGLMVDHRGLNLEEKEILFKELSVRGKMTKSEVLSLLFAKPKELDLNYKEIECNNTMVAFYKACQEVISLSGHGEYDFSKMPADKVISLTLEIFSGLGFKTDFLFFDALKSGKDLEKQPAYRLWHLLYSYSGDKSKTGDEALINKICAICGFGNNKEYAKPFANISLALDYGSLSAKAIRKILPYMMQGYEYSKACEKVGFNHSARSLTTEELKEKNYTSHLNEIRRNSLRNPVVEKILNQMINVVNEIAATYGKPDEIRIELARELKKSKEEREKLDKAIRENTNESEALRKELETDFKIKNVTRNDILRYKLYKELKLNGYKTLYSNTYIPREELFSNKFDIEHIIPKARLFDDSFSNKTIEARGINIEKGDMTAYDYVAGKYNDQQLAEYESRVEELFSKKVISRTKRNHLLMKQDEIPTDFLNRDLGDSQYIAKKAREILEAMVPMVVSTTGSITSRLREDWQLVDIMKELNWEKYNSLGLTESYTDKNGNTIRHIKNWSKRNDHRHHAMDALTIAFTKRSIVQYLNNLNARSDKSGSIYGIEKNELHRDEKDHKLLFNAPMPLDEFRAEAKKHLENILVS

SEQ ID NO: 7288 - protein, 1127 aa, unidentified
  REGION 1..1127: note = Description of Unknown: Cas Enzyme sequence
MGRYVLGLDLGPSSIGWAAVKINEDGDFGGLATIKDGPNDVPAIGARIFPAGVERYGQGKREQTRNKTRREKRGMRRTLRRRRTRYKKLVALLQANNILPKNDTELQKLQQEADPYELRAKAIKKLEELTETEKPISLTELGRIFLHICKKRGFKSNRKAPPKKEEKGKVNEAKTRFGNFLNGRMPGQAWYEEVQEKNRKQKHNPSEAIKNKGGTFQFIATREQYKEEFNRIWENQKETNQTKDNDNFFSNEIKKEIEGLLFDQISYKQLPSKMRKMWGRCSLMPREFRCSLINRKAQQFRLLQKVNDIRVSQRGKEREINEPERKTVIDLLNRESTVKFKKIRKALKLQEYERLNFEYEDDVELTGNEIDTQLCQLFAENVWSNFPEETKDKIWQEILKYIEDENGEITEKKTADEIYKICGINVSNPEKISDVELPDGNVKFCEKVLDRILPKMRDGLPLYNAIKNAGFEQKWDSLSKLPLPDKSAGFYITNPNVSTVLYQVHRLVNRLIAEIGKPEKIVIEFTRDLKASKIQRQKILRQQNERRKAKDRIAKEIQILPEWKWGKKIPQWAIEKYMLWEEQKFKSPYSEKPEKQMISLGQLFSEDIQIDHILPYSMSLDDSLSNKVVCFSSENQEKGQRTVFDWLGHNESRWERVEQAIDHWKPQRKTRGAKKTIRNIADSKLINERKWEKFFISAEQVDEIYEPERYLNEAGYIANETRGYLERLYDSSEAKKCVKTTKGGVTGELRKWWDLNRILGKNNVDAPEEQEQEKDTGTKEGVENKGENKKERSDLRHHAIDAAVIAVTEPNLVKKVTDELQRAYPKRKRKDIYVERPWKRFEEDLAATVDLINVSHKTQRKVCGELHKATHYWKETNGLHAGKYITRKFLTYLSKAEVEQICDDTIKDLVKARIKEKGDIEGAFEKPLYLPNESGQPVPVWKVRIWTKHTDENMIKIRGNVWVEKPENHHIEIFCLNENGKVRYVCKIWDMWDVSQRIEEYRRQKIKNKDSIVLKKHPNYPDAKFIMWLAKADTIRIENKNGKKVLARITGIGEGDERGESVDLKIWELRVNCKSTDLPTKETKDGWRLRNINDFMAMNPQKVTVDLLGRIRWAERKRGWEKCFVND

SEQ ID NO: 7289 - protein, 1081 aa, unidentified
  REGION 1..1081: note = Description of Unknown: Cas Enzyme sequence
MIGDETLARCVLGLDLGARSVGWSLMELDESGEARAIKAMGVRVFEAGVEGDIEQGKDESRGVQRRVKRQQRRMLCRRARRLRKVAKALAAAGLLPPGNWGNPVERHELLLKLDSELRKKWLKEGDRVEAHLLPYKLRAAAVKGRVEPFELGRAIFHLGQRRGYKSNRKAERKLQAQEEVQTGKEKKEGSKERLGEVEGGIRTLQEQMSAAGCTYLGEYFATLDPEQARIRQRWTARAMLEAELDRIIEVQRVHHPDLLTEEKAKAIRRAVFFQRPLTSAKGLVGKCALEEGKRRAAIALPVAQRFRMLAAVNNLEIVEPTGVVRDPTAEERGKLIAALEREGGRTFDQTRELLGLRKTKKRKGVIEPGHVFNLERGGETRMPGDRTGSKLRAIFGEQWGRMSEEEKEKLVYELLNLENKETVARRGREVWGLDKEAAEKLAEVTLEDGYAAYSKPALRKLVARMEGGTRLKTAEIDVYGEAKRTEPVDVLPPVVQAGLDVRNPAVMRSLSELRKVVNGVIRLYGKAERIVIELARDLKQPRRVREEIAKRNREREGERKAAAEEIFREAHLGEPRPSDIEKWLLAKECRRVCPYTGQAITPGTLFGENVQFDIEHIIPLSISLDNRLVNKTLCAANFNRHHKHNRIPLEAFDTGSQAWEEVLGRVRRFEGALAGEKFRRFQMTSDAMREEYGDDFTARHLADTQYGSKLAAEYLGLLYGGINDESGKKRVFTSPGTVTWFLRNEWQLNAILGGREKNRSDHRHHAVDAAVIGVTTTRIVKMLSDAANGAALARRRMFAPIPDPWRGFSDELRAAVEKIVVSHRMDHRVAGPLHAETNYSPKHKIRDAKTGEVVEAHLQRVPIVKLSASTVEDIVDAKVREAVKAALNGGEPKRVFAGGANLPYLKARDGRTIPIRKVRIRVRKDARPVGKQHRERYVISGKDTLHHTVIVARQTRKGETWTDEPADRLKVHERLGAKPKQPAVQMDWGVGGKVAMVVFKGDCLEMDRKDGKGRALFVVRSVSRADITVRLVEDARKDDDVKKAGERDLYRIRSGDDFRKRKAAKVEISPIGEVAYVKPGT

SEQ ID NO: 7290 - protein, 1096 aa, unidentified
  REGION 1..1096: note = Description of Unknown: Cas Enzyme sequence
MKRYTLGLDLGSNSVGWAMIARDGESFEDGARLKAGVRVFPEGLNTQKDKVGTPPAQHRRLKRSERRVHRRRKQRRKRLLRILIQAGLLPKDSEQRRIVFMGNPYVLRAKGVQEKISLYDLGRVMFHLCVRRGFQSNKKVRQSSEQQKKDEAAAEEEAKSLTEILKKEGITLGQYLVRFAAADADPAAHKDSQGKREWLRNHQRNDRWYHHQAFRQMYKDEFEVLWAKQSKSHTEKLPDELRQDLWHTIFDQRRVWWPLDSIGKCELTGEDRCPTGHWFGQEFRLLQEINNLTLLDKVTGEVRPLCAQERLKLAESLRATEYLTFGEIRMALGFGKHVTFRTFEESSRRKGLQGNIVEAALRTGSLASWYDALTTPRDEVYETLVAIEKDEKKNRAYGIDEATLREKGRQWGLTPSQVEEIVRLQDSLPDGYFQYSRKAIRAILPYLQEGMTVDKAVSAAGFKEAERPIMDLLPPVSKVDKYLTNPRVHRALSEARKVVNLLMGKYGKPTEIVIEMAREMKQSREHRQKLLDRQTELAEIRKAAKIELLKWNQPLNEENILRYRLWEEMKTASGGCCPSPYSGTLITQRNLFTPEVEVDHILPRSRTFNDSFANKILCLSSENADKGNLTPCQRWGKESEEYQAILRRVSKLPFSKRRSFLAENTDIEGCISSQLNETRFTARQAVAYLAVLGSPVRCVQGYTTAPIRRYWGLNGMLGYGSSGKNRFDHRNHAIDAVVIALTTHKHLRALSNRIENPHLDFAHPWSDFQDDVRAAMDEIAQGNERAVSHRPARRIAAALHDDTGYGPIRDITGNLIQGVYATRKKVQDLTAAMINEEDIADPAIRNIIRAECVKRGLAQTSSKKNKCWLQADGKYYTLKAKPGRKLADPPPLLPCKKTDPATYTPIKRVRIHIHSRTAELVHKVAGKPAKYVLPEGNHHLAIYKKPDGEWIGVPVSFFEAHRRWQPQRKMFLRTGVLKDLIVNRAPIKGATFVTWICENDLVRLTNLKTKKRELYRVVSKSVDADGRPDIWFYHHTVAALPDKKQAAGDERLRVMREEFLETERVVRVRQWPELLEERALEKVSVDPIGRVFPCND

SEQ ID NO: 7291 - protein, 1144 aa, unidentified
  REGION 1..1144: note = Description of Unknown: Cas Enzyme sequence
MAYAREDVGEYILGLDIGVASVGWALIGQKDGKPDRLIRLGSRVFDAGMDEGSFKAGKENSRNATRRQARQARRMTERRVRRQAKLYRLLARAGLLPEGDHPELLRGPPREERARYVHEQLKALDADLKKKHLRGKPGRHRLEQVWPYWLRAQALTEKLEPYELGRALYHLGQRRGFQSNRKERAVLEDIEKEKAKAETKKRRGNKQGEEGEDKAKKDLGEVNAGITQLDKDMKDAGCKTLGQYFATLDPHAKRIRQRWTSRKMYKEEFECIWAAQAPHHKQVLTDALKKQLHRAIFHQRPLKNQAFLIGWCEFEKGRRRAPCGLLMAQRFRTLQQVNDLRIVTSGNPAGDHLTVEQRDALLARLEREGDLKFKAAKELLVPLGLPKGARFNWEGGGEDRFLGNRTNARIFTVFGDRWWQFSEADRDKIVEDVWSIQKPEALARRGKKAWGLDDAAVRKFGSLVLEDGYCNLSRQALAKLVPMLQDGLPYATAVKEAYGKKDCKPVACLPPAARQYPHIRNPMVLRVLSELRKVVNAIVRKYGKPAIIRIELARDMRRSRRQREIVSRINWRDRRSRVDAARKVLADRGNSDPSPDDIKSVSKWEVEKVLLAKECKCLCPYTGKSIQMSTLLGDNAQFDVDHIIPFSLSFDDSFMNKTLCEANENRHVKRNQTPFQAYATDPENWNAILARVGDFAVAPDIWVGEGRERTCIKGTGAREEKLRRFKAVKPDEEFVDRLLNDTRYAARQARAYTGMLYGGDGQDYQIRQVQTTSGSITACLRRFWRLNAVLGEAGRKSRADHRQHAVDAAVIAVTEHGMVQALSAAIEKAELRGTRWWKERFEPPWSDLLKDVGKAVDTFVVSHRVSRKVNGRMHKDTNYAESAHEAGRPRCKTHRKLLKDLTLPEVDAIFPESLKAIVKAKLAGGKPEQVFKSKDDHPVVPTPDGRKVTVYSVHLKQKVTTFDVGRGVRLRHVPSGANHHVEIFESPDKNGKPQWYGRMVSRHEAMRRLAKMLAHKHARRMVPRQEAMRGLAKEEKIVNDTPDPDKGGTFLFSLASGDLIELDADGGRGLFAVRTVSQSGTAQPRVEYVDINDARKAGDLKKSAKNRGAGEPQARSAPVLNTLAGLHCRKVIVTPLGEVRYAHD

SEQ ID NO: 7292 - protein, 1020 aa, unidentified
  REGION 1..1020: note = Description of Unknown: Cas Enzyme sequence
MTSMAEAGQFGLGLDIGANSVGWALVRLQKGRPAGLARSGVRVFAAGVEGTIETGKDSSRAVPRREARLRRRMLARRRMRLNKLAALLQGAGLLPARDLSSPDALMKFFSDLDRALFAEVRGGADSHVHLYRLRARALDEPLSPHELGRALYHLAQRRGFLSNRKFNPRQEEREKEEGKVKKGISELAARMQSAGARTLGEYFSKLDPMQERIRQQWTGRQMFEDEFEAIWTAQAPHHPGVLTEDLRKKVHHAIFFQRPLKAQKHLIGECELEPGCKRAPIALLAAQRFRLLQKVNDLEVISADGQRRKLTPEERATLVEALEVERGLKFTGIRKRLKLAGHTFNFESDNEKGLIGNHTACDLAKVFGERWSALSPEEKDRVVEDLRGIQDRAALKRRGKTKWGLDEAAAVEFAKVALEDGYCRLSRKALVKVLPLLERGEQFARARKMLYGERPAASAVEALPRLEVALEVRNPAVERALTEVRKVVNGIVRQFGKPEWIRIELARDLKKPRKDRQQISQRNLENRSAREAARKRILEESGITNPRRADAEKLLLAEECWWQCPYTGKSISMSALFGPEPQFDVDHIIPFPRCLDNSFINKTLCYHDENVHRKGNHTPWEAYGSDPARWREIVARVRRFKSSAARAKVERFQMERLESLDDFTTRQLNDTKYASRLAVEYLAKLYGAGADGVAEGKRRVQAGRGQVTWFLRSEWGLNDILDGGTEEKRREDHRHHAIDAVVIALTEPRTVKMLSDAAQRAPEERRRRFGAVAPPWAGFADELRSMVDGLVVSHRVCRRVSGPLHKETYYSKAHADPAGRECVHVRKALGALSKQDLENIVDPWVRESVILKMMELDEADPGRAFKDPARHPTLRRKDGREIPIHSVRIRCYDVIRPVGEGARERRVILGSNHHMEILEVTDSKGRARWEGVVVPMYEALRRLRADQAVVQREHGPGKTFVFSLSGGEIIEIVQEDGTRGLCVVRDITQKATGYISIRFVSIRDARKKEDIQKRGGWGDS

SEQ ID NO: 7293 - protein, 1050 aa, unidentified
  REGION 1..1050: note = Description of Unknown: Cas Enzyme sequence
MPENPRPVKTATPDTPSKLRYRLALDIGTSSLGWAMVRLNASDDPCAIIRAGARIFSDSRNPKNGSSLAVDRRLARGARRRRDRLLRRKTRMMRLLIEYGFFPADVDDRKALERLCPYTLRARGLDHALTGPEFGRALFHLNQRRGFRSNRLTPTDDTDKGPMKQAMAATRAQFETTGASDQPRTVGEWLHRRLQEGQPVRARMREIPITRPNGKPGVQKSYDLYIDRAMVAAEFDALWAVQAAHTPDLFTDAARDALRDCLLFQRPLRPVDPGRCTLLPDEPRAPKALPLSQRFRIYQEVNHLRLVGDRFEQNPLTLDQRDQIVAALERYPKRSFEALRKLLALPATARFSIESPARKELDGNATSAVLAKKSHVGPRWRTDETPQTQDTIVRRLLSEDDDDETVVAWLCDTLGVDVDTAHTIITAKLPAGYGHLSVQAMERILPHLQSDVISFAEATTRAGFHHSQLRENTEVPGHTVARDRVDTTTGEVTTWHVFTALPYYGEILDRYVGQASGRVDDRPEQRFGKIANPTVHVGLNQVRLIVNTLIQRYGHPEQVIIEVARDLKQSQKARAAQVRQQATFKTRNERLRKDAANILGGSPEDVSRADVQKLILWEELNESDERDRRCPYSGTVIDRRMALSAAVEVDHILPFSRTLDDSLTNKTVSTKKANQVKGNRTPWEAGDDFAAQGWATDDMIARARRLPEQKRVRFAADAEQQWLGDGTDFLGRALNDTRYLSRVAAQYVRVICPHDTRVIPGRMTAMLRGKFGLNDVLGHDGLKNRDDHRHHAVDACVIAVTDQGLLQRFARASASARERALEKLVETMPRPWETYRDHVARAVTQLRVSHKPDHSHEGIMHNDTAYPLADDGRIRMKNDTTLDGIPIADASQVHRHGKDAEGRPAAYKGFRPDSNYCIDIVRHDDGTWAPEVVTTYEAYQAVRQAGGDATVLRSSRRSLSGKPLVMRLIRHDVIRFIHEDRLRTMRVASLKRDGTIILADIHEANADARHRNKDVDYSYTSKRVGGLQRSQGRRVTISPIGDLRDHGFKE

SEQ ID NO: 7294 - protein, 916 aa, unidentified
  REGION 1..916: note = Description of Unknown: Cas Enzyme sequence
MNTMKMRTSLGLDIGSNSVGSAWIDFEAEEVFLGVTVFPAGVEESDSKRGDPKNQKRRMARSQRRSIARRAKRKRRLRRSLQQFGLLPEDDAEFDQLVQTDPWRLRKEAFDRELSPFEFGRVLVHLNQRRGALGVELDPDEAEEGRVKEAIGETAEQMAKRDARTFGELMFKLREERQHPIKGSEEGFYRDPIRNRRDSFEFHADRSMIHAEFELIWDAQKSHEGPLRDLLTDELRLALDNPDGDDTWRSRGELFGQRNTYWDRGTMGRCDLEPTDHQCPRCDMHAGEFLVLETVNRLEIEERGQSSRKLNTDERAAVIDALNSVKSPTYATIRRALKIHTREKRELVSLNLERARELSLNSSWFHREIIRGVFGQDAWDELDEQTCKSVNRAMQKIGDETRLLKGAADWWGLDAEQLERLREAIKSRPALEKRLKLSRRAICNLLPYMRQGDDVTTAKIQHGYPARPRQLNKKTRHFLEKHPNLLPPAPTLSNPVVRRAIHEVRRHVNEYLRRFGSPPDRVVIELARSATQPAKVRDQQLKNNRQREKERKEIEEDFSEFIAPNNPAHRIVERVKLWNEQQHLCAYSEPPRTISRQQVALGTDLEVDHIVPRSCGGDNGFNNKVLCFRETNRDKGNRVPQAWLSPEDFLKLEQRFAHLNFRSRNPVGTYQVVPNPRKWDNLHSDATVVNPQEFAESQLSDTAYAATQVASYLRDALYDGEADGKRRVFTTKGQYTAMLRRDWGLLEDLHERLNEPVEEGDDARPLARRNKKDRSDHRHHAIDAVTIAAAGPKLVADLASHSIRAAEYKERTGYWPGRETFAPPWGTPESFRQQVLEVASESVVHHRPVKRRLLGYLHKESLHGIVDRDCNLYVRRIPVTALKPNMLRLPVEEVNASGSLALVDPPAGKSGLVRDW

SEQ ID NO: 7295 - protein, 1360 aa, unidentified
  REGION 1..1360: note = Description of Unknown: Cas Enzyme sequence
MGKEYYLGLDVGTNSVGYAVTDRDYRLMKFKGEPMWGSHVFDDGSNSDSRRGFRTARRRLARRKQRVELVREIFAPEIAKVDERFFIRLKEAALWRDDVAATDKHILFCDKDFTDKDYFHQYPTIHHLIYELMSSNAPHDVRLVYLAVAWLVAHRGHFLNEMKKDDVESVLRFDTIYADVRQYMRQNDMSEWQEDQADALQTLLPRRQNITAKEKALIEILYEGKKPKAIDEELINLAMSVKLLAGGSVKAAKLFPEGGYDDSISLSFADKEENFVTAVAQLNEEAQWVLLLRRMYDWALLKDAIKDGDSVSAGKVKVYEQHRRDLRGLKSFIRKYMPKKYGEIFRRVESNNYVSYSYNVKSVKGDISKIKKATAVDFCDYLRKQVKDIKVEAVDQSFYEDMLARLEAHTFMPKQVNGENRVIPYQLYYHELVCLLNKAESYLPFLQAKDKDGVSNRDKLLSIFTFRIPYFVGPLNEKSAFSWIKRRGEGKIYPWNFAQQVDLDKSEEAFIRRMTNKCTYMPGEDVLPLNSLLYQRYMVLNEINPLKVNGRPIDVAAKQTVYELFMQKRRVTSKAIAKCLHDNGYMQKEDILSGVDKNLNASLKSYHDFRSLLERGVLTTNDVERIIERLTYSEDKRRMYNYLAQEFPQLEEADRKYVAKLKYADFGRFSKKFLMGFKGVNKKTRENATIMDFLWETNDNLMQLLAQDSYTFNAELEALRKEYYASGDQSLTEMLDDMRIANSVRRSIYRTLDIVKDVCKAQGNPPQRIFLEMARGGGEKGVRTVSRREQIQKLYKEVDKEYANDVKILSAKLASVSDNRLQSEVLYLYFLQLGRSMYSGQPINIENLKDSTLYNVDHIYPRCYVKDDSLDNKVLVTSNENGTKGDSYPIKGEIRKKMAGLWKKYLQCGLISEKKYNRLIRSTAFSDDERMGFIQRQLVETRQSTKALAEIFKSWYPDTELIYVKAGLVSDFRHEFNMLKCRSINDLHHAKDAYLNIVVGNVYHSKFNRKWFKPSDTYSLKTSTLFGREVKAAGSQIVWHGGEDIGRVRQVLQKNNIHYTRYAFERHGGLFDQMPVKKGSGLVPRKAGLETNKYGGYNKTTASYYLLARYVLAGKKPQADVMFVPVTLLADSQIKSQQLSVTDYIQRAIAEIIGKDINLVTEITLPLGERHVKINAVLDVAGIKSCIAGKDSGGKNVLLKSMVSLILPAEMELYVKKLESFNRKRTDNKKLEVNTQYDGINGEENERLYQIFMEKMVSTPYMKIGIIAKLYEVLDNCKEKFVSLTLTEQVSALLAILNVFQVGRSSACDLSIIGGDKSAALYRLSSKLSNWKKNVNVVRLLDVSPSGLYVSKSPNLLEFL

SEQ ID NO: 7296 - protein, 1375 aa, unidentified
  REGION 1..1375: note = Description of Unknown: Cas Enzyme sequence
WYLGLDIGTNSVGFCATDTEYNILTKNSKLQCGSRLFEDAKDASERRLYRSSRRRMARKKERINLLQQFFDQAISSVDPAFFIRLKESNYHLEDKSTGTASKYPLFNDPDFTDIEYFKKYPTIYHLRCALMNDDITDPRLLYLACHHLIKYRGHFLFEQFNSDSDADLIGLVDAINDDLNGIFSEENETNDILLSTENVSQIYEIINDKKVSDKDQWFSIFQILNPTANKIVKKICDTLKGSKIDLKSIAPSLEVDDDLKESLKDFRFGSEQFDDTYSLLEQYLDDQHLSLLMHLKQFYDFISLNRILSGFSTVAAAMVDRYNLHHEQLLAFKRFVKKYKPEFYNSFFRKNFVYDRKKDSNGTYQNYVKSNKSNGKKVLAYSALCIEKKQQGHIPVIATYETFLSYTKKFIDTCEKNIPEIINDEDFKIIKSGLESDNFCKKHNLKENSYIPYQLTLKELDLILNRQRKNFSFLTDDVVDKIKRILTFKIPYYVGPLSEKDKGTFSWIVKKPGHEKQKVLPWNFDDIVDRAASGEEFIKRMTSKCTYLRNEDVLPKQSLLYQKYLVLNELNNVSIDNNKIDQNIKKAIFEELCCKGIKLSKTKIENFLRDKHLISKENHVTYNGSFNESLSSFDKLKNILGDKFNDTMCEDIILWHTVFANEKDPVKSRIIEKYGQELNPSLIDKLSRLAFTGWGRLSRRFLAELGTTDVRTGETALSILHLLEDTNLNLMQILNSDNYSPSFINLVNQENTLDTSETLNYDYVKNLYCSPTVKRSIWQAIRISKELTQINGCDPEKIFIEVTRTNDLKNKGKVTDSRRKQLQDKFNKTKKIKDDLSQLLDEFNKRTDLREFRGDRLYLYFMQLGRCMYSGEKINLDELYDRNLYDIDHIYPQSIILDDSLDNKVLVKRHINAVKSDNYPLSSDIRNSQRAFWDMLKKYDFISETKYNRLISSKELTSDIIGGFLNRQLVSTNIAVKETAKALSQIYPGNNRIVYSKAGHVSDFRHMFGIVKCREVNNIHHGHDAYLNIVVGNVWHSTYLRYWNSNCTFNENNALNKLFYKDKPGFWSTSYLDKIRNYILNSDKYLNKFVVTKTPIDRKGSFYDATIYPKGVAQFPLHNTSAYDIKKSGGYKNQYASYVCAVEYKNKKGITETDILPVFIKDRNEASKNMKEYVSRNFGVESTRLIYSHIPFDSLLEVDGVRYYLRGRDLKLFQLVVATEWQPSSEIISIIHDINNCLSKINQKELTSPDEKSVEFEFAKGKIISKSDIKLVFEAIVNQLKKPFYGKYAFVKKFNEGKLNIDKFYEANLLDQMKFILSMLNLITLNGSLFNAELIDGAANETCKYLTNLKGCSVYLISQSVTGLYEKRIKIIDPQ

SEQ ID NO: 7297 - protein, 1200 aa, unidentified
  REGION 1..1200: note = Description of Unknown: Cas Enzyme sequence
MERILGIDTGTNSLGWAIVDKDEQGYRLVAKGTNIFSEGVKIEKGIELSKAAERTGHRSVRKHYWRRKIRKIKLLSIMTENNLCPPLSNEMLKSWRQKKEYPTDLAFLNWQKTDTNNPYECRHLCLTQKLDMTDLKQRYVVGRALYHINQRRGFLSNRKETTKETEGTVKKDISTLTEQMKAKGIDYLGEYFYILYQEGKKIRKHYTARKEHYLKEFHAICEKQGLDASLESKLEKAIFDQRPLKSQKGLVGKCSFEKGKHRCPSSHPLYEDFRMYSILNNIKIKVNTLYENKDRGLTDDEKKLIIPLFKRKSKRTFPFEDIAKKLAGKNNYCYVKSGEDKPYKFNYQMDFLLPGCPVNAQLEEIFGEDWLTSVCEVYTLANNKSHIQIMNDIWHVLFFYDDEEKLKDFAKNRLQLNEEDAEKFSKISIPNDYASLSLKAIRKILPYMRNYGLIYSEAVFLANLKEVLPSHIWGIKEMREAATESIVEMIHSFDKNNIDGLTLEVCIKSLLKEKYQVEDSALNKLYHPSMMEIYPRQKPQEDGKYQLGSPRISSVKNPMAMHSLFRLRKVINAMLKQGYVTPETKIHIEFSRDLNDANRRWAIQTWQRENEKECERCRKEIKKYITNPSDTDILKYQLWEEQNHRCIYTGAEIRITDFLGENPIYDIEHTIPRSAGGDSTKMNLTLCSSKYNREIKKTKLPTQLSAYDEIMERINEWKEKYEDLDKQIRKISTRGATSKEEKDIKIRRRHLLTLKRDYWRGKYQRFTMTDVPDGFSRRQGTDISVISRYARMYLRSVFKQVYIVKGIATSDFRKIWGIQDEYTKKERINHVHHCIDAITIACIGKAEYDKLAQFYHEADEYKFGRRDKPVFEKPWPEFVSDIKHIQEELLVKHYSKDIMPKQAKRYVRDSKGRKVLTQGDTARASLHNDTYYGAINVNGTVKYVVRKSLDGLEEKDVKNIVDPEVRAKVERAISLHGSLKEALKRIIWMNEDKQIPINKVRLFAKSVTRPINIRQQRDLSKHEYKRQYHVQNDRNYMMAIYIGKDKRGKEKQEFELINNITAAKFYRRSFDKVPTDNQLVPLYSKSGYELKYKLKTGTMVLLYENNPEEVWELDMRNLQKRLYKVTGLSSLVVNKYVYGTIALVHHQEARPSSDVKLTNGSFKESEVFRSGIKLYHTQFKALIQDVDFEFNELGEIRRMI

SEQ ID NO: 7298 - protein, 1318 aa, unidentified
  REGION 1..1318: note = Description of Unknown: Cas Enzyme sequence
MAQKYYLGLDMGTSSLGWAVTDSEYHLLRAKGKDLWGVRLFPEAEAAANRRTNRVSRRRLQREKARIGFVRDVFADAISKVDPGFYQRLDDSKFFPEDKTEVQRFALFSGKGFTDREYYDQFKTIFHLRSKLIHSTEPADVRLVYLAVANIFRHRGHFLNTNLTDGQTAELGEIYAQLVDATSNLPASADIEKLKEILSSNKITNSRRNEQLMEFLQVSKKMPEAEMLKMICGLKGTLSKAFTGIEFDDDHQKFSISFRDGNYDEKDTELQTLLDEESYEIVQLLKQMHDWGLLANIMRGEQYLSDARVKSYEKHAQDLRILKELYKEYGSGHYNKMFRVMEDHNYSAYVGSVNSDKEKGKVRRGSKNDRDGFYKKIKSDMLGMQKKAPEDDRILYILDEIDKESLLPKQLTSANGVIPYQVHLKELRKILSNAEQYLDFLKESDETGLTNSEKLLQLFSFQIPYYIGPLYNDGNAAHNAWVCRKEPGKVFPWNFEQKIDVKASSEEFIRRLVRKCTYLTSENVLPKSSLLYQKFMVLNELNNLKINGVSIETELKQDIYRDLFCREKKITSKKIKEFLIMRGVCSKKTGVEISGIDGDFKSSLSSYLLFREILNVSVLSYDQEKMAEQIIFWATVYGDTKSFLKEKIEESYGDKLSAAQIKRICSIKFRDWGRLSKAVLELEGADRETGEVLTIISRMWNENVNLMECLSDKYTYLDAIRDEGRSISHSFEEIRYEDLEDLYISAPVRRMVWQTILVVKEIVKVMGGPPKKIFVEMARDVDGKNDKARKESRQKKFADLYKKCKDDGRDWSKEIAETPEAKFRSKKLYLYYTQKGRCMYTGEPIDLGDLFNDNLYDIDHIYPRHFVKDDSIEKNLVLVKKQVNSHKSDNFPLEAEIRAAQFNWWKHLCDGNFITKEKFERLTRTTQFSAEELAAFISRQIVETRQGTKVVTELFETSFPNADVIYSKAGVVSDFRHKFNLLKCREINNFHHANDAYLNIVVGNTYNVKFTKHPANFIKDYQRDPKHFEYHMDKLFEYPVSRGNEVAWKTRGGESIKTVRKVMNRYTPLVTRMNYEEHGQLWDQTIYSADDAAKAKGVGYVPVNTDNPQMRDVTKYGGYKKYTGAFFFLVEHLKKGKKVRTLEAMPLYLKDSLDSKEKIEEYCKDKLGYQAPSVRVEKIKMYSLIKVDGFFMYLTGRTGNQLIVVNSVEMKLPVEWNVYIKRLFASPISGDVDNTSSINGLITKEDNSKLYGTLTDKYNSSIYAKRPNSIGEKLVIWQEKFDKLTIEKQVYVLKQLVNLSSSSNQGADLQYIGASCKI

SEQ ID NO: 7299 - protein, 958 aa, unidentified
  REGION 1..958: note = Description of Unknown: Cas Enzyme sequence
SLWHLLYSVEDKKEIESALKKFASKHSLNEKFVETFKKIKPFTKDYGSYSEKAIKKLLALMRMGKYWKEENIDENTRNRIDKIINAEYDERISLRTRDQVKKFEEKKTKELNGEYHLDERCKFKNLPISLACYIVYNRHSEAKEIEKWESPESINNYLKKFKQHSLHNPIVEQIVTETLRTVRDIWAQERSINEIHLELGRELKNPADVRKKMSERIQQNENTNLRIKALLMEFANPEMGIENVRPHSPSQQDILRIYEENALDNLSKDDKDFQDISKISKLAQPSKSEIIKYKCWLEQKYRSPYTGKQISLTKLFTSAYEIEHVIPQSRYFDDSFSNKVICESEVNKLKDNQLGFEFIKNHHGEKVQLSQGETVEILSIDAYESFVKEHYFKNRGKMKKLLLENIPEDFIERQLNDSRYISKMIKGLLSNIVREKDPNEEYEQEAISRNLIPCNGAITDRLKKDWGMSDVWNSIILPRFQRLNQITGKDCFTATNGEGHEIPAIPIELQKGFNKKRIDHRHHAMDAIVIACTTRDHVNLLNNEAARSKSNINRYQLQRKLRKYEKVIIDGKNREVPKEFLKPWDSFTTDAKNILENIIVSFKQNQRVINKTSNYTQHFNDQKKKVLIKQAKGDSWAIRKPMHKDTVFGEVNLKKIKDVSFDIALKDPSRIADRELKNKILSLKSAGKTTKDIKKEINLSKVAVYYFTNETKDHYFATRKPLDTSFDKDKIENEVTDTGIQKILLAHLATKGNNPELAFSPDGIDEMNRNIKILNGGKFHQPIYKVRWYEKGEKFAVGQKGNKPQKFVEAAKGTNLFFAVFTNEQGIRSYLTIPLNIMIDCQKTFGAKWDVSIEQYLKEQKLVSNDSTLLFILSPNDLVYLPTEEEQSNIIKDKERIYKVVSFSGYQMFCIKANVSSTIVNKVEFTTSNKMERAITGEMIKETCIPIKVDRLGNIIQV

SEQ ID NO: 7300 - protein, 915 aa, unidentified
  REGION 1..915: note = Description of Unknown: Cas Enzyme sequence
PMSQKVLGQFDSGVTESQTAVRTSYRGIRRIRQRFLLRRERLLRVLHVLGFLPNHYDDALGWDRSNGKTYGKFLDDSEPKLAWTRDLQNKSHFIFMDSFMEMVRDFQNVHPELMKDGKSIPMDWTLFYLRDKALRAPITRQELAWILLNFNQKRGYYQLRGEEEETEDKSKLVEYYVLKVVDVEESEEKRGNDIWYNVRLENGWVYRRSSRTPLNDWVGKKREFIVTTELEADGSVKVDKEGKERRSFRAPDANDWNLQKKRTEADIESSGLTVGSYIYRHILANPSEKVQGKLVRTVERKYYKEELRAILQKQAEYIPELTNSSMLEVSIRELYAKNLAHQDSLRKKDFVYLLIEDLIFYQRPLKSKKSLISNCPYEQYEYIDKETGEIKIQNIKCIAKSNPYYQEFRLWQFIQNLRIFSRDGIEEKEVTKDYLQTEEDYVHLFNYLNDRKDISQEIFLKEFLGLKKSKGKDTQYACRWNYVEDKVYPCNDTRYTILKALKRANLSSNLLNRDVEYRLWHLLYSVEDKNEILKALGKVAEQKGYGSEFVEAFKNIPSFKKEYGAYSEKAIKKLLSVMRMGSLWRKEDLPQDILENYQTYTSEESDINILERIANQGKTLASISDFRGLPVWMACYVIYGRHSESKDITIWKSPNDIKVFLNEFKQYSLRNPIVEQCVLETLRTVQDIWEQYGKIDEIHVELGRSMKSSADQRKRMSQTIQDNENTNLRIRQLLLELKNDDNIKEVRPFSPIQQEILRIYEEGALMELKRDDPDFTEISRISSLAMPTQSELLRYKLWLEQKYRSPYTGKTISLTKLFTPAYQIEHIIPKARFFDDSFSNKVICEAEVNQLKSNQLGYEFILSQGGRIVSCPTLGDVRIFTKDEYKSFVADHYSGNKSKARKLMMDDIPEEFVQR

SEQ ID NO: 7301 - protein, 1098 aa, unidentified
  REGION 1..1098: note = Description of Unknown: Cas Enzyme sequence
MQNFTINYKEIMENKITSNVGTLEIGLDVGHSSIGWAVLESTGHKSTNGSHNGTDSIQIHGCGAVIFRADDCLASQRRGFRRQRRHIRSTRQRIQRIKTLLAHLKILKLEELDRPGCAWPWLLAARVLQNGQVLTWPELWDVLRWYAHNRGYDGNRRWSDLEAATQDEDTEKEENARRLLQTHGTKTMAETFCKVLGVDVANSKKRSSAVRFKGLNAAFPRDIVEEEARRILNAHLGKLKGLDPLLIRTLLGNDNEDRAAWQAIPCPDIRLPKRYSGGLLFGQLVPRFDNRIISTCPISGGKVLSRKSPEFLNFRWAMQLANIQVSTTSSGALRPLTAEERKKIDQQMRSAGHLTPSELKEAVRTTTGCAKDNLETMLMLPDAKEALLLDPVQKLITSDKVAPLWITLPERLQKRYRGQWRRKKATTRAAMREQIVALKAPVEAFDQAIQTLLDQHNTKTKKNAVQLSRDALLSEPLKADFKGLDGRAAYARSVLIEACEQIKNGQHPKEPGGCLFVTERMRQAQLNRTTAQQTNNHLVRHRLLILERLLKDIVKDYAGGDKNRIQRITIEVNRDLREMSGMTNKQKAQDLGLRIANHHQVSEKLEKAFDGRHVSITAGLIRKARIADDLGWTCPYTGQIFEPVDLVTRRVDKDHIVPRSDRTSDSLDSLVITYAAVNKWKGRRTALKFIEEEQGKPVPDMPQLTIMSLKRYKQFVDKLPKTGSHEDDKRRKKKRIQFLLTRDFTEKAFTPRDLTQTSQLVRMGAQVITRIFQDCAQRPVVVSLPGSVTGTVRKSWRVLGCLSLANPQVLDENGELKTKTDIRDITHLHHALDACVLALASHYIPNNGRVWELILKRCLTEPEQRELSALGIFGFDEEHRFQLNDLHDSIKEQIRQKLAEKRVVQHIPARMDGLRLEQNMWRVKQIKDGEATLEQRIRQPDGSRSTKTSTEKVGKLLGIEPVGGEGKLKKNKGALVIPDNFGVALDPTPTIIPYHKVWDRLQDLKLKNHGKQVRVVKNGSIIKVSGGKKYNGIWKVFSAKNNATGMALDIGAPDVVRLKNKTDGHKINVLLNSLIKDGLEVAKPSLTGVASCPTTSSA

SEQ ID NO: 7302 - protein, 1066 aa, unidentified
  REGION 1..1066: note = Description of Unknown: Cas Enzyme sequence
MPTMRYRLALDLGSTSLGWAMIRLNAENQPCAVIKAGVRIFSDGRNPKDGSSLAVTRRDARSMRRRRDRLLKRKSRMMRTLVEHHFFPSEEAERKALVTLNPYSLRAKGLDSALTPSEFGRALFHINQRRGFKSNRKTDKKDNDSGALKTAISKLRETLKTENCRTVGEWLYKRDAAELTVRARYRQNKVIKDDGKTRIDKSYDLYIDRAMISDEFDALWSKQTELNPALFTEAARADLKDVLLHQRPLKPVKPGRCTFMSDEERAPLALPSTQRFRMYQEVNNLRILRPGLKEEALTLKQRDDLIKALEANSKRTFTQIKKLLGIGGAVQFNFEDPKRQELKGNVTSAILSRAEHFGAAWFTFNEAKQDEIVLQLVGQENEAKLVRWLQEQTDIDENRAATIANADLPEGYSSLCAKALARILPQFRRSVLTYDKAVLAAGFDHHSRLSENTEVPGRTFAHEMINAETGEIRTFHVFHSMPYYGEFLQRHVGFGSGKPEDNDEKRYGKIANPTVHIGLNQIRLVVNALIKRYGHPNEVIVELARDLKQSKDHSVNEKEAYREKPGCSCQRCVTARQAENQRRNVRLRADVAGTLGISSERVKAADIQKMILWEELSSNIADRRCPYSGAQISAAMLLSNQVEIEHILPFSETLDDSLNNKTVALRQANRVKGNRTPAQARDDFENQGWNYADILARAELMPKSKRYRFGTDGMKQWLKDDAGFLPRALNDTRHMSKVAREYMGLVCPQNTRVIPGRMTAMLRAKFGLNDVLGVDGLKNRNDHRHHAVDACVIAVTDQGLLQRFAQASATAREQQLNRLVDNMPLPWDSYREHVQRAISNIWVSHKPDHAYEGEMFDATIYSAAGRSKSAAKDRSVIPFQARQDTPTAIQRHGYVDNTPKAYKGLLSNSNYCIEVFLTTDGAWDAQVLRTFDAYQIVCNCQSIFEGIKRLRNPRTSASGMPLVARLMINDYIRVEIDGQVLVLQVLKINSSGSVTFIKPNETNISARYAAKLAAQKAAHDGQTFDINILNDDFFQKALSAQSLKTVKARRVTISPIGELHDPGFRE

SEQ ID NO: 7303 - protein, 989 aa, unidentified
  REGION 1..989: note = Description of Unknown: Cas Enzyme sequence
MGSCTLGLDIGSNSIGWALIETKKKPSIVGIGVRVFPEGVDRDTKGLEKSKNATRREARGARRTHQRRNLRKEQLLKTLQKIKFLPTSESELRSVFHTNPYGLRKKGLDEKLEPYEFGRVLYHISQRRGFKSNRKSGKAKEDGVVIKGATALQTEMDTKGCRTIGEYFASLNPEEQRIRKWYTFRSMYENEFDLLWAKQSEFYPDILTEELRKNIRDEIIFFQRPLKPQNEKIGNCELEPSEKRCPRGDWHARRFRLLQDVNNLIIQNPDGTEQKLSNDQQKRKVLLDELSQNEKLSFDKIRKKLGLIETQKFNAEYRVSKSGKTVESLKGDNFSWAMRKKNIFGPNVWDAMNEQEKIKLNEWLVELEDDQLREKLRIEYSFNDKQIEATLKISLPQGYMSFSRKAIIKLLEFMEQGALTSEAIAVAYRDRKRTSEENNLDKLPIPEDLRNPIVNKALFEVRKVVNAIVKEYGKPGKIKIEMAREVQGSSKQRKELHWKQIENKERNEKVRQRLIQDMNIPNPSRNDIIKYKLWEECGKICPYTGKSISQEALLGPEFQIEHILPYDRSLDDSYLNKTLCEVHENKDVKRNQTPYEAYNHDTEKYEQILERVNKSQMPYPKKRKFWQKEIGLEQALRQLNDTRYICRETVKYLKQLGIYVEGTRGKITSELRHQWGLDGIFDELGTKRDDDHRRHAVDAIVVGVTEDDHLRKLARSKYAISGPSFELPWPDFREEVRENVKKINVSHRVQRKVSGALHKETNYGATKKEDLYVFRKNLEDLTLPMAEDIVDPVVREIVKKRLEEKGIDLDGKDRKPPKEVWKEPLYMKTTKSNKKVPIKSVRVYNIAENVIAMKDRSGQPYRYVEPGSNHHIEIFEYTDKKGKVKRDGKVITMFEAVQRNRRGEPVVKKDYGDGKKFVYSLAINEIFMLEQDGELYRVQKISSNQQIFFRHHTFGGELQKHKGISKYHNTLNGQKKTIDPLGRIWPAND

SEQ ID NO: 7304 - protein, 1220 aa, unidentified
  REGION 1..1220: note = Description of Unknown: Cas Enzyme sequence
MRLLGLDIGTNSVGSAWVDTDARTITTGVSIFPAGVEESEDKRGAPKNQARRGHRSQRRSIERRADRKHRMRGFLLEKGWMPADPQEQKEWLERLNPWILRAEVLQRELEPHEFGRVLLHMAQHRGAYGLDNEENNPRSEKEKGNGAKGQESDEKKAKEQKQMTEAIDRTRQRMSECNAETFGELVAIEFHNRRVQVEKNDKDGKKLEIRSAVRNRTKASGEGTYDLCADRSMIWEEFDRLWKVQQSFGGTLAIQLTPDCRKELDDPHGDPHWEHNATWRYRGILFGQRKTYWDMRTLGRCDLEPTDRQCPRADMYAQEFLVLETVNNIRITPPGELRRPLTKAEREAVIKKLEAQKTASMATVREALGIHRGLKKTQYTLSLEADPERGLNTNWFQREIVNGAIGEEKWQAMPPSTKESVNRAILKFEPESPKDRETLHRGCRTWRGWELDEQKVSRLILAWTKRPKADSRVNYSRRAIQNLLPYMRDGLTVNEARKALVEDATNGATNEQRERYGFKNSKANRAMRRYQDKHPDLLPPAPPMLSNPVVRKAIYEVRDHIQAYMRKSGCKPNRIVIELARDAYLPAVVRNKQLHENREREKKRKAIVEQHNLSQLSRTQQEKAVKRVLLCREQKDQCAYCGNGNNTVSEKAAAEGNGVEVDHIIPESRGGDSGLNNLVLCHTDCNRGKGNKTPREWLTQDEFGKVEQRLRHLKNENPVKWDNLHKEVKDLEGFVASQLTDTAYAAKQVAEWLRAVLYDGEKDGVRHVFTTKGRYTAWLRRDWGLFPDRKAEIPERNDASKESALPRHESESKTKNRSDHRQHAIDAVAIALTSPERLKELAMAIKRWELAKADGRAAPEREPLDPPWADFDSFRAQVMAEWDRIIVSHRPQRRRIAGQLHKDEHFGAIAGDEKHFTKRIFAAELKANHLRVPKGWEELRLLLEKAPARAQQRTIRNKMLALEDVPPTKSGIVRDRWFREELRECLRRNGFDPDDLSKDNQSAKKYKDWVKQKGLVLENGVPVRRIKLLCTLSKPVEIERQRFNLVTGKMEKDVDPRSEKDSRFERRRLRVYESRNNHHIEIRENQKGKWVGEVIPNWQAARRVRPSKESAEEPRPAVDRSDNKQGRFVMSLSIGEIIHMLHPNTKRPGYFVVFKIDATKTVHFTRHFDAGRDKATDKAPAREDIPVTPADLQRLGIPPESHPQKVWVGPLGDLKVLVRD

SEQ ID NO: 7305 - protein, 1086 aa, unidentified
  REGION 1..1086: note = Description of Unknown: Cas Enzyme sequence
MSAYGIGVDIGITSVGWAAVALDTQEKPCGILDMGARIFDAAEQPKTGASLAAPRREARSARRRLRRHRHRNERIRQLLVREGVLSEEELAALFDGQLDDIYALRVRALDEAVDRESFARILLHLAQRRGFRSNRKSASAQEDGKILEAVAANLCRMEEAGYRTAGEMLFRDPAFAAQKRNKGGEYLTTLSRDMVADEARQIFAAQRRLGSVFASEVLEEAYMEILLSQRSFDEGPGGNSPYGGNQIERMIGRCTFFPEEPRAARAAYSFEYFSLLQRVNHLRLIRDGESAALSPEQRKKLIELAHQSAALDFAKIRKVLGISPEYRFNAVPYRTEADADAAEKKEKFNYLKSYHAMRTAIERGGKGRFALLTAEQRDAAGTILTLYKAEGKVRDELAKAGFEACDIENLLACSFSKTGHISLKACRMLIPYLEQGMNYNEACEAAGLAFKGHEGGEKSPFLHPTEEDLADVTSPVVRRAVSQTVKVLNAIIRRYGESPSFLNIELAREMAKDFSERKALEKEMKENRARNERLMERIRGEYGVVNAGGLDLVKLKLFEEQGGVCAYSQKPISMERLFEPNYAEVDHIIPYSISFDDSYRNKVLVLTEENRNKGNRLPLQYLSGQRREDFIVWVNGSVRDYRKRQKLLKERITAEDEAQFKERNLQDTKTMSRFLLNYINDNLAFAQSSRKKRVTAVNGSVTSYLRKRWGINKNRADGDLHHAVDALVIACTTDGMIQQLSRYAAYRECRYMQTESGSLAVDDRTGEVLREFPYPWPLFRKELEARLSRDPARVIQDLKIPFYYESGRTLPGPLFVSRMPRRKISGPAHKDTVKSPRALDEGHVIVKRALTDLKLKNGEIENYYDPGSDRLLYEGLRNRLIAFGGNAAKAFAEPFYKPRRDGTPGPLVKKVKLLESSTLNVPVHDGKGVADNDTMVRIDVFHVEGDGYYFVPIYVADTLRPELPNRACVAHKPYSEWKIMREEDFCFSLYPNDLICIKSRRSIKLSKANTESALPDNETLQEALLYYMSSNISSGSISVRNHDNSYTASGIGFKTLDVIEKYSVDVLGETHRVGREPRLPFTQKRS

SEQ ID NO: 7306 - protein, 1327 aa, unidentified
  REGION 1..1327: note = Description of Unknown: Cas Enzyme sequence
NLYLWVCSFAFSLQKRRILSKKGIFPFLFSTKKFILNENKKKKELLMKKILGLDLGTNSIGWAVVNADEVTRDDGSRYLKPNGISAAGSRIIPMSADILGDFEKGNSISQTAERTRMRMARRLHERALLRRERLLRVLSLLGFLPKHFADKIDRYGKFTDESEPKLAWRKNTEGKYEFIFQNAFNEMLADFKDKQPEIVEEGKKIPYDWTIYYLRKKALEKALSKEELSWLLLQFNQKRGYYQLRGEEEDIPQDKKIEYLAQKVVKVEATDQKKGDDVWYNVYLENGMIYRRTSKAPLDWEGKIKEFIVTTDLEKDGSPKKDKEGNIKRSFRAPQEDDWTLLKKKTEADIENSHKTVGCYIYDSLLNNPKQKIIGKLVRTVERKFYKEELTQILKKQIELIPELRDDNLYKQCIEELYPINEAHRNTIAKNDFAIFFINDILFYQRPLKSKKSQIDNCPYESHNYIDSKTGETKTAPVKCIAKSNPLFQEFRLWQFTQNLRIYQREKEIDGKLLTDIDITSECLKSEEDYVRLFDWLNDRESIEQEELLKHLFNTKKSKNKENPYRWNYVEDKVYPCNETRATILKGLSKCGINASVLSPEMEMALWHILYSIEDKKEIEKALTRFAQKQGWNSEFATVFSKLKPFKKDYGSYSEKAIKKLLSLMRMGKYWNQENIDKNTLDRIDKIINGEYDEKISNRVRDNAVNLKDIGDFRGLPVWLACYIVYGETKDCTKWNTPEDIDAYLKEFKQHSLRNPIVEQVVTETLRTVRDIWKQEGQIDEIHLELGRDLKNPADKRKKMSENILKNENTNLRIKAMLMEFMNPAMGIENVRPYSPSQQDILRIYEENALDNLTKEDKDFDFISKISKQAQPSKSDIVRYKCWLEQKYRSPYTGKTISLSKLFTSAYEIEHIIPQSRYFDDSFSNKVICEAEVNKLKDRQLGYEFIAEHHGEKVQLSQGEVVEIFSVEAYEKFVKENYANNRVKMKKLLMENIPDDFIERQLNDSRYISKVVKGLLSNIVREKVDDENYEPEATSKNLISCNGAITDRLKKDWGMNNVWNSIILPRFIRMNQITEKDCFTTTNAEGHLIPQMPLELQKGFNKKRIDHRHHAMDAIVIACTTRDHVNLLNNEAAHSKYNTNRYQLQRKLRRFEKTVIDGKEREVAKEFLKPWDSFTMDSKNILENIIVSFKQNQRVINKTTNAFQHFDENGKKTFAKQGKGDSWAIRKPMHKDTVFGEINLRKVKSVSLNEAIKVPERILNKNIKEKILELKNNKIDAKNIKKYMEEYHIGGYGTDTSKIDVFYFTKETKERFFATRKNLDISFNRAK

SEQ ID NO: 7307 - protein, 1489 aa, unidentified
  REGION 1..1489: note = Description of Unknown: Cas Enzyme sequence
MAKILGLDLGTNSIGWAVIDNEINQIVASGSRIIPMDAGRLGDFEKGNSVSFTAERTQYRGARRLHERFLLRRERLIRVLRIMGFLPEHFASQLSRYGKLPDDKELKLAWNEGPAGKNEFLFKTAFEEMVADFHRAGVDRKIPYDWTIYYLRHKALTHPISKQELAWVLLQFNQKRGYYQLRGKADEGFDNAANKNEEKSYHELKVIKVEDTHEPRKGGGSWYNVTLENGWVYKKPSLLKPDWEGKIRGFIATFQLDKDGNRKSDQPKLSAPKEDDWGLRKIKTEHDIKQSGLTIGDYIYQSLLHNPDRKIIGDLVQTVDRELYLKELRQILDQQKKHIPELNDHQLYLRCIEELYPSNEPYRNSIAKRDFTYLLADDILFYQRPLKSKRSLINDCPFETQNDRPIKCIAKSHPLYQEFRIWQFLSNLRIYKDNLDITSNLLPDHEAYARLYDHLSILNVIDLKGLLKYFKIAKADLPKCRWNYVPDKSYPVGETRATLLGGLHKADVPASFLTPDKEEHLWHILYSVDDPAQYRSALRTFARRQGWDKPQADAFVNAFERLTIYKEKDYGAYSAKALRRLLPLMHRGQYWNPSAIDPATRSRIEHLLTGEDDATLTPFVRDKFTHLQHLAQFQGLATWQACYLVYNRHSEPISSQKWTKPEDIDTFLAQFRRNSLNNPVVEQVVTESLRVVRDIWRQQGHLDEIHIELGRELKKTKAERERLTKIITDGEATNQRIRLLLLEFLNPDCQIDDVRPQSPSQQEKLKIYEEGVFQSDIEIPDDIQDIQKRLSTLKTKPTHAEVLRYKLWLDQKYISPYTARPIPLAKLFTTAYQIEHIIPQSRWFDDSYSNKVICESEVNRLKDRELGHEFIVHHAGQEVPLSLSDSVRILSVSQYEEHVKRTFAGNPRKMRNLLLDEIPEDFTSRQMNDSRYISRLMMQLLSNIVRSADEEGNLENAATSKNVIACNGAVTDRLKHDWGIDDVWNRIIIPRFERMNTITDSTDYTATTPNGHIIPSVPVELRPGFNKKRIDHRHHAMDAIVIACTTRSHVNLLNNEAAKSDTRYDLQRKLRQTETYQDPAGKLHERFTLFYKPWPTFTQDVYQALQGIIVSFKQNLRVINKTANRYTVIRNGKHLVVKQTKGDNWAIRKPLHKETVYGEVNLQLKKKVRIEKAIANPDSIVSRELKAKIKEKIALRYTAKQIAEYLEKHKDIWDEAADGKIEVYYYTQSTPDRYFATRKDLLGLLKDATTQAAASKTIETITDSGIRSILYAHLLSEGNNASEAFSADGLERMNRNIQSLNNGHPHMPIKKVRVFEQANKFSVGSSGQKQTKFVEAAQGTNLFFVIYTNSDGTRGYATAPLNLIIQLQKQYEKDWKNHLAESLSSPAFNLLPSNAQIRYVLSPGDLVYVPTEAERQNGIGNIDVQRIYKMVSCTGRQCHFLLYTIASVVLPGKEFEAKNKMERALTGEMIKEVCIPVQIDRLGNIIKIG

SEQ ID NO: 7308 - protein, 1027 aa, unidentified
  REGION 1..1027: note = Description of Unknown: Cas Enzyme sequence
VYQEVFTSKVRKDFAFETIRKFLEKRLGLTLKNADGTKTINYKDKALVAGCPVTARIQNVASLFDSTIDTLQLQGVKTRSSKSDDDKHQVSYDALDLWHFCFEADEIEDVKRFASQSLKFNEKATDCLCKLWASIEQGYTTLSLKALRNINRFLEYGLKPADAIFLAKVPDIVGRIDTDKLIRFYNEKVKVPAEATMRIARVVNTLIANYKSLALDDRFADHDFEYQLHDDDKEEVIKCIQNTDSSFELMDADEQQAMIAEVTRLYQAFFADFHREYVKVPRFADALVSELKKLYPDVKEERWQKLYHPSMVSDFPRDKNNANLLGSPKIGAIRNPTVLRALNVLRSNINKLLADGLDPQETRIVVETTRVNNDINKRRAIEIYNDERTAENKCIEEILKKQYPKRTISEKDISAARYVLEQTGKDLLTDDDPDNRRYRHQTKKYRQWLEQGCHCLYTGNEINLENLFEENMFDLEHTVPRSLSFDSSDKNLTICDAYYNRHIKQNRIPTELPNYEVDTPPYTAIKPRLKMWQDKVERLSQNVLFWKNKAKKTQIENIHNDCMREMLLWQMEYDYWRQKLDRFTMKSKDLTDGFRNSQLVDTGIITRYAVLYLKTLFAQVDVQNGQSTSAFRKIFGIPQKDRSSNFHHAVDATILTMIPSSAKRDRMLKLFYQIDELRKGGHEVSGLEFQLGREIASCGLGTGLAGIEDFISQRVMVDFYKQDRVLQKDRRPVIRKGKTLMRKTQDGKTEPVTFSSDSIRGELHNQTFYGAIKRRSDDKEFYVVREPLKYKSSERDKGFKDWEEINKRIVDLSHPADSKEFKPMVQMMIRQFPEGTTFKDACEQGIYMLDRNGCKVNKIRHIRCYGKNVANPVRVKRHTYPSQKAHKQYILAALGDGSVYALCEYSDGQTREYKRYTYMEISENRKTGLEDIPTVYPGKKEQQLQLVRKIMKGDMLLIYEKTPDELLHLDKSELSKRLYKVQFFEGEKGVTLYHHLLSDSKTKEKLSGEEKKRNKGESIKDYTKLPP

SEQ ID NO: 7309 - protein, 1262 aa, unidentified
  REGION 1..1262: note = Description of Unknown: Cas Enzyme sequence
MKEKVVGIDLGTGSLGILLRNLELGDNIIDQLEWFSVTTFDSGTGMSQTGEYTLASDRRSHVQSRRLKEHSRYKRWATLALLIEYDMCPMSPESLEKWRVYDKTRNLKREYPLDDLAFNQWIKMDFNGDGIPEYTSPFQLRRELVEKQLDFSQPENRYRLGRAIYHIALHRGFKSSKGETLAELEEGNKDTQISTDDLEGAMKKSEEKKSKDLTEYMEFHQLKTVGQAFAYLEDEGVRIRNSRYQAVRSQNVDEINEYFQFQHGLSGFQELHKRLISTKKGIGTLFYKLPLRSQKSHIGKCIFEKNKRRCPISHPEYEKYRAWAFINNIRYKASVEDVWQELSLEIKNQLYQEVFVSKVRKDFNFEVIRKFLEKHLCLTFSNTEKAKTINYKDNTLVAGCPVTARLKNIADYFGTDIEHFEQKGTKTRDTHTKRQERERHTVVYHTMDLWNFCFDTDEKEDVTAFAHNSLGWNEQATDKLCKLWNAMDQGYATLSLKALRNINRMLVYGLKTSDAVFLAKVPDITGMSEEGVKDLIDIYLGRVKGQVNQKVRDCRIVNTLIANYKSMPVRDRFADHNYDYQLGIDDREAVVKCIVDNDKDFSLLDATAQKEMIDRVTNLYQSFFADIHRDFVKAPRTVDALKEELCKRYSGIDDSKWERLYHPSMLSDFPRDKDNANHLGSPNIGAIRNPTVMRTLNVLRSVINKMIDEGLIDPQETRLVVETTRVNNDINKRWAIQKYNEERRDENKAIKDILQEYYPEKDINDDDVDAARYVLEQSGEDLYGENDRFQHLIKKYKLWLEQGCQCLYTGHIISLSNLLNGEMFDAEHTVPRSISFDSSDKNLTMCDSYYNRHVKKNMIPSQLPNYEHDVVIDGHTYTAIKPRLQMWEEKVERLSKNVTFWKNKAKRAQTESYKNTCIRQKLLWLMEFDYWRSKLDRFKMKTSDLTDGFRNSQLVDTGIITKYALLYLKTLFKSVEVQNGQSTSAFRKIFGIPEKDRSTHYHHAVDAAILTLIPTSAQRSRMLKLFYEIDEMKRGGHEYSGLQFQLNKEIESCGIGKGVAAVDQYIEDHVFVNYYKQDRTLQDANNIRGKLHAETFLGAITQWNGEEKKYVKRVELKYKKSSLDSGFKSWEDLECAIVNKQLVQMMKSQFPKGTTFQEACEQGIYMLNKRGEKVNRIRHIRIEVKEKHPLAIKKQTNLSVKDYKQYYYAGMGDLYVTCEYQNQQEREFIVYSLFSIAENRKMGVEDIPTTIIGKKGIRLTLD

SEQ ID NO: 7310 - protein, 1215 aa, unidentified
  REGION 1..1215: note = Description of Unknown: Cas Enzyme sequence
KQLDFSLPENRYRLGRAIYHIALHRGFKSSKGETLAELEEGNKDSQISTDDLEGAMKKSEEKKSKDLTEYMESHQLKTVGQAFACLEDEGVRIRNSRYQAVRSQNVDEINEYFQFQQGLHDYQDLHKRLISTKKGIGTLFYKLPLRPQKSHIGKCIFEKNKRRCAISHPEYEKYRAWAFINNIRYKASVEDVWQELPLEIKNQLYQEVFVSKVRKDFNFEVIRKFLEKHLGLAFVNTEKTKTINYKDNTLVAGCPVTARLQNIADYFGTDIEHFEQKGTKTRDTHTKRPEREKHTVVYHAMDLWNFCFDTDEKEDVTVFAHHSLGWDEQATDRLSKLWNAMDQGYATLSLKALRNINRMLVYGLKTSDAVFLAKVPDITGMTEEGVKELIDIYLGRVKEQVNQEVRICRIVNTLIANYKSMPIRDRFADHNYDYQLGDDDKEAVVKCIVDNDKGFSLLDATEQQEIINRVTSLYQSFFADIHRDFVKAPRIVDALKEELCKKYPGIDDSKWEKPYHPSMLSDFPRDKDNANHLGSPNIGAIRNPTVMRTLNVLRSVINKMIDEGLIDPQETRLVVETTRVNNDINKRWAIQKYNEERRDENKAIKDILQEYYPEKDINDDDVDAARYVLEQSGEDLYGGNDRFQHVIKKYKLWLEQGCQCLYTGHIIKLSNLLNGEMFDEEHTVPRSISFDSSDKNLTMCDSYYNRHVKKNMIPSQLPNYEHDVVIDGHTYTAIKPRLQMWEEKVERLSKNVTFWKNKAKRAQTESYKNTCTRQKLLWQMEFDYWRSKLDRFKMKTSDLTDGFRNSQLVDTGIITKYALLYLKTLFKSVEVQNGQSTSAFRKIFGIPKKDRSTHYHHAVDAAILTLIPASAQRSRMLKLFYEIDEMKRGGHEYSGLQFQLNKEIESCGIGKGVATIDQYIEDHVLVNYYKQDRTLQDANYIRGKLHAETFLGAITQWNGEEKKYVKRVELKYKKSSLDSGFKSWEDLETAIVNKQLVQMMKSQFPEGTTFQEACELGIYMLNKRKEKVNKIRHIRVEVKEKHPLAIKKQTNLSAKDYKQYYYAGMGDLYVMCEYQNKQEKAYQIYSLFSIAENRKHGIEDIPSTIIGKKGNRLILSRVIKTGDMVLIYKDSPDELYDLNAMELSKRLYRVPNGAFESDGRISLCHHLCASQAKGQSIKDYNNLPPNIRCASSAIRFLQKDVDFTIEKGNIIFTGL

SEQ ID NO: 7311 - protein, 1197 aa, unidentified
  REGION 1..1197: note = Description of Unknown: Cas Enzyme sequence
MKKRILGIDTGTNSLGWAVVDKDENGFYSLVKKGSLIFQEGVKIEKGKESSKAADRTFHRSLRKHYFRRRLRKIEVLKVLIEFDWCPYLSPEALHQWHVQKKYPMDEAFLSWQRTNDNLDENPYYYRHLCLHGQLNLDKKSDRYILGRAMYHLAQRRGFLSNRLEQGDEDETGKVKDGISSLSESIASAGCEFLSDYFYKIYKEKGNTERIRTHYTDREEHYKKEFYAICKQQHLSEEQVTALEKALYFQRPLKSQRQGVGKCTFEPKKPRMADSHPAFEKFRMLSFVNNIKVKGPYDIELRPLSAEEYEKAKPVFFRKSKPQFDFEDIAKAIAGKGKYQYIKDVGEKEYKFNFRMTQSVAGCPTVASLISVFGNDYETAIAERYILSEGKSPGDMLNDVWNVLYSFSSKDKVKEWGQKNLQLSDEEAEKFSKIKLTHSFASLSFAAVKRILPWLERGLIYPHAVLMAKVPDIVGEDEWKTRGEAITEELYNLINNFTPKDISLQGTLDFCIKDILKDMCNLAPGATEKLYHPSMIEIYPNAKKNSQGVYQLGSPRTNAIRNPMAMRSLHQLRKVINALLRDGTIDSQTEIHIEYARELNDANKRKAIAQWNKNRETKRKKYAEDICSLYKQECGKDIIPTDDDILKFQLWEEQNHICLYTGKSIGVADFIGPNPSYDIEHTIPRSIGGDSTLENITLCSSKFNRDVKKAKLPTQLTNYDAIIERLEEWRKTIEKLRKDVDHVKTYSSMDKSAKDRLIQKRHLLKLELDYWIGKYKRFQMEEVPEGFARRQGAGIGLVGKYAGLYLKSLFHKADDRAKSNVRVIKGATTAEYRKMWGIQDEYEKKSRDNHVHHCIDAITIACIEPGEYNATARYYQQLEEYERHKGTKPSFPKPWSTFTEDIKTIAQEMLVVHSTPDNMPKRARKYIQTSHGRKLAMGDSARGSLHNDMFYGAIERDGQVKYVIRKELSSIKESDIENIVDETVKSIVKKAIEEKGFAKAMAEDIYMNKERGIKIKKVRCFTPSVTNPLHIRMHRDQSRKEYKRKFHVTLDGNYCMAVYEGVVKGKLKRTYEIVNMIDAADYFKKSADLTNLYSIVPETKNGLKLKCTVRTGTQIILLQTDDEEIDLTDIGDLTKRFYFVAVMQKDGRLVLRYNQDARDATTLKKERKSGAYKVGEQYRSEIMLSLSDFHALVEGVD

SEQ ID NO: 7312 - protein, 1134 aa, unidentified
  REGION 1..1134: note = Description of Unknown: Cas Enzyme sequence
MKEKVVGIDLGTGSLGILLRNLELGDNIIDQLEWFSVTTFNAGTGMSQTGEYTLASDRRSHIQSRRLKEHSRWKRWATLALLIENNMCPMSPDSLEKWSVYDKSKNLKREYPIDDVAFNQWIKLDFNGDGVSDYSSPFQLRRELVEKQLDFTQPENRYKFGRAIYHIALHRGFKSSKGETLAELEEGGKDAIVSTDDIDSAMKKSEEKKSKDLTEYMESNQLKTVGQAFACLEDEGIRVRNSRYQAVRSQNIDEINEYFHFQQGLCGYQDLHKQLISTKKGVGTLFYRLPLRPQKSHIGKCIFEKNKRRCPISHPEYEKYRAWAFINNIRYKEQPEDAWRELSLEVKNLLYQEVFVSKVRKDFQFEVIRKFLEKHLGLAFINTEKAKTINYKDNALVAGCPVIARLQNIADYFGTDIEHFEQKGAKTRDTHTKRPEREKHTVLYHAMDLWNFCFDTDEKEDIISFAQNSLGWDEQATDRLCKLWNAMDQGYATLSLKAIRNINRMLVYGIKPSDAVFLAKVPDITGMDEEGIKELIESYIGRIKGHVDYEVRLCRLANILIANYKSLPFKDRFADHDYGYQLHDDDKEAVVKCIVDNDRDFTLLDASEQQEIIARVTLLYQSFFADIHRDFVKAPRIVDSLKEELSKKYPDIDESKWEKLYHPSMLSAFSRDKNNANHLGSPNIGAIRNPTVLRTLNVLRSVINKMIDEGLIDPQETRLVVETTRVNNDINKRWAINKYNEERRDENKTIKNILQEYYPEKNINDDDVDKARYVLEQSEENLYGEDGKFQHLVKKYKLWLEQGCRCLYTGHIINLSNLLNGEMFDTEHTVPRSISFDSSDKNLTLCDSYYNRHVKKNMIPSQLPNYDHDVEIDGHTYTAIKPRLQKWEEKVERLSKNVTFWKNKAKRAQTESYKNTCIRQKLLWQMEYDYWRNKLDRFKMKTTDLTDGFRNSQLVDTGIITKYALLYLKTLFRSVEVQNGQSTSAFRKIFGIPEKDRSTHYHHAVDAAILTLIPVSAQRSRMLKLFYEIDEMKRGGHEYSGLQFQLNKEIESCGIGKGAATIDQYIEDHVLVNYYKQDRTLQDKNGIRGKLHAETFLGAITQWNNEEIKYVKRVELKFKKSSLDSGFKSWDDLE

SEQ ID NO: 7313 - protein, 969 aa, unidentified
  REGION 1..969: note = Description of Unknown: Cas Enzyme sequence
LTRKLKKEIKNRIIFYQRPIESKKQELSFCELESHQIEVEKNGKKQLVTAGSRVCPVSSPLFQEFRMWQRLNDVVLTNTTTLEQYTLTQEQKEMLAAELSIRKELTKTAAIKLLVGKQTKAYDLNFDTLIGNETQARLVTAYLKILELTGHDKLDIKKMKAQDVLDAICKVFEGLGYKTEALNAEVVTGPEIYMQPHYKLWHLLYSFPGDNSRSGSAKLVQRVKEFFGFDNDEYAKVIADVKFPDGYRNLSAKAIQKILPFLKDGYQYDKACEKAGYNHSKRSITTEENEKRTLQHYLQPIPHNSLRNPLVERVLNQMISVVNGLIDEYGEEYGQFSEIRIELARDLSKNAESRRRMTQDIENNKNERAKCRQELIDQLNERGYHVTYVSENDILKYRLYKELAPLGFKTLYSKTKVDLVDLIIHRKFDKEHIIPKAKSPSNAFSVLTVELSSINEEKGDMTALDYVKWKYGEAEAQQYIARVNDLFKLKAISKAKKDNLLRTAADIQDEPLTRDLGLTQYINRKAYELLGTITRKVVPTTGSITSRLRDDWQLVDILQELVWDKYDKLDLIDTYEDKDGKTVRKINEDAWTKRNDHRNHAMDAITVAFTKPAFIFYLNSLNSQGEARNQLLKMRHDYLHRDKKGNWRFNEPMPLGELRAEVKNQLERINVYQKPATSAVTPNLNISKSKKKKDGNRQIQLTPRGKLHDDTYYGSIMENGVKVFTKRVEVNESLNVDDVVDKGVQRILQERLREYGNNPKEAFTNLEENPIWFNREKGICIKRVIVRTKLKDARAIHKKHNNKGELLLDKNGKTQSADYVRTNNNHHIAIYEDAQHELHEVVVSFFDAVDSAIQGNPVIDKTYNADKGWRFLFSLQQNDCFVFPDEATGFNPADIDLTAKENYALISPHLFKVQSISEGDYLFRHQYDATKNNNAKLKNMTWKRVRNPNGLKGVVKVRITKIGHIEYTK

SEQ ID NO: 7314 - protein, 1388 aa, unidentified
  REGION 1..1388: note = Description of Unknown: Cas Enzyme sequence
MKRILGLDLGTTSIGWAIVDEAENKNESKIIKLGVRVNPLTVDEKINFEGGKPITTNANRTLKRGARRNLDRFQLRREHLIKELKNAKLISDNTALTEIGTDNTHQTLSIRAVAARDRVSLEDLSKILLTINKKRGYKSSRKSRDDNDGVAIDGMAVAKILYNEKMTPGQYAYYLLQRGKKFIPDFYPSDLKTEFDTIWTKQQQFYPEILTQELYQNLQGKNKGQTWTICSKPFQIEGIKLKGNKTEQKLTRYNLRVDGLKEKLNIEHLAIALQEINNNINGSSGYLGKISDRSKVLYIDEITVGEYLYEQIRKNAHTSLKNQVFYRQDYLDEFEQIWETQAEFYPVLTQELKTKIRDKIIFYQRPLKSQKGLLSFCLFESWEEEYYNKIKQKNSKRTIGQRVVPKSSPLFQEFKIWQNINDLEFKYVAKSKGTKNSYDDTSAFKLDDEDRALLFAEANLRGKLSSTEVLKLLGLSSKEWKINFKDGIQGNTTNEKFFNIYQEIAAREGYGLDWPKMTAAEIIEELKAIFPVIGINTSILEFDATLKGNDYSKQNSYELWHLLYSSGDDTIVSEEDRLIYGSVDVNLKKNLHKKYGFAPLYVGMLANISFPDDYGNLSARAIRKILSHLKQGLNYYEACDAAGYNHSNSLTKEENENRELKERLEILGKNSLRNPVVEKILNQMVNVINQIINDYGKPDEIRIELARDLKKSAKERLETTQYIYSATKINLDIAKIIQKQFGFTPTRNDIVKYKLWAELAPRGHKSLFSNEQIKLNDLFSSKIDIEHILPKALIYDDSFSNKTLAYRNVNLKKANRTAIDFITQDKNADLEVYIERVESLYDKGKGSINRGKRDRLLKSAKDIKEGFIERDLRNSQYIAKKARMMLLEVFKVVTPTIGKITNKLREDWGIINVMKELNLPKYRALGLIEIEERKNDKKIEKIKDWTKRNDHRHHAMDALTIAFTTDNHIQYINNLNARRDETHDKHIRIRNTENLITEKVEDDKGNYKRKFIKPMPKFRAEAKKNLESILVSFKAKNKVVTRNINKTKTEKGFNTSLELTPRGQLHEATIYGQSKRPRSNPTSINKNLTFHAIQNIIHKGQRNLLIKHLNAFGNNPKIAFDVKTLKKQPLLWNEKLLKEVICFEEIHTIRKSVSPSLNIDKIIDQGIKKLLKKRKQEFNGNAKEAFSDLDKNPIWQNKAKGIAIKRVTITGVANAEALHNKKDHLGKPILDDNDEKIVSDFVSLGNNHHVAIYEDEKGKLQEKVVSLYEAVERVSQKLTAVDKEFNAHLGWQFQFTMKQNEMFVFSSEELNLTETDLQDQKNSFLISKQLFRVQSISTKDYRFRHHLETTADNDLDFTYKRIRSPEKLRDFIKVRINHTGSIVQIGEY

SEQ ID NO: 7315 - protein, 1005 aa, unidentified
  REGION 1..1005: note = Description of Unknown: Cas Enzyme sequence
SDFIKSLWHLIYSVTDKQEFEKALGTFANKNSLDKESFVENFKKFPPFESSYGSYSEKAIKKLLTVMRVGTYWNEDKVDANVKNRIVSILERLETIDFDKEKLDGIQDDDIPKRLLKSFIKIKSSPLSGLNTYQACYAIYNRHSEVGDIKQWKQPSDITAFLHEFKQHSLRNPIVEQITLETLRVVRDIWEYYGTFKMVDGKKVYDNLFDEIHLELGREMKNDKKTRERISQSISKKENTNERIKALLQEIKDDPEIRDDVRPFSPSHQEILKLYEDGVYENPNVDYKKVSSDEIEKIRKNTSPTKSELIRYKLWLEQGYISPYTGKPIPLSKLFSTDYQIEHIIPQSRYFDNSLSNKIICESAVNDEKGNETAYSFLKNSGGELINLGQGNSVLLFSLENYENHCKQYFKNNKSKLAKLLSEDIPEGFINRQLNDSRYISKLIKGLLSNVVREDGEQEVTSKNLVPVNGAITSKLKQDWGLNDKWNELIAPRFKRLNEMTNSQDFGFWDKNINAFRVQVPDDLAKGFSKKRIDHRHHALDALVIACTTKDHTNYISSLNTERHNHALVAKLRKVEKIKIKNGKTGEIKTINAAKAYHQPWQNFTIEAKKALETTVVSFKQNLRIINKTNNKTQQWVKKNGELKKELIKQTKGQNWAIRKSLHKETVSGKVLLKREKGLVTINSAINSWEMIVDKSIKNSILEKVTAFNGDLGKTKKYFKNTPLKKDDEPLNKIVIFENIEAFATRIELTEKFTRKQLESITDTGIQKIFENHIKNYQDKKGMERFDLAFNSDGLDDMNKNIQALNNGKPHQPIKKVRIYEVGNKFSVGEEGTKSSKYVEAAKGTNLFFAIYWDEEKKKRNYETIPLERVIAWQKEEAFLPKEQRTSVPIDTTKGRFLFSISPNDLVYVPSDEEINNINLVNFSSLNNNQICMIYKMDKSSGKECYFTRFDIANLIHQYSAKSKFGELGSQNKLQTTMDIESFKIVDRCWKLKTDKLGNIINIIK

SEQ ID NO: 7316 - protein, 1157 aa, unidentified
  REGION 1..1157: note = Description of Unknown: Cas Enzyme sequence
MNAKGKMSSATAADLELASDVGHSSIGWAVLKAHTGQTPTLLGCGSVIFPADDCLASERRGFRRQRRHIRATRLRIARMRRLLAHLGALTTEQLETPGCAWPWLLAARVLRGGKKLTWTELWDVLRWYAHNRGYDGNKGWSKHHTASDEDSDKEKRAGELLTAFEKRHGRAGTMAEVFCDVLKVDPLGVVKSSMQRVRNLGAAFPREGVECEVERILRSHLGLLTNLDERLINALMRDHTALPGPDLRLPARYGQRLNDGSLSPGGLLFGQLVPRFDNRIIARCPITFERVYQIVKAETGDEELAKHEAEKQAKVPGVDCVEFHRFRWAMELAKIKVATGDARAPRNLTATERQVVNVEMEKRGYLSPGELKKAVRPQTGGAPDNLEQILTHPDAERALVLDPVRRYIHSDQLVSTLWQVLPERLQKRLRGQWRRGHAITVAELLNACGESRAAAEALCQRHLDAQNTKKRKKDEPLTREALLHTKLHVQPPNGRAPHTRKVMREVVDFVFSTDRHPAEEGGPLYRSEAIRHAQLQRALDEQTNNHLVRHRLKLLERLHADLLREYAGDDCARIARITIEVNRDLRELSGKTAQEQAKLQGQQLAHFKSVAKKLAEAYEGLGVHVGPGLIRKGRIAEDLGWTCPYTGKPYDALDLLHRRVDKDHIIPRTDRASDSLDSLVITFSEINKMKGKRTAVRFVEEFQGQPVQGLPQVMIKPLSAYLKDVAALETFKGHDDDQRRKKNRKRLLLLRDYVEKEFTPGDLTQTSQLVRLGAQALQKHYVGLEKQPVITSLPGSVTGAVRKSWNLIGCLATANPQVLNPDDLDEDGRPKVRTKTEIRGITHLHHALDACVLVFASHFLPRDGGAWELLVKRRLNADEQRRARTLFGSHIEITQDGELRLADLTPALKAQICERLKERRVVQHLPADLSGLRCKETVWRVFDPADSHPNSKRMARWLAQKKVAVPAPDAKTALIICRKRRAADVAGEESAGGKVFRETKTWRWVYDIKDKSALLGLAPEGDAAAAKLKRIKAVKVLGDNFGLALDPEPTLIRPHKVWHQLDALRKANGGKPVRVVRKGTLIRVVRAKSAKVDYRGVRMVRGTTLNQRAGFLLDLSPADQILYRGQPECFQNVSVATLMKCGLEVVKSPLCGVTPSQ

SEQ ID NO: 7317 - protein, 1029 aa, unidentified
  REGION 1..1029: note = Description of Unknown: Cas Enzyme sequence
MSYVLGLDLGPSSIGWAAVNIDKDGNYKGLAQIPDGKNSIPAIGVRIFPAGVDNINQGQREEPKNKKRREARSVRRMLRRRRARRLKLLSALTANKLMPPDNEERQEELNKNPYELRAKAVSEKISLYEVGRIFLHIAKRRGFKSNRRQAEKDTEAGLIKEAINRLAQEIGDKTLGQFWAAKLPKPKEIPLEAIRNRRSNYHWIAQRQQYQDELNKIWQKQSAFYPDILTDRLKNLLFEIIFRQIDFELSNMKKRRVIGTCTLIAGKPRLSMSSRKAQEFRLLQKINDMKVYRKSREIEFNRQKLYEELMVSKDRDFKQIRKLLDIGEDDRINLEHEKNKKLIGNQIDAILAGSKFFRKKAWLKLSEQQKEEIWKEFQDYLRNSDITAEQLVKKFKDEYGLEFGDIKAIEKLAEPKGNLNYCEQAVDKILPYMRQGKNLYEAIEAANFVKGWTQQKFLPIPSRDNGINIPNPIVTTVMFQVRKVINALIREFGKPGKTIIEFARELKASKNLREEIIEEQSENQNEREQCAKRIREYHRWDEDVQVSATDILKYRLWEQQNGFCPYSLRKIGIEQLLGTETEVDHILPYSMSLDNSMNNKVVCFSSENQTKGQNAPIDWLGENSERFRKIAEAMEKGIFNFDKAKKERFFVHNEEIAEKYTPDRLLQDTSYIAREVRSYLKRLYPASEAEKCVKTTKGGITAELRKIWGLNAILRDGELGPKNRDDLRHHAIDAAVIAITEPGMIKKITDKLKDNWPRRPSRTIVDEPWKDFGLELAKAAEKINVSHKVLRKVKGALHKETNYWKETNGLHAGKYITRKELNGKFTPDWAEQICDEEIKRLVMDRLTEYENDAKKAFAEPLYLPNDKDKQIPIRKVRVWQISSNMMQLRPNIWVEPGSNHHIEIFETKDKKGKLKYEGKLVSMYEAAQSVKNKQPIVQKKLESDGKFLMSLSQNEMILLKLDDGSEVLHRTQKMSQSKESISIIFRPHTYGGKLSDYDKPPLIHRSSPSTLSGRKVVVDPLGRIRWAND

SEQ ID NO: 7318 - protein, 1029 aa, unidentified
  REGION 1..1029: note = Description of Unknown: Cas Enzyme sequence
MCTRVLGIDVGTNSVGWALVRLGDDPDVEAMGVRIFHEAVEPKDREPKNSKRRAKRLLRRQIRRRAQRRRAITTICQKHALLPTDPEELHRLQCDYERNPFRLRAEALDRVLALHEIGRVMLHLGAHRGYKSNRKALLNRAFSDPEIREAAESLEQERKARAAAGKLRKEEQREEEEGKVLQAIAALEREMQEWGSRTLGEHLHRQMLDPAIGRARRSATDTANYTREMVEAEFEAIWESQRRFHAELSDKLKAQLYRAIFFQRPLKIRKRGVEWCPFEGGRKRAFKAQVISQTFRAWQQANSLEWRPSEIGAQWRKLTPEEIRVVAEALLAKAEVKFTEIRKLLKHPKETEYNLAIGGRESLKGAETNVRLRSILGDAWDGMDDLEKDRLVHELVHSDSMDALATRLRKSWGFDPKTVYRLITTDLPSGTASLSAKAMRKLVPEMQRGLRYDEACKKIYDRFGPDIKVNLQAKKVPMPPERANPVVHRALVEVRRIVNAVIERYGKPDAVHVEAARDLKLTKKQRDSLQQHQRRNELANQEAREQFQRLHPGREPSRADLEKYRLWKESNGLCPYTGRPIALEELWTGSVDVEHIIPLPRCWDDSFRNKTLCDATENRLRKKNKTPREAYSEQDLERILQRLESFSSMPRGKKNLFKLEWNEKAEESFTNRQFNDTTLATTLARRMLEPIFGREKVLCLPGKLTAFLRRHWGLETVLGGEEKNREDHRHHAVDAVVIALTSLSLFQRLATFSGRYGSEHLEHSISKVEPIPNLRDRVLSMLEELVVSHQTTRRARGGFVEDTAYGKVAPGQYVYRKPVGSLSDGEIDRVRDLGLRRRLKAIGSKALQDMAKKNPTKPFVYFDRFGRECVVRRVRLLANASDRSMIPIGPGHYASASNHHVAVFEVGGERRYVVASLYEVYQRLRRGEPVYDRSAIPGGRFLFAWHPNDTVVVEGRPEKYYRVVKFSDYDPERHRKVYLLVRPVHRAMETKQKQSPENARENADVLCNSPGTLLLVSGPVSISVLGQVR

SEQ ID NO: 7319 - protein, 1049 aa, unidentified
  REGION 1..1049: note = Description of Unknown: Cas Enzyme sequence
VYNSAHLMLVKGEIMSEQPFGEFVLGIDLGTNSVGWAVVGLVDGEPVKLLRAGVRVFDAGMEGDIESGQEQSKNLKRREARSHRRQLWRRARRLTKTFNLLRQFGLLPSGDASTPEKRQDLINDLDRTIRSSDWFKAKASSRAYAEPEQTLPYVLRAAALDEPLQPHFLGRALYHLAQRRGFLSNRLKPAKKDDDEGAVKKGISELRKAIEDTHARTLGEYLAHVSPTERRIRGCWTARSMYEEEFEKIWAAQASHHPTLLKEEQKKQVRQALFFQRPLWFDPDTVGQCELEPGERRAPAYLLTAQRFRLLQKVNDLQVEEPGKTPRYLTPEERAKLSDTLELQGDLPFHKDRKANGRVLPRVRTLLGLPKNVSFNLQRGGEEKMPGNRTTSEFYAVFGERWLELSAEEHNQAILDVLSIKKPEALKRRALGHWKLDEQAADRFCEISLEPDYMNFSRKAIENLLPLLEQGIPLQTARKQIYPESFKAGDAKPLLPPVEQALTEIRNPTVMRSLTELRKVVNGVVRRYGKPTYIRVELARDLKKSKKQRAALSKINRRNEKARGKAAEEIVKSDVGIKEPKPEDKRKYQLAEECHWQCPYTGKTISIQALFGPEPQFDIEHIIPFSRSMDNSFQNLTLCYVPENRSVKGNKTPYQAYSGEPERYQAILDRVKKFSGERAMMSAKLKRFTMDDDELEDFLQDFRKRQLNDTAYAARLATRYVSLLYGGLADAEHEQRVFTPSGQTTAYFRNLWKLNAILNDGPSTDGGRVAKSRGDHRHHAVDAVVIGLTDAGMVKRLSDAAQRASSTGRKRFAALQGPWPNFVDTVREAIDRIVVSHRVSKKVSGALHEETIYSSAKADGSVRVRKPLAALTKNEVEDIADEGVRALVLSKLGGGDPKKVFASEENLPYFKPSEGRRIPIKRVRIKKVVPTFPLGNGRTARHVATESNHHIEIFAELDQQGKEVEWDGIVVPMHEACRRLRAGEPIVKRDPGPGRLFKFSLGQGEVVECDGKQEGRSLFVFRKVTQLSPRGTRSTENNEICACNECAEE

SEQ ID NO: 7320 - protein, 1095 aa, unidentified
  REGION 1..1095: note = Description of Unknown: Cas Enzyme sequence
MTRYTLGLDLGCNSVGWAMIARDGETFDDGSRIMAGVRVFPEGLDTRKDKVGTPPAQHRRLMRSQRRIHRRRRQRRRAVLRLLCAHGLLPKDAQERHALLASNPYAPYLLRAKGVNERLITPYEYEFGRCLYHLCQRRGFKSNKKIRKTEDKAKEDAQTEKEGDSLQARLKREGITLGQYLATFVPAEQSSAAHSETTGRKAWLRNHDHDTRYHHHTTRQMYKDEFDTLWATQSKERAKEMGDASPLGESLKQEIGRAIFDQRRVWWPLDSIGRCRLTGETRCPKAHWLGQEFRLLQEIKNLTILNEATGEVRPLSAEEARTLASSLRTCKFMKFTEIGKVLRLGKEWRFRSFETDARRTGLNGNVVETGLRSGSLASWYDALPDERREEVYETLVAIEKDEHKNRAYGIDEVSLRTKGHSWGLVPQQVDELVALQDTLPDGYHEYSLAAIRKIVPFLEEGMTVDKAVAAAGFTPQERATENFLPPVNKVDEYLTNPRVRRTLSEARKVVNLLITKHGKPDEIIIEMAREMKQSRKHREEILKRQAKLAQLNKDAAAELEHLGQPVNSESRLRYRLWKEMLEACNGLCRSPYSDRVIALADLFGPNVDIDHILPRSKTLDDSFVNKTLCFRDENAAKGNRTACEWLGKDSKDYEALRERVKHLPLSKRRKFLQETVSVEGCIDRQLNETRHTAKAAVAYLGVLGCPVRCVQGYTTAPLRRYWGLNKLLGYSETSKNRFDHRHHAVDAIVIALTTHAHLHRLCNRIESGRESDFPLPWDGFREDVAELMDALAQGSEIAVSHRPSRKVAAPLHDEMGYGPVRNMSGNLVKGVYSTRKKLTDLTPAVINGEDIADPEMRRIIRATCVKEGLAAQSTAEEGWLCDGTYYTVKAKPGKKLAAANPKMKSGVPVKRVRIRVRSNTAELVRTDGGREAKFVLPDDKHHIAIYRKPDGKWLGVAVSAFEAHRRLRKQRALFKKTRVRKDLIVNRSPINGAEFVTCLCKNDMVRLKNLKTARRDLYRVVSASVEASGGPDMWFYHHTVVDRPDAKEAAKDDRLKQLRDELLETERAVRVRNWPELMDKRAIEKVSVNPIGEVC

SEQ ID NO: 7321 - protein, 1062 aa, unidentified
  REGION 1..1062: note = Description of Unknown: Cas Enzyme sequence
DTVEIVADSGRSRSESVLGLDIGAASVGWALVETQDGTPCRLIAAGARAFAAGVEGDISAGRDESRAAKRREARLRRRVLARRRYRLTKLAGILQSGGLLPAAELDSPEAVDAFFTELDRELFTQDMRARDPHLMHYRLRARALDEKVTPDEIGRAIYHLAQRRGFLSNRRETARPRRDDDEGVVKKEIGELEQQMRDAGSRTLGEHLSKLDPEKKRVRDQYLSRGMIECEFGAIWQAQAAHYADLMTDELRTQIHYAIFHQRPLKSPKRFIGFCELERDRRRAPLALLGAQRHRLLQKVNDLRFTTKDGQTRDLTPEERRKLSQALEARAEMTFGAIRKLLSLKDGRFNFETEGEKGLIGNKTAARLAQVFGDERWEALSPAQRDQVVEDLRTIHNPAARKRRAMKEWGLDDEGAARFAEVRLEDGHHSLSRQALSRILPLMEQGTQYATARKACYPDRAEGRPRDLLPPVHEVREVRNPTVQRALTEVRKVVNAIVRKHGKPSWVRIELARDLKRNRKQRQDLQARNAANRRDREQAAAALLQERGITKPLRSDTEKWLLAEECGWICPYTGRQISVEALFGDAPQFQVEHIIPFPRCLDDSFLNKTLCHVEENRRKANRTPWEAYHGSDQWDNIISRVRSFRGGGRGRAARNPKLRRFQMEKVESLDEFTSQQLNDTRYASRLAVEFVGQLYGAGADGVDASGRRRVQAGRGQVTADLRAEWLLNSILGGGEKTRDDHRQHAVDAAVVALTDPGTVKRLSDAAARAESAHRRRYAPLDPPWPTLLDEVRDAVNAMVVSHRVSRKVAGPIHEETIYGRPRPDEEGRLHVHVRKPINSLSPKDIASIVDPAVRQCVQEKLAALGESDPAKAFKSPDTHPTLRSRDAREIPIHKVRIRRSDATRQIGLGAYAREVQLGNNHHVEIVEAMDAKGRLRWEGVVVTTYEAMRRLKEGEPVVIRDHGPGRRFLFSLAGGEVIELDEREGGEAEGGAVPARLLYVVRTIALSGSRVSLAFAPTADARRKEDIIRAGDWGRADVGPLRRRNCRKVAITALGEVRNAAD

SEQ ID NO: 7322 - protein, 917 aa, unidentified
  REGION 1..917: note = Description of Unknown: Cas Enzyme sequence
PYLLRAQALDEKLEPFDLGRAFYQLAQRRGFLSNRKATKKKDDDKGQVKQAIGELAKKIEETGARTLGEYFSRINPEEERIRSRWTARQMFADEFEKIWTAQSRHYPEILTDDFKKQVHHAIFHQRPLKIQHHLIGKCEWEKNRKRAPMAILPAQRFRLLQQVNHTTVTMPHPDGEIRPLSPEERASLIAVLETQGDLKFKAAKKIIGLPQNCTFNFESGGEERFLGNRTAAKLIKVFGENRWQEFSERDRDRIVEDSLSISKEEALARRALKVWGLSGEKAEEFADLELEPGYARLSRQALRKLLPLLEQGKAYMEAAHEIYGDRPPPQARDFLPPVLDKEALSELRNPIVHRALTELRKVVNAIIREHGKPAQIRIELARDLKKTRKQREQIWKKNRQNQKGREKAAEQIIREAGIQNPTRADKEKYLLWEECCRICPYTGKTINISQLLGPTPQFDVEHIIPFSRCLDDSFFNKTLCEHEENRSRKREKTPWEAYGAHSEKWEEIIQRVKRFQGEAAQAKLERFLLKDLESLDDFATRQLNDTRYAAKEAKKFLGLLYGEESLKRVQAGRGQITAYLRNEWDLNRILSDGGDKSRDDHRHHAVDAVCIALTDPGTVHALSKAASRAFSERRRRFGRLDPPWPNFYEQVKESVGQIIVSHRVSRKVNGPLHEETFYSPPRLDEKGKSCVHVRKRLEALTAKDIEVIVDPVVRQRVQTRLQELGGGDPKKLFAIQENLPWLETGDGRKIPIKKARIKKSLAPFKIGESNRERYAATDSNHHVEIIEVKDQKGKVKWEGQIVSQMEAMRRLRAKESVIKRDHGEGKTFVLSLSGGEVIEIDEENKSRGLYVIRTLTTVKQGGHEYPNLYFVLLNDARKIKEIKSNKDLRTALLEPLRKLNCRKVMIDPLGEVRKAND

SEQ ID NO: 7323 - protein, 1100 aa, unidentified
  REGION 1..1100: note = Description of Unknown: Cas Enzyme sequence
MLPKQLSRGKCMDTQPSQDFVLGIDLGSNSLGWAMIGLQDGQPAKLLRAGVRVFEAGMDGDIESGQEESRNLKRREARLHRRQLWRRARRLTKVFKLLQSYGLLPPVAPPFRAAPADSADGGLKPTATPEQRQDSLNELDRQILASVWFAAKKASGGYPEPEQTLPYILRAAALDEHLEPHCLGRALYHLAQRRGFLSTRKKAKAAKEEEESVVKQGISELRQKMAEAGARTLGEFFARIPPSEERIRDRWTARAMYEEEFQQIWNAQAKFHPELLTDERKKLLFQAIFYQRPLKDQPELIGHCELEPEERRTPAYLLVSQHFRLLQTVNNLTILPPGEPEKELTPADRAKLIEALELHGDQTFAQIRKLLGRLPRAYTFNLERGGEKSIRGNRTNSDFYAVFGERWHEMSPEERQRAILDVRSIQKPETLLRRAREYWKLDEEAAQGFCDISLEPDYLNLSRRAIEKLLPLLEDGATYGEARRLLYPERFQAVEPLPLVPPVQDALTEIRNPAVTRCLTELRKVTNAIVRQYGKPAEIHIELTRDLKQPKKRRQDRADRMRANEKARKAAAKRIVEEAGISDPSPDDIRKVLLADECRWECPYTGKSISMRGLVGRDSQFQIEHIIPFTRSLDNSFLNLTLCYVEENKVKANKTPYEAYSGDPEGYERIRERVKRFQGDKGIVAQKLRRFLMTPEQVEEFLAGFTARQLTDTAYASRLAADYLGLLYGGVVDQAHTRRVQATSGQVTAYLRNLWLLNTILKDGETTHGGYATKPREDHRHHAVDAVAIALTSPATVKQLSDAAQRAPFERRRFASLQAPWPNFVDSVRQEINRIVVSHRVSKKISGALHEETIYSAPVAAGFSPPGAALKGGATDVRHVRKPLASLTKTEIEDIVDPGVRQRVLEKLEEVGGDIKKFTKEENLPFLLAKDGRRIPIKRVRLRKKTPTVTLGEGRRAREVTPGSNHHIEIFAEFDEHGEEVEWDGQVVSMFEAHQRMKAGQPIVQKNHGPDHVFKFSLAQGEVVECDDKQQGRSLFVFRKVTQLTAGGIQIGFAPLNDARKAREMQVSRAWLWTTPNTLGERHARKVLVSPLGEVSEAHD

SEQ ID NO: 7324 - protein, 1072 aa, unidentified
  REGION 1..1072: note = Description of Unknown: Cas Enzyme sequence
MTPSINPNLILGLDLGANSLGWVLLDAPDGKPESVRDAGVRVFEAGVNLLEKGEKASRSLDRRQARGRRRLLDRGARRRRKLLHALQRAGLLPAGELHGHLRPNDPANPVSLVFLDTAADPYHLRAQALQRKLELFELGRALYHLARRRGFLSNRKVPRKEEEKEGVVDKETRALEAEMKAAGFRTIGALLASLDPHEARRRGRYTLRKWFEDEFEAIWAAQQPHHPETLTQALKKSFFKIIFHQRPLKSQTRLIGVCELEKRPVSVVKKLKNGQDRRMTVYAGPKRAPMAALPAQRARMLQTLNDLRVVEYGAERPLKPEERSRILDALDRADELKLTTLRSKTLLNLPRFAKFNFEAGERETIPGNDTAAQLRKAFGEKWDAMTPDQRNLIVSDLLSIQKDETFVKRAAIYSGKYSLTDEQRKALDKFTPEDGYHRLSLRALKKILPHLESGLSYSEARQHAYPGCAAPDALDSLPAAAPLRNPIVQRALAELRRVVNAIIRKYGKPGTIRIELARELKKTQKQRDEIGKQNAKNRKARDKAREAVVRETGQPNPTSYPIEKYLLWEECGGICPYTGKSIPLSGEQGLFGGHPAFDIEHIIPLTRSLDNSFFNKTLCCVNFNRNIKRNRTPWEAVGEAAQAGDPAMKQQWANMIDSVKRFKSDKDMRDAKLERFKFKTVPGEESFLEEFSTRQLNDTRYASRQAREYLGLLYGAEAVKRVQPLTGQVTAYLRSAWKLNGILSGDGGKSREDHRHHAVDALCAALTTRAVVHQLHTAAGRGVNVFRPGTFPAMEEPWSGFIEHARRAVTDIMVSHRVSRKVSGPIHQETLYGEITRPDTAATQKPERAAVLRTPLIKLDEKDLDDIVDETVRKTVKDHLAKLAADHGIDITKAVKLLENEDNLPFLTAKDGRRIPIRKVRVFVRAKPFSIAGGDHQRLVISGNNHHLAVYEGRNKKGETIWQEEVVSLKTAMERARKHEPVVAPKDKDGNKLLFSLVIGDAVEMEIEGEKSIWIVRSISERDFRFKPPHDARLAKDLNKEKSWRICSIGSLQSGKCRKIHLSPLGEVSSAK

SEQ ID NO: 7325 - protein, 1010 aa, unidentified
  REGION 1..1010: note = Description of Unknown: Cas Enzyme sequence
ACGSRVFDAGFEEGDFAAGKENSRSAARRQARQARKLTNRRLRRQRKLFNLLVKAGLLPPGEPAQVIPALDAALRTKYLAALPKDSAERRRLEHVLPYRLRALALTEKLEPFELGRALYHLAQRRGFLSNRKAPPKKDEKPGEVKEDITRLEAAMKAAGAETLGQYLAGLDPEQERIRRRWTSRAMYKDEFARIWDAQTRHYPAILTAELRKRVERAIFRQRPLKNQKHLIGTCEFERGRKRAPWALLLAQRFRTLQQVGNARIVDRQGRERYLTVAEREALLKVLGREGDLSFTKARKFLNLPAGHAFNWEAGGEDRFMGNRTNARLAEVFGERWWALTDQERDEVVEDVLSIQKDEALQRRGQTRWGLDVEAAKKLGALALEDGHCALSRRAIAKLVPMMADGVPYATAVKEVYGERRTDPVDLLPPPAPTYPHLRNPMVLRVLAELRKVVNAVLRRYGKPAAIRVELARDMRRSKKQRADSWKQMRQNEAARKKAAARIVAEAGIENPSRADVEKVLLLEECGGYCPYTGRGISISALLGQNPQFDVEHIIPFSRSLDDSFLNKTLCEVKENRDHKRNRTPYEAYAGHAEKWQEVLSRVKRFKGSARDEKLRRFQMETLESLDDFASRQLNDTRYATRQATDYLALLYGGLYEVAGRRRIQASKGGTTAYLRNEWQLNTILGDGGAKSRDDHRHHAVDAVAIALTEPSAVKMLADAAARAEREGRRRFGRVAEPWPGFLADVRQAVEAMKPSHRISRKVNGPLHEETNYGPSRERNAEGRPASFAVRKPIESLSANDVKLIVDDRVREAVKAKLDELGGDAKKAFADRKNHPFLESRRGRRIPIHCVRIRRAESAITVGEGARLRYVASGSNHHMEIFEVTDKKGKRRWKGRVVSRYEAMRRQATRRPVVDRSPPDGGRFLLSLAHGEIMELTSAGRGPELYRVRKVSLSKSGSIEVAAARLTDARLKDQIIKSGHWLRISSLDNLAAMACRKVIVTPLGEVRYAND

SEQ ID NO: 7326 - protein, 1082 aa, unidentified
  REGION 1..1082: note = Description of Unknown: Cas Enzyme sequence
MSDPLPSDSVLGIDLGSNSLGWALIARENGEPKGLLRAGVRVFEAATEGDRESGHEESRNKARREARLHRRQLWRRARRLRKVFGLLQQCGLLPPGKCSTPEERQDFLNGLDKQILASQWFAAERASGDYPEPEQTMPYILRAAALDKPLEPHFLGRALYHLAQRRGFLSNRLQTAKKDEDLGVVKQGIAEIDKALEESNSRTLGEYFARRSPAAAPLDEREKIRRLWTARRMYEQEFERMWVAQSKHHPDLLSEERKKQLHQAIFYQRPLRFDPDVIGMCQLEPGERRAPAHLLISQRFRLLQTVNNLRILPPGGTEMELTSEGRQKLIDKLEQEGDLTFAQIRKLLCLPKGSAFNLERGGEKSIKGNRTFADFFAVFGQRWLGMSAQERDQVVEYVYAFEKPDKLKKAAKKRWALDEVAAEEFADISLEPDYMNLSRHAMEKVLPSLEEGMTYAEARRRLYPEQFEAKEPELSLPPVERALLEIRNPAVMRSLTELRKVVNAIIRQHGKPAEIHIELARDLRKTKKQRQGISDRMRDNERSRKAAAKRILEETGIKEPSPEDIRKALLAEECHWECPYTGKTISMRKLVGHDSEFQIEHILPFSRSLDNSFVNLTLCHVEENKTKSNRTPFEAYTGDAERYERILTRVRKFSGNRGIVAEKIRRFEMKPEQLETFLADFSSRQLTDTAYAARLAKQYLALLYGGLSDEQHSQRVFGSPGRVTAYLRNLWQLNTVLRDGHTSDGGMVTKARTDHRHHAVDAITIALTSPATVKLLSDAAQRAPLEHRRRFASLQAPWPDFVDSVRDVIDSIVVSHRVSKKVSGALHEETIYSRPAAVVSVKSPAKKKRRSDGAATEGKEVRVRKWLHQLTKSKVEDIADEGVKQRVLAKLGDGDPKKVFSNPDNLPFFETANGRRIPIKRVRIKKAVPTFSLGDGRTARHVTSESNHHVEIFAELDVEGNEVEWDGVVVSMAEAYRCNKHGVPVVQRNHGPQREFKLSLAPGETVRCGESQDAHGLLLVRSITQLSAGQIVIGLAPVNDARKKAEMQKSKNWVWKVPDTLRKLNPKKVVVSPLGEVSEAHD

SEQ ID NO: 7327 - protein, 1072 aa, unidentified
  REGION 1..1072: note = Description of Unknown: Cas Enzyme sequence
MRLIYGLDIGTTSIGWAVVRAEENKQAGRLEALGVRIFPEARDPDGTPLNQTRRAKRTMRRQLRRRRDRRRSLNELLTAYGLLPAFGGDEWGASMTNDPYALRAKGLTEALTPHELGRALYHLAKRRHFKERDLAEVADSEVVPEAHEGDDAKARSKAKAAPKEAARDDETKSTEARKHLAAILTKTGETLGQHLSARAPNEKRRGEHATRAIVEEEFSRLVAAQKAHHTILKDAKFHGAVQEAIFMQRPVFWRKSTLGKCRLMPSEALCPKGSWLSQQRVMLEKLNNLSIAGGNARRLESDERAAILDVLQTQKSMSWSSVRKALEPIFKARGESTKYLKFNLEAGDEKGGLKGNSVEADLAKILGSRWKSHSRKQELRDFIPAKLWEADYGEIGTQRVVIRPEKERVTRRKMLAQILMDEFDVTKTEGEALVKLHFPQGWESFSTEALKRILPKLEQGERFGALMTGPDFAAWRDETFPERDQPTGEILDRLPSPRAERRATFEQKEEATRIKTIRNPTVVRVQNELRKVVNNLIGVYGKPDLIRVELARDVGKSKDEREEISKGMRKKEGMRKRARADLISNGIADPSDADIEKWLLWKESSEQCVYTGDKIGFADLFSGNPRFEVEHIWPRSKSLDNSFGNKTLCRKDLNLAKGDRTPFEYFQGRPDDWQAAKDRIWKMTGKDGINKGKANRFCAEAMPEDFAARQLNDTSYAARQAMTFLKRLWPDVGPTGRVYVQAVTGKVTAQLRRRWGLNHILAEDGEKTRADHRHHAIDALVIACADGGYTQKLSRYFEAESNYRRGRGQKPADAIVNPPWPSIRADAEAAVATIVVSHRVRKKVSGPLHKETNFGDTGEELTNSNGTYRLFVSKKKVETLSRGELDCIRDEGTRSIIKQWVDDHGGDPKKAFATYPLRGPNGPEIRKARLVAPQKLRAMAELKIGYASTGNNHHIAIYRMPDGKIEGAVISLMDAVKRVSRREPVVQRTGDDGRRLIISLSLGDTFYIPEGDRTGYWTVKSISGNGQVFCKPINNADASPAGVWGPSPAPLIKLSARKVSIDPIGRVRPAND

SEQ ID NO: 7328 - protein, 1063 aa, unidentified
  REGION 1..1063: note = Description of Unknown: Cas Enzyme sequence
MKKRTLGLDLGPNSIGWALVEEDSDQKGGCLIDMGVRVFTEGLDAFDTGKESSRNEKRRVARGMRRQTARRRKRRKEMTDALTSVGLWPSSKQERDHWMQFNPYELRAKAVGNVKLAPFELGRVFLHLVKRRGFLSNRKTDATGKDGEGLLHEIQENETKRVQSGHPTLGSWLNEKQKTQDPTNRRDDDHVRRRHLSRKQYQHEFHTIWKSQSGFHADLLTDGLRWGNLGPIEFPCKPIPKNDRSASQLQLFGIEGLLFFQRKMYWPTEVIGRCELEPKKRRCPIADRRFQRFRIWQELNNLRYVDPDSGRECQLSLPQRKLLFGKLWDVDKLDFSKIRKALGLLESVKFNFEKGEKSSLKGNATDKVAKGIWGKDWLHLDEELKDEVIEALTNPNLDDREFVNLASGKWGFNSEQIAKLMKINLPAGYGNLSLKAIKKLLPHLEKGLTYSLQDETNSALHAAGYFRRDQLKKRIYDFLPSPQVERSAPIGDIPNPVVKRTLTEVRKLVNAIIREYGKPDEVHVEMARNLKIGAKKRKEITAENEKRAKKREEIAEELREHGVLPNRENILRYQLWEDQNRQCLYSGRTISITQLLGDGGGVEVDHILPRSRTLDDAQTNKVLCFRDSNQAKGNRTPSEWLASSNPTQFEEIIQRANILLRSGLMPYGKYKKLIQKEVNTDEFVSRQLVDTAYITKVTGEYLRCLFDSDHHVLGLKGALTAELRWQWGLETILEQLPDSPAWTTREEMRPGEKNRADHRHHAIDAVVIALTNRSRLQSLAMAMADRTNQREGELLDEPWKDFRDTIKDRVSKVWVSHRVERKVSGALHEETQYGKTERPDWWVTRKPVETLKGNEIPNIRDPLIRDLVISKLKQAGIDVGRKAEVDPKRLKEVLADLKMPSGVPIRKVRVEKSDKTIRPIRTSKSETFVKPGSTHHLSIFEWEEKGTTKRDAVFLTMLDAIDRVKKGVALIQRHVPQENENIPTDARFVMSLSMRELVLMDVDGKETLLVYRTAATTTKQMIFAQHTDARRSSELSKFSFKPNTLCGRKVTVDLLGRIRNAGD

SEQ ID NO: 7329 - protein, 1004 aa, unidentified
  REGION 1..1004: note = Description of Unknown: Cas Enzyme sequence
MGRKILGLDLGPNSIGWAIIDEGTVKNDSSLVDVGVRVFNEGVDAYDSTKEKSRNETRRTARGMRRQTKRRVLRRKRLTEGLIECGLFPSDPQTQSELLSLNPYELRSRAIDPEAKVSLFELGRVFLHLSRRRGFLSNRKTDKPTKESEGLLHEIQQNESERVASGESTLGAWLNVKIEQFDHKNRLEGDHVRKRHLSRAQYINEFEAIWETQRNLHPAVFTDRLKYGSLRDATYPCIPKKREVKDQTLLQLYGIFGLIFFQRKMYWKTSTIGRCELEPKEKRCPIGDRRFQLFRILQEVNNLKYIDTETKTESTLTEAERLKLVKKLQSTEKLAFTQIRKLLRYPDSIRFNLEKGERGQLKGNRTDSIIASKKFYGDEWHELGELTKNSIVSCLLDPNIDEIEFVKRAKTEWNLDDSKISALLNTPLPQGYGSLSLKAIDKLLPFLEQGMIYSASTPEDSSLHAAGYLRRDQLRRRLFDFLPDPQRRKNTPIGNIPNPVVKRTLSEVRKLVNAIIREYGKPDEIHVEMARDLQMGKLKRDEYSKTIREREKSREKIAATLIESNQRPTRENILRYQLWIEQKHECLYTGRPISQSQLWGEGGGIEVDHILPRSRTLDDSQTNKVLCFRDVNGEKGDRTPYEWLGNSNPDRFDAIAARAMHLVKDGKMAFSKYRKIVQKELLNDDFVAKQLVDTAYITKATAEYLRCLFEADHHVLGLKGRLTAELRWQWGLESVLGELPDSPAWVEKSKLRPGEKNRADHRHHAIDAVIIALTNRSRLQELANYLKPHSNRRGELLDPPWVGFRDDVKKRIKSIWVSHKVERKVSGALHEETQYGATKEMNVWVTRKPVEKLTSNEIEFIRDPAIRKVVIKALHAFGIEFGRSKEIDKKKLSSAVAGLKMPSGVPIKKVRVTKPEQTIRPIRTSKSETFVKPGSTHHVCIFEKNVRGKKKREPVFVTMLEAVQRLRNKKPVIDRTCSDPDARFVMSLSSREMVLAEKDGVTRL

SEQ ID NO: 7330 - protein, 942 aa, unidentified
  REGION 1..942: note = Description of Unknown: Cas Enzyme sequence
PNKLIEFHSLLVVDVIEDEIKSKKGDVWYSVVLENGWIYRRSSKNPIYDWNGKRKDFIVTTELNDDGTIKTDKEGNEKRSFRSPGEDDWTLKMKKTEHDIVQSGKQVGEYIYDAMLKEPSQKIKGKLVRTIERKYYKKELELILNKQSEFHPEFSNEETYNQCIRELYCHNQAHQLELSKRDLIHLLIDDIIFYQRPLRSQKGTISNCSLEFRKYKSKDGVEQVQHLKVISKSNPIYQEFRIWQWIYNLSIYTIDKDENVTSSFISNADDCEALFEFLNNRKDIEQKPLLKYLLEKKGFKGKAASSEIEKYRWNYVVDKKYPCNETRAILLTRLDKVSGLSVDFLDRDKELNLWHIIYSVTDKGQYEKALKKFAIKHSLNVEEFFDAFKNIPPFKSEYGTFSEKAIRKLLTLMRIGKYWKWDNIDTPTQKRIEVLINGEYEETISDKVREKVKLLQHENQFQGLPLYLAQYIVYGRHSEASDAVKWNTVSDLNQYLKDFKQHSLRNPIVEQVITETIRVVRDVWEKYGNGQPNYFDEIHLELGREMKNPKNERERMTKRITENENTNQRIKALLAELANDTSVENVRPYSPNQQEILKIYEEGALESVVDIDDDILKISKTAQPSATDLKRYKLWLEQKYRSPYTGAVIPLNKLFTHEYEIEHIIPQSRYFDDSLSNKVICEAAINKLKDNQLGYEFIKNHHGEKVQIGNTTVKVVEVKDYEDFVKTQYARNRAKLYKLMLEDIPEKMIERQLNDTRYISKYISAILSNIVRIDTNDDGINAKNLIPVNGKVTAELRHDWGIEDVWNDLILPRFERMNTITGTTSFTAWNEHHHKYLPTVPLELSKGFSKKRIDHRHHALDALVVACATRDHVNLLNNIHADSTPRYDLSRKLRIYEKVTYKHPKTGENITRDVPKAFIKPWPSFNADAKHKVEGVVVSFKQ

SEQ ID NO: 7331 - protein, 1119 aa, unidentified
  REGION 1..1119: note = Description of Unknown: Cas Enzyme sequence
MKTILGLDIGTNSIGWALVEDKSIKAIGSRIIPMGAEVLNFEKGNPQTKNADRRSARSIRRMGKRYKARRNKLLYALQQLKMLPEQFQFSAPFDEPTKIQKINLLPVRSKTKQLTAKELIELKVKALNEKIALTELGKLIFNYNQLRGYAGGGNDDEDKEEKKEENLENEDSGLLKYEKIVQLVKINSDPILLPTKKKGKDTYELSVCFDDEVLDGETVLNTLKKGDELELQIIIRRDKKGKTTSVNFSLPVKTNWRKAMEELESELDTLSVQKGSEVYLSEYFLIKLNEDKNYKIRNKVVLRKRYEAEFDAIWNAQIHRNPEFKTLTENKELLSKISLFIFPGTNTEKKQNDYRNAANEKGLKYLIKDQIIYYQRELKDQSDLIALCRFEKGEKVVAKSHPTFQEFKIWEQINKLSINTKSIIGTKKNGEPKFAYKDVLLSAELKQYLFEELNSKKEVSGKGFYTKLEKEKVIVKNESFLNGIHRDAKLKGNETLLFLKKQLGDWFEKLNLDNRDNLISFWNILYNSKGNEYDLNSERCSTIKGFISKECGNVENIDKLTIRFAKIKFARNYASLSLTAVEKILPLMRAGKYFKSVLPVEIHENISKVVSENHEDPFLKSVQEHLEKNQEQLLVNGGMMSSYATILAYGKHTAESFTGEDTKRYNDIKPIPIGQLRNPLAEQVINETLKMVQDIWKHQGEKPSEIRVELARELKNSLDERKKITEANEKNRKTNERVKQRLIELNRETSLGNIERYRLWSMQATEPFPTPVSAKEPTAAEIEKMRLWEEQKCISPYTGQPISLTNLFDKGLYDIDHIIPKSRYFDDSLTNKVVCERSVNIDKGNRTAWEYFEVGSLTEKILTKENFTNLVNERFYGKKRKNLLATKIPQDPVARQLKDTQYITIRVREELSKIVGSDNVKTTTGGVTDYLRHHWGLTDKFKEITNDRVTKAKSLVTEDKKGDIKWSKRIDHRHHAMDALIIACTEQGHIQRLNNLNKALQDWLKEHKQEFLKDFEGTDDELLEAFVNMANDSRAKILEELKKGFRNFEHPWETFSNDAKKALERIIVSHKPKEKLLIQKIEKGEDAGKKDMLRIRGKLHDATLYGLSSGKEAYRIKLT

SEQ ID NO: 7332 - protein, 1162 aa, unidentified
  REGION 1..1162: note = Description of Unknown: Cas Enzyme sequence
MNAKGKMSSATAADLELDDLELDFDVGHSSIGWAVLKTHTGQTPTLLGCGSVIFPADDCLASARRGFRRQRRHIRATRLRIARMRRLLAHLGVLTTEQLETPGCAWPWLLAARVLRGGDRLSWTELWDVLRWYAHNRGYDGNKGWSKHDTASDEDSDKEKRAGELLTSFEKKHGRAGTMAEVFCDVLKVDPLGAVKSSMQRVRNLAAAFPREGVECEVERILRAHVGLLTNLDDRLINALMRDHTALPGPDLRLPARYGQRLNDGSLSPGGLLFGQLVPRFDNRIIAHCPITFERVYQAVKADTGNDEQAKHEAEKQAKVPGVGCVEFHRFRWATELAKIKIATSDGRPPRNLTAAERQAVNVEMEKRGFLTPKQLRDAVRAQTGGAPDNLEQILTHPDAERALVLDPVRRYLHSDQLVSTLWQVLPEHLQKRLRGQWRRGHAITVAELLDASGDFRAAAETLCQRHLDAQNTKKRKKDEPLTREALLHTKLHVQPPNGRAPHTRKVMREVVEFVFATDRHPAEEGGPLYRSEAIRQAQLQRALDEQTNNHLVRHRLKLLERLHADLLKTYAGDDCARIARITIEVNRDVRELSGKTAQEQAKLQGQQLAHFKGVAKKLAEAYEGLGVHVGPGLIRKGRIAEDLGWTCPYTGKAYDALDLLHRRVDKDHIIPRTDRASDSLDSLVITFSEINNMKGKRTAARFVEEFQGQPVQGLPQVMIKPLSAYLKDVAALETFKGHDDDQRRKKNRKRWLLMRDYVEKEFTPRDLTQTSQLVRLGAQALQKHYVGVDKQPVITSLPGSVTGAVRKSWNLTGCLAAANPLVLNPDDLDEGGRPKVRTKTEIRGITHLHHALDACVLAFASHFLPRDGGAWELLVKRRLNADEQRRARTLFGSHIEITQDGELRLADLSPALKAQICERLKERRVVQHLPADLSGLRCKETVWRVFDPADPHPNSKRMARWLAQKKVALPAPDAKTALIICRKRRAAGVAGEESAGGKVFRETKTWRWVYDIKDKSALLGLAPEGDAAAAKLKRIKAVKVLGDNFGLALDPEPTLIRPHKVWHQLDALRKANGGKPARVVRKGSLIRVLRAKSAKVDYHGVWMVRGTTLNQRAGFLLDLSPADQILYRGQPECFQNVSVATLMKCGLEVVRSPLCGVTPSQ

SEQ ID NO: 7333 - protein, 1061 aa, unidentified
  REGION 1..1061: note = Description of Unknown: Cas Enzyme sequence
MKNEKNPGHILGLDIGVNSIGWAIIGTSDGRPSSIVATGVRVFPFDADFERDFKAGKPASLAAPRREARLMRRMTERRARRHTKLFNMLARAGLLPAGKPEHVIPALDKEILAKYGRAGSRTLAHVLPYELRKRALDGKIEPYELGRALYHLGQRRGFLSNRKTAPKKDEDEKSVVKGGISQLAQEMNGAGARTLGEYFAGLDPTHQRIRNRYTSRGMYEDEFERIWQGQARHYPEVLTHELKKRLHKCIFHQRALKSAKGLVGTCEFEPKRRRAAWAHILSQRFRIWQQVNNTEIIDDNGEIKPLTEDQRQTLYNALDKEGDLSFTEAKKRLGLSRQCTFNFESGEEKRFVGNRTIAKLAGIFGDRWWAFSDEERDKIMHDVISIQKDATLAKRGRERWGLSEEAASEFGAVELQPDYCRLSRRAMMKLMPYLAKGARYGEAVKAVYGSPFAAEQALGALPPVSKYAAAIRNPAVTRVLSEVRKVANAIVGKYGKPDQVRIELAREMKKPAKERREIMKRNRENEKGRTKAYGRILAETNIQNPTRDDILKVLLAEECRWICPYTGRSISMTALFGSHPEFDIEHIMPFSVSLDDSFMNKTLCYVEENRSIKKNRTPYEAYSGSPAKYEEILQRVNRFQGTGREAKLWRFKQGEMNFDDFVERQLNDTKYATTQAAGYVGLLYGGVIDADHKRRVQASKGQMTAYLRNEWDLNGILGGGEKTREDHRQHAIDAICVALTDAGIVKALSDAAGRAQREGRRRFGRMEEPFEGFWDRAAESVLSINVSHRVSRKVNGPLHERTLYGPAPELDKKGNPVYHVRKSLDKLSVGEVADIVDDTVRKLVGEKLAQVGGPANKVFSNPANHPVLTTKDGRQIPIHRVRIRKAVAAQRIGHDATSRYILPGSNHHVEIFETKDEKGGIKWVGHMVTRLEAARRLARHQPIVNKEHEEGEEFLFSLAPGEMIEVDGDEGRELYVVRVTSIDKSGYITISYVRHTDARKKDVIMGRAKQSGDSTEQSGGVRGRRKPGESDWKKSMPESLKRLNCRKVLITPLGEVRRAND

SEQ ID NO: 7334 - protein, 985 aa, unidentified
  REGION 1..985: note = Description of Unknown: Cas Enzyme sequence
MKNPAVVPYVLGLDIGASSIGWAAVGLTGDGKLSRIVKIGSRIFDQSLERAKGSIEEGSEVWANANRRTARGQRRRLDRHARRLNKLFVLLQRNGMMPGDPVIKTNPRSVKGAKARRDLRDALANERHAILTDKRVWKELVGHWQTKLHGEGASSDQVANVPTLLPYLLRARAIHEKITLHELGRALYHIAQRRGFKSNRRKGTGDEDRKKGKVWGDISEIRGKMEKVGATTYGEYFWKTGPKDADGRRIRQRFTDRRLYEMEFELIWTQQVGFHPDVLTDQLRKRVHESIFRQRDLRLRPDLIGECAHEEGQKRAPWALLWAQRFRIVDKVNNLIVTSPEGDRRSLDDEKRGMLIDALDTQGDLTFKQIRDLLDLKRYSINLESGKEKKIPGNRTAEEMRKYLANWDAMSPADQDRLVDDILTIRKDHALEKRLVNEWNMAPEAARTLVNEIELEDDYCNLSRKAIATLFPLMAKDRLKYMEAVGVVYPPRPKVPLPELPPVLDPIEGIKSLRNPAVLRTLTELRKVVNALMRMYGKPAVVRIELARDLRNTKKQREAMSQRNADNRDARDHAVAFLREKGQAITRENIDKVLLWAECNRRCPYTGEPITTNDLFSTSRIVEIDHIIPKSKCHDDSFMNKTLCKGRANEDKRNMTPRQLCAANPQKYQWQDILQRVADFKWVKEYNFNEEGEPRAHDRGKKAKPHPKLSRFSIERDDELEQFCSRLLNDTRYASRLAADYVGRLYGTTEKGARSPNIQILVGQQTAQFRDRWNLNRILGDGGKKVRTDHRHHAIDALVAACADREAKEHLRKAEEAWELQRRKQEVKPPWDMFLEDARKATEAVNVSFRVSHKAKGEMHNANPLVRADGLLELAKNTPRSKSVETGANHHLEVFARMDANGEDCEWKWRAVTLFEAVQRRKKKQDLVDRVGADGWKWKFSLASRDTVRMSWKNRPVQFFTVHGISDSEIEFGPNEYAVSPSQAE

SEQ ID NO: 7335 - protein, 1011 aa, unidentified
  REGION 1..1011: note = Description of Unknown: Cas Enzyme sequence
MKPVAVSPSPQGSLILGLDIGAASVGWALVELSDAQPSALRAAGVRAFAAGVEGDITAGRDASRAAKRREARLRRRQLARRRHRLDKLAGILQTSGLLPPGALHTADAVVAYFEGLDRELFSPQARRADPHLLPYRLRARALDEPLAPYEIGRALYHLAHRRGFLSNRRVKPGAQGDDQEKEEGKVKGAISELAQRIQDSGARTLGEYLSRLDPEQDPIRGQGHYLGRKMLEDEFNAVWSAQAAHHPSLLTDHLRDNVQRAIFFQRPIKSQRHLVGYCDLERTRRRAPMSTLAAQRFRLLQKVNDLLVEGPDGNHPLPPEKRDKLLEALEAARRLTFPNIRRLLSLPRGTKFNLETEGEKSLPGNRTAHDLADVIGSQRWSALTPEQRDRVVEDLRSIHNRDALKRRAASAWGLQAEAAERFAEIPLEDGYCNLSRQALAKVLPLMEQDTQYATARKQLYGDQPPPAAVTMLPRLESIFDVRNPAVERALTELRKVVNAIVRQHGKPDCIRIELARDLKKPRKDRQRITRQNARNRAARAAAGAEIEDLVGPNPSRADRQKVLLWKECACTCPYTGKQISREALFGDHPQFQVEHIIPFPRCLDDSFINKTLCEIEENKRKGNRTPWEAYHGTDQWEAILARVKQFRGDAARAKLDRFQTKELPGLDDFTTQQLNDTRYASRRAVEYVAMLYGAGADGVDPKTRTKRVQASRGAATSYLRDEWQLNTILGGGEKTRDDHRQHALDAIVIALTDAAAIKRLSDAAAHAPEARRRRFAPIEPPYPGFLDEVRAAISAMVVSHRVSRKVSAAIHEDTTYSKTHQNEQGKPCVHVRKPLQAVSKKDLPDIVDLKVREAVAAKLEALGDKAFKDKANHPTLPSKDGRQIPIHKVRLRASVSPEQIGGDGAHARHVKLGSNHHVEILETNDKKGDPRWEGCVVTTKEAMRCLKAREPIIRRDHGPAKRFLFSLAGGEIIALDAEQTKKGATAAARLYAIRTVSLTKLGRVTVDFASI

SEQ ID NO: 7336 - protein, 1016 aa, unidentified
  REGION 1..1016: note = Description of Unknown: Cas Enzyme sequence
DEFDVLWKRQHEFGGALAAILTDRLRLELDDPDRILCDDDPAKTKEDREHYKSQYRHGGLLFGQRRTYWDTGTLGRCDLEPTERCAPIADMHAQEFLVLETVNRIKVEERDKPPRGLTPEEHAKVICALSTGAAAGVSGIRKVLGIQKKAVKAFFSLNIEREKKPEVNTDWFRRKIVHGVFTERVWEQMSEQQRESVNRAVLRFDPDKDEHGDTLRAKAQIWWGLSVEQSERLVEAWRGRPKLDERLKLSRRAIVNLLPYMRQSHDVTSAKQLFAEDATKGATDEQRQRYAGQASSLTKADRQFLKKHPDLLLPAPMMANPVVRKAIHEVRRHVTAYLRKFGRKPDRVIVELARSATQTEKVRNRILAANVKRKKERERIEEAFAEFVAPGNPIHRIVERVRLWEEQGTFSVYSDTRIGCPQIGTGDNLEIDHIVPLSRSNDNSFNNKVLCLREENRGKGNLTAKEWLEKQGRFAEMERRLKHLEKDNPRKWENLHRDAPSREKWTSSQLTDTAYAATQVVAYLRDALYAGELERNPDGTRKRRVFTTKGIYTSMLRNDWQLYQAPRPLSSGTGEPLEPQEGAGDRPRKDRGDHREHAIDAVVIACSGPKIIERVAQQAEESELYHERTGFWPRRVPLSPPWGEVEDFRHEVLSRVLEYPDDKSTDDTQPTAPLVVSHRPAKRRISGAFHEETAYGPVVTPLPPHRREDPKTLFTNRIPVYESPQKCLRPKRLRVPDGWDELSAKLDERTVSATENKCIRRRLAAMPDPPPDKSGIVRDRALRDRIRKCLRDSHLDPDKFGKDDIKKLVQGGKLTMKSGVPIKSVVLLRTNKDPVIIPRRKWDLETNRMVHDDDPRTRRVYIGGNNHHTEIRERMRKRKGETITEWIGEVVTTFEAAQKNAARFRAMKEAGVPGRKEWRRLAKEKRKGFRPIIADINRRFPIVDRSDNDKGRFVMSLAEGETVHMRHPEINEPGYFVVFKLSPGRIFFIHHWDARSSKLRKDPVTGEDVANSKREE

SEQ ID NO: 7337 - protein, 1241 aa, unidentified
  REGION 1..1241: note = Description of Unknown: Cas Enzyme sequence
MEKTLGIDLGTNSIGLALRNGNDFDWFGVYTFKKGVGEGKAGEFSFAAERTQHRSSRRLYNSRRYRKWATLEQLIKFDLCPLSIEDLSGWKNYTKGMGRTYPLYNKDFDHWIKLDLSGNGKSDFTSPYQLRRELVSKKLDLSIKSDRYKIGRALYHIAQRRGFKSSRKSGKNEQAAIYEGSLNTKTIGRNEYQQLIIEKGTLGSAFAHLEDQGIRIRNRYTLRSDYYSEAHQIMSYQGLNSKQIESLLHAIFYQRPLRSQKGLVGKCTLESAKARCPISHPTFEEFRARCFINNIKYKQNEADTWSELPNELKRIIYNDVYFRLKSSFPFADIRKAIAKNGGKDWILNYKQKADKVSISGCPVSSRLKSVFGKNWLSYTKEVEKINKKGKNIVKTYDIYDIWHILFSFEDEEYFNEFCRTTIKIDDEQIDGLSKIWNAFPVGYANLSLKAIKNILPFLRKGLKYTDAVLIAKIPELIGQSKFDENADLITTSIQKIILDNRNQKELVGIANNLISKYYLLPNPFAFNDTTYILDDDDISDIEKTCKEYFGARQWLQKENQEHVHTEVAKLYQEFFACLDRKHIKPPHLTDQIKDWLRGHFSHLDEKQINQLYHPSQVEIYPSYPDQQQLTSPKTGAFKNPMAYKTLYQLRKVINHLIEIGKIDDDTRIVVEVARELNDSNKRWAIESYQKSREIENREFAIAITELIKDQDFTGTADPNSKTDTDKVRLWTDQLENRDDILKEITATKEDIKKYRLWKEQDCKCIYTGRMISITDLFEDNKVDFEHTIPRSQCFDNSMANLTVCYADYNRNVKRNKIPTALPNYHSNTTEGLAIEPRLKTWKDKTDKLEIRLKAAVSRSKAAMDKSTKDDAIRNRHLLQFEYDYWKNKLDRFMREDVPTGFKNSQLIDTQIISKYAFHYLKTIFKRVDIQKGSTTAVFRKIYQIQPKSEKKNRGKHHHHAIDAAVLTLIPRSSKRDKILKTYYSQMEANPKANYHVTPFEGFKNQSLIEIENTILINNVANRDQALSPGKKLVRRRGKIVWIKDKTGSDLKDTKGNKVPKIAQGDSIRGQLHQDSFYGMIKVANKENGKLTRDVKGDIVINQIDGKDEIWVVKRVLISDSAFKPENIVDDTLRTHVIEQLKYKTVTELTDFNDKSIRHIRCRVKSGRGYMNPENLTKVKEQLNKSKFHYKNFIYADSGDNYLFAMYESEDGKREIKSTNLLDAARIITSQQVDQNTDFFEK

SEQ ID NO: 7338 - protein, 1029 aa, unidentified
  REGION 1..1029: note = Description of Unknown: Cas Enzyme sequence
ECTTITELTICIKEYFENIEIADKKKKDLDAGGQKLFTLYNSFNKTLAEKENLETIKHKLEERLNKKESLGKVKQGISDLDKKIQDGEFKTLGQYFYSIYGKSNKRIRNQYTAREDHYLKEFEKICEVQELGNINKLENEPSKKYEGLILDLYKAIFYQRPLKSQKGLVGKCSLEPSKYRCPVSRPEFEEYRMYQYLNNFKIKTPDDEKLRVLTEEEKKKVELLFYRKSRPNFNFEDVVKKLIPKNEKGFYYKHENAKTAKYLVNYSLNTSISGCSTIASFRTVFGDDWKNLNYVYKTINKKGITIERTINYQDIWHIWTTFTTNEKLEDFAYNKLNLNKKLAYKFSKVNLKKDYTNLSLKAINNILPYLKCGLIYSHAVFMANMKNVVISERWENLEEREIIQNEVHEIIETHQVENKLQFVINSQIKKNKEQGNYYSKEAESLYQKELEKSFEQEFGKKKWTEINTNNLFEVNFNLYIEKFKNEEFLKLKRIDEKVIDFLSDNDLLKDKGKLYHPSDIEKFKLEKRKNKNGEEFTVLGSPLSNSIKNPMAMKSLHTLRKLINTLILEEKINEHTKIHIELARELNDANKRKAIQKWQKEKEEERLVYRKKIQELYKYDFEPTLEDLEKFKMVLEQRADKKIISKDDVVKYKIWEEQRHICLYTGHTICLTSFLGENPSFDIEHTIPRSVSIDDSQMNKTLCENKFNRDTKKNQIPFQLNNHSEIMNRISHWKDKYEKIDSEIKGLIRASKTATEKEVKDRIIQKRHYLKMEYDYWKGKHNRFEMEEVKSGFKNSQISDIGIITKYAQQYLKSYFKRVYSVKGTMVDQFKQAWGIKKTLKDENGVEKKDRTNHIHHCEDAITIACMTKNKYDILAHAWGLEEKHQLEEAKKELEQSKPWDTFTKALRSVKEKVLIVHDYKDKVPIQSKKKLRKRGVIQYNKKGEIKYQQGDTVRGSLHNDTFYGAILQQDLENNKTFEKNKDGKGVIKYVVRKPLDGLKKSDVDKIVDETVKGIVIQAIDEKVLVAKK

SEQ ID NO: 7339 - protein, 1019 aa, unidentified
  REGION 1..1019: note = Description of Unknown: Cas Enzyme sequence
MLHKMHYRLALDLGSTSLGWAMIRLNTNDEPCAVIKAGVRIFSNGRNPKDGSSLAVSRREARAMRRRRDRLLKRKARMLRTLIEYGFLPADETQRKALVTLNPFALRAKGLNKVLTPAEFGRALFHINQRRGFKSNRKTDKKDNDNSALKTAIKQLRETLKTENCRTVGEWLNKRDAAGLSIRARYHQDKVIKDDGKAKINKYYDLYIDRAMIEHEFNELWKKQSELNPALFTEAARADLKDVLLHQRPLKPVIPGRCTFMPDEKRAPLALPSTQRFRIYQEVNNLRILRKNLKEEELTLEQRDKLIAKLEQGNQSFKSAIPKIIGVSGAVKFNLADDKRTELKGNRTSQILSKKEHFGEAWFKFNEAQQDAIALQLVSEENEAKLVRWLQDETNIDEKCAEAIANTGLPEGYGSLCMQALVRILPELRRDVVTYDKAVQAAGFEHHSNISPSATGEILLELPYYGEALQRHVGFGSNDPKDSAEKRYGKIANPTVHIGLNQVRLVVNALIKRYGHPCEVIVEVARDLKQSKAQRDNDSKRQALNQKRNQRLRTDIAGVLQISEERVRRDDIVKMILWEELSFDPADRKCPYSGAQISAAMLLSEAVEIEHILPFSQTLDDSLNNKTVSLRQANRIKGNRSPWEARSDFASQGWDYADILARAEHMPKGKRYRFGEDGYQRWLKDDAGFLARALNDTRYMSKVAREYMSLICPNTRVIPGRMTAMLRAKFGLNDVLGLNGEKNRNDHRHHAIDACVIAVTDQGMLQRFAKASANAREQQLNRLVDDMPLPWERYREHVQRAIDAIWVSHKPDHSHEGAMHNDTAYSLLGEGKVSTHKIVDGKRERIEKSLKVIAFTNAKANDRHGVLENGEPRPYKGYKGDSNYCIEIVHNEKGKWEGEVISTFDAYQLVRKQGTAQLRHPTLSVSQKPLVMRLMIDDVVRLNIDGHTRTMRIAKLSGNGQLFMADTNEANVDARNRSKEESFVYLSKMAGSLQKANARHATISPIGEIHTPNFKGLAR

SEQ ID NO: 7340 - protein, 1084 aa, unidentified
  REGION 1..1084: note = Description of Unknown: Cas Enzyme sequence
MGYRLGIDLGTASVGLACITLDANKEPADIAYHCAHIFQEPVEPATGGGIGSTKASARGSARRTRRLIDRRASRLRDLASICELLKIDPQTVTSDDGRCLHEARSQATTKPIAVADLARVLFRMAKRRGYAGGFQVKKEGDEGQVEGGINQLRQLMQDANCDWFGQYLLHRFNSGETLKLKEAKPIGLYVSRDMVEAEFEQIWKIQSAAHPILNEKYKGKPLKDIFRNVIFYQRPLKSVAAMVGQCPLEPNLPRAPMSQPAAQAFRIEKQIADLRWGMGRRSQALSSEQKTVIRDVLTTNEKATFLQTYKALEKSGYPKPEHRGLNFDRPSRQELKGNSTLKAMEKLGLAEQWQTLNEGTQISIINFLADLGSPQEVDRKDWHLQYRSKGKNGKPGKLREFSPAMVEFINAMVASGKFDRLSKIGFDGGRSAYSIKALKKLTEKMRDGMDEYEATEALYPQPDKKSERLTHLAIHKPTGNIVVDVALRQMRYAVNNAIVAMGGEPPSEVVIELSRDMGLGLKRRGEIEKGMDKNQRERKKAKEDLEKNGHSATSTNIFRWRLWDEQGNNCPYCERKICLGAAVDGRETNLEHIIPRTLTRVGRQQDHIMLSHRHCNDDKGNRTPWQAWGHDADKWKIITERAKALEKKRRFAKARFLTLQDWKAEIINSDIINDFTNRQYHETSWISKLAAQWMRTVCSDVSVSRGAMTAHLRRIWGLNTVIPEIRFESGLPVFDTAKEKNIITKEEFEKYKPYWEGHNNNHSGAQRTDQMIEKRIDHRHHVIDALVIALTSRGLYQKMARNYKALSERAQAGERVKLKLSINPPLKNIRTQALDMIREHHITHKPDRHVGGSLFKGTAYGVTWEENDNDPNADPEQKLTLRKNLEALADDKSKPDAVRKELEKIASLDTRRLVIDTFDKRIAAGKMAKEALTNIQHPQYRNVIRQVKMLTDYSANTAKEIEFESRYSTPEKPHYKWLRHDNYAYLELTCTPGEKPNPQLITQWGALRQKNQPIPPNTKRFFKGDTVEDTKDGKHFIIKQMKAQNGGLFVLVPITETREVRDMASKDGLRTISGPALSRVKLIS

SEQ ID NO: 7341 - protein, 1017 aa, unidentified
  REGION 1..1017: note = Description of Unknown: Cas Enzyme sequence
KDGTSLAVQRRGPRGARRTRDRCIKRRDEFLNRLVAHGLMPTDPSNRKALERLDPWTLRARGLDEALSLHELGRALFHLQQRRGFQSNRKTDRADSEKGSIANATARTLERLEAEGARTIGELFGQHRIAAAKRNATAPKGAREPQPAARVSPYLDGNKLAYDYYPTRDLIRDEFNQLWNAQAGFHGPSLPAVAREALADTLFFQRPLKPQHVGKCSLDPTKERAPKALPSVQRFRILQEANNLTVRTPGAVAVSLTREQRDAVVEKLLNTSKVTFDSLRGRVLELPKDVRFNLESDKRRHLDGDATAAVLAAASRWGMAWRALPLDQQDRVVERLLDDEDETQLVGWLQTEFGLSEGVARAVSDAPLPDGHSAICREVTAKLIVELSAKPITYDKAVERAGYHSHSRLDHHGEILDRLPYYGTLLERHVAFGTGEASDPAEKRYGKIANPTVHVALNQIRRVVNALVDRYGPPAEIVVELARDLPLSAQGRRDLERRQKDNQAENDRRRAQLAEHGQADTYQNRLRLRLWEELNPADILDRRCPFTGEQISIKRLFSDEVEIEHILPRSRTLDDSPANKTVAMRQANREKMERSPWEAFGHSPSGYDWEQIAARAANMPGNKAWRFAPDAMERFEDEEAGFMDRQLRSTQYIARLASSYLVWLVGDPAKVWVTPGRLTSDLRHHWGLNSVLAGHNLEEATPRDARKNRNDHRHHAIDAIVTALTDRALLQGVATEAGKAEHAGDSRLIFDLPDPWANFRDEVAGAIDRIVVSHKPNHGVQGALHNDTAYGLTGEADSSGKREVVHRVPLASLASAAKLVAIRDPVIRSDLQTATAGLSGKDFTNALVAAGNRMTPPVRKVRIVEAMKVIPITDRAGRAYKAYKGDGNYCYDIFADATGRWTGEVISRFDANQSGFGPQDRVSRNGVPLIMRLRQNDIVAISDAGVIRYMRVAVITPGKISLCEHHESNVDSRNRDATDSFSYILAAPSRLQKLGAKRVRVDPAGRVFADHDPSVLG

SEQ ID NO: 7342 - protein, 1045 aa, unidentified
  REGION 1..1045: note = Description of Unknown: Cas Enzyme sequence
MSSSAKGNYILGLDIGASSIGWSLIGATGGKPASLIRCGARVFDAGMEEGDFAAGKENSRNAARRQARQARRLTDRRARRKARLFHLLQKAGLLPAGEPATILPALDAQLRARYIAPLPRGSPERARLEHTLPYRLRARALSEKLEPHEIGRAIYHLAQRRGFLSNRKAPPRKDEDIGKVRGSIRELEKRMKEADALTLGQYFAGLDPMEERIRRRWTSRPMYLAEFGLVWAAQAPHYPDILTEETGKRICRAIFHQRPLKSAAGLIGTCEFEPGRRRAPVALLLAQRFRMLQQVTDTRILAPGGQSRYLTAQERDALLDLLERQGDLSFAKARRALGLPRHHCFNWESGGEKRFLGNRTNAKLVDIFGDRWWSLSETERNQIVEDALSIQKEEALARRGERRWGLDKEAAKRLGQLALEDGYIALSRRALAKLVPMLEDGVPYSTAVKEAYGERRTDPVDQLPPPVAAYPHLRNPMVTRVLAELRKIVNAVTRQYGKPAAVRVELARDMRKSRKQRGESWKLMRQNERARQRATERIAAEAGIQNPSRSDTEKVLLAQECNWQCPYTGRNFGMNDLVGPTPQVDVEHIIPFSRCLDDSFYNKTICEIRENRDIKGNRTPFEAYGQSDKWPDILQRVRAFKGRAAADKLRRFEQQEIESIGDFTARQLNDTRYAARQATDYLALLYGGLYETGGVRRIQATKGGVTAYLRDRWQLNSILGDGGLKSRDDHRHHAVDAITIALTDPGAVKMLADAADRAERSGTRWWRQSLDHPWPGFLDDVREAIAGVVVSHRVSRKINGPLHEETHYSPAGRDANGTPAFFAVRKPLAALSKSDIRQIVDDRVRKLVEEKLAALGGDPDKAFADAANHPFLTAKDGRRIPIHSVRVRKPETAMPIGQGARLRHVLSGSNHHMEIFAVKDAKGRTRCVGRVVSCYEAMRRLAKRLPVVDRTPPDGGRFLFSLGSGEIVELKNAEGRTARYRIRTVSQAKSGSIEIAGARLTDARLKKEIMTSGNWLRITSLDDLIRMACRKVTVTPLGEVRYAND

SEQ ID NO: 7343 - protein, 1050 aa, unidentified
  REGION 1..1050: note = Description of Unknown: Cas Enzyme sequence
MNGLTLGLDLGSNSIGWALIDEPNQRIVAAGVRVFPEGVDAFDTAKEKSRTQERRTKRAMRRQIARRARRKFFLRLALWNARLLPDPAIQFGPDNRRAQRLVRRGSLPSIALAAPDNTWLQTDPYQLRRKGLDHPLTPHEFGRVLLHLNMRRGFLSNSKSDKAKQKETSDMLKEISALAKEIDDAGHRTLGEHLAASVAKPGEKPLVRVRGRHTRRDMLRKEFDLLWSAQKLHHPQLLTDELKKKLDDPDGDETWWMRGAIFGQRNLYWPASMIGRCELEPRERRCLKAERIAQRYRLLSEVNNLKYIDPDTGRVCSLDETQRTLLLDHLSKRKDMPFEAVRKLLGMLETVKFNLEKGDRAKLKGHVVDYLMAKESPFASAWHDLPERRKDEIVQLLADPRTPDDSIVETACRSWGLSPEQAQSLLNIQLPAGYLSLSRKALEKLVPHMERGLLLMTDDDTPCALTLAGYLRPDQRPRKKLDSLPPPPDLPNPVVRQALHELRRVVNAIIGEYGKPARIHIELARSIKMGREDREKYNKARAEREEARDAAAEAIRAEAPGTKLSRDLIDKYLLWKQQGERCVYSGRTISFRQLLPGTGEVDVDHIFPRWRSLDDSFANKVVCFRDMNHQKGDQTPFEWLAGDPARLEALKHNVRALPWRKRARFTQEKLDTDEFSARQLVDTAYITRAAADYLRCLVVEPHHVLGGKGTYTAELRHLWGLETILSELPDSPAWAAQSNLRPGEKNRADHRHHTIDAIVVALTDQRRLQSLSRLHKTGESGAEIAPWDSFRDSVKAVAQKINVSHRVQRRVSGALHDENPFGRTNKEGVWAIRKPVEGLSLNEIEHIRDPIIRRIVSEAVGRVGLKGGRRKKGVEKDAETGKKIKGALADLKMPSGVPIKRVRILKEEKTIQAIRGATAYVKPASTHHLCLFQWTESGETVRGAVFVTMLEAIARVKAGQPIIQRVHPKHPNATFLMSLSSREVVLLTIDGRQHLYRYDTAASTTQQMTFYPVTAAEHVGKLTKYPSSFMELQPKKVTVDPLGRIRWAND

SEQ ID NO: 7344 - protein, 1057 aa, unidentified
  REGION 1..1057: note = Description of Unknown: Cas Enzyme sequence
MMYVLGLDIGARSVGWALLEKEGETFTRIVRAGVRIFEAGTEGDIEQGRDESRGATRRTKRLARRQIRRRRQRARALYRELASAALLPAIGPSPGKPMALLIQDEINRLDRELRGKYAGEPAVNQLPYLLRARALDHRLEPYELGRAFYHLGQRRGFKSNRKADARKKAAEDTSKPQEEKSKVYRSIDDLKEQIRQAGARTLGEYLSGLDPAEQRIRSRYTHRSMYEAEFEAIWEAQRPHHAGLTRELKDRLWEILFKQRPLRDTEDLVGECEWIPGEKRAPVWSLDYQRFRLLQAVNHLRVAENRSSPRPLSPEERHRLLEELEKKPKVTIAQAKKLLGLKKAEFTIEEGGEKDLPGDKVAAQFLEKLGESWLGFNPERRQAVVECVATAESDEQLSETLKQQWGLSEDQAKSVVQEVHLPSGYAPLSLKAIRDVMPYLEQGMDVQRARLAAGIPLDRPVPVHALLPPVADSGVAVFNPAVKRALTETRKVVNAIIRRYGIPDEIHLETARELRKSREERMKESRRMRDREKERGEIIRRIRDEVGIPEEKISRDDVLKGLLWQECDGKCPYCGESLGGFASLYGGNSPAQIEHIIPFSRSLDNSFVNLTLAHVSDNAYKGDKTPWEAYGSSPEQWDRILQRVSLFKGSYSKAKLNRFKMDESAVGELFEQFSSRALNDTRASAVAAARYLSLLYGGETVDGKRKILKVTGQVTAYLRDVWGLNGLIPSIHREARGEAEDGEAEARPLKSRDDHRHHAVDAAVSGLCNQGWIQRLSEANKGALAARRRRFAPVEPPWVGFKEQLKDILKSMNISFRPDHRVTGALHKETFYTRIGKNEKGGDVVRVRVPVTGLGSKDVEAIADPAVRAIVRAKLAEVGGNAKKLENNWPLLPNRNGKPVPVKKVRLNQNQSVVSVGKGPWQRWAAPSETHHIEIYEVTSGGKTTWSGDVVTMRDAIGRASRGEPVVRRDGGPNSRFLFSLAKEDTLRLQGEKPGIWVVKKIKANTQITLVPQYDARKEKDRSNGRESFSPTLGGLQKYSAEKVLVLPIGDVVQCNE

SEQ ID NO: 7345 - protein, 950 aa, unidentified
  REGION 1..950: note = Description of Unknown: Cas Enzyme sequence
KAYKENRTYKIRQFPVYRWRYKEELKAIWEKQLELNPELKKLNKDKNILKRLAEILYPTQAKNGLSKLQEFLNNDLHHIISNDIIYYQRELKSQKNLIKECRYEKRIGKEKDENGNWIETGKYGLKCIPKSSPLFQEFRIWQDIHNIKIFKREEKVDEKVKLNIDYTNQYITDKVKEELFEKFNQKTSINEKDILEIIIKNNEGCDIVINKKGEEHSHRINLFTKRESLKGNETKIRYKNIFNQADYDGEEILNDVEKLQKLWHIDYSITSSDQEKSEKGIKTALNKLLPEKENKQKVIELFLKLSELPREYGSYSAMAIKKLLPLMRVGKYWSENAIQEQTKNRIQKILDDEFDELLNINIKDKIKKWEKENRTFTSLKDFNGLPTWLAGYVVYGIHSENEIENCKTSDEFNDKVILKLKNNSLRNPVVEQVVRETLLLVRDLWKQLERKNEKIDEIHIELGRELKNNTEEKQKIADSQKKNFEEKQRIKALLKELLNDGFKQTEDEDEPKFIDGKFEFKTKEVNANFEVKPNPENPTDIEKFKIWKSLSKRSDLEWEKKVKDEKIPKEQEIKRYILWLSQECRSPYTGKLIPLSKLFNPNQYEIEHIIPRAKMKNDSMSNLVISEWGVNKAKGNQLAANFIYDSKGKCKYGDIEYKLFTYKEYVAYCNDVFKFNKVKRNNLLATDVPEDFIERQLNDTRFITKKVAQLLKPVVGSDTKIIFTGGSITSELKKNWGLTKEWKKMMLPRFKRLEAITGKTYIKQNEHDRNDIDINVPENDKLDIKRIDHRHHALDALIVAATTREHIRYLNSLNAVDSNEELIKIKQSLVKGKIRDFNLPWETFTKEACQKLEETIVSFKVNNKIISQPTNQYSIWSKDLKKIKIQQKPNKRWMSVRKSMFKEPLGVKWIKQIKSVKVKDAFKIEIDRQKNKHDKTAPYIYDKQARLIIK

SEQ ID NO: 7346 - protein, 959 aa, unidentified
  REGION 1..959: note = Description of Unknown: Cas Enzyme sequence
MPEDTKARKSLEMANPYELRSAAIERPLSAHELGRALFHIGQRRGFLSNRKSDGDDEETGKIKPKISELRKELGDNTLGQWLYHRYKNGQSTRFRGEDGDLYADRAMYLSEFDNIRAVQESHHSLSPADWDDLRNGNKAQAFDGIFFQRKLKAVEKGRCEFFIEEYRAHKDLPIAHEFRILQEVGNLQYYDENQEKHELNNTQRTILFDKLRTQKTILFSSIRNLKNQDGSYVFPRKCLFNLENGPRDKLNGNATNIEMQKPDMLGKVWNKMSADQQNDLLEVLHDADDDDQLFKDLIDVFSFTEEQAKSVGKYKLSSATTHLSRKFMARCASIMREENLGYDAAVREVYDDDGVFFHHSRYDVDQLLEKLPYYGEVLKGSVIGAKPVEFDAHTNPEQHYGKINNPTVHVALNQLRKLVNRLIDRFGPPAEIHVELVRDLKKTAKARDDIAKENKKFAKANDSRAILFREINNGRDPSGLDLKKIRLWEELGADQFTRHCPFTGKVISAAMLFNSEVEIEHILPFSRTLDNGTANLTVAIRRANRLKGNKTPYEAFAADHHADQGMVWCDIAERAKSLPKNKRWRFDEDAMERFEKDGGFLARQLTDNAYISKLTKRYLSHICDQNKIATIPGGLTAMMRGKWHLNSLLGDHNYKERNDHRHHAIDAFVVGLTDRGMLQQISNQTKRGADDRVHIDLPDITPFKNQLKERLSNMIISYKADHGTNGKMYKETAYGIIPPEKQDPDLKGYNLITRKKIASLTPKEIAAIRNRGWRTRIEQHIDAAKVNGVKLDKALADFGKENNIKTMRILVSNQSAIKIPSAPYKAYAPDSYVCVDIWQIPKGNAGKWKKGEFDWKGAFWPYADCKEETPDKNEGKIDNEPIHPAAKFITRLFKNDMIEMENNGERKIMRVGSFSTTNNRIDLRPQYETDGKQNYISINVVKKNFIRKLHIHPDGQLRG

SEQ ID NO: 7347 - protein, 1543 aa, unidentified
  REGION 1..1543: note = Description of Unknown: Cas Enzyme sequence
MKRILGLDLGTNSIGWSLIESDFEKKEGKIKGLGSRIIPMEKGMMDTFGSGGAIETGTAQRTAYRGVRRLLQRNLLRRERLHRVLNVIGFLPQHYAAAIDFEKHVGQFKENTEVKLNYRKNKEGKHEFIFMDSFNEMVKEFEIKHKETKIPYDWTLYYLRKKALTEKITREELAWVILNFNQKRGYYQLRGEEEEVEEGKKIEFITLKGDKVIDSGDTLKKTGDKLYTLIFDNGWEYAKPISSLEKWLNKKHEFIVTSTEKKDGTIKRSFKAVDSEKDWIAIKTKTEQDIDAYISQDDNRTLGTYIYDALLQNPTQKIRGKLVKTIERKFYKKEFAQLLKTQIDFHAELKDSAMYAACVNELYPRNETHQSKIEDKGFKYLFMDDIIFYQRPLKSKKSTISGCAYESRKYKKIVIDKETKEEKTVWVNKPLKTIPKSNPLFQEFRIWQFLRNLKIYKFETKADVDITTQFLQTEEDWVDLFDFLNNRKEVEQKHILDYFVKKNCINKSEKENYRWNYPEDKKYPCNETKAQFITRLKKVKDLDAAAFLTSEMEYKLWHIVYSVTDKHEFERAIENFAQKNKLDQESFETNFKKFPPYKSDFGAFSEKAIKKLQPLMRRGKYWDKKTISEEVKDRIKNIMERVEALDLRAQPSKKQINEAFEKIQVLDDDIPRQLVKSFIEFLNKNYLTGLNTYQACYAVYNRHSEVGDLKPWHTPNDITKYLKEFKQHSLRNPIVEQVVTETLRTVRDIWIHCGNSEENFFDEIHIELGREMKNPAGKREAMSKRNTENENTNERIKIILQEFQNEGARAYSSSHQEILKIYEEGVYQNPDVKYKVLSEDDIKKIRKSSSPTKSEIQKYKLWLEQGYISPYTGQMIPLTKLFTHQYEIEHIIPQSRYFDNSLSNKVICESEINRDKSNMTAYEYILKKGGSIVDGIKITRREDYEAHCERYFKKNRTKLKNLLSEDVPEGFINRQLNDSRYISALVKGLLSNLVRDDNEREATSKHIVPVTGAITSKLKQDWGLNDKWNEIILPRFKRLNELTKTSDFTTKNTNGVTIPTVPDDLSKGFNKKRIDHRHHALDALVIACCTKKHTNYLGALNTEKNNYGLRDSLLIKNKERDYTKHFLMPWDGFTLDTKKHLEKTVISFKQNTRVINKTNNKTWQWVVKEGQWKKQLVLQTEGGNWAIRKPLHKETVSGKIILKREKGLVNINSAIENYKMIVDKSIKNKIKASFDLFDNDLKKVKAHFKKNPIKVEDVELKKIAIYENINATATRTALSDKFTRKQLESITDTGIQKILENHIKKYIDENGKEKFDLAFCPDGVEELNKNIVDLNGGKTHKPIYKVRVYEEGSKFNVGLKGNRKDKYVEAAKGTNLFFAIYMDEEGNRRYETIPLNEVIEHQKQVAHLPKNERTEIPIKNILEAKGKEVPVQFLFSLSPNDLVYMPTNHEIENPSSVNFINLSKEQVERIYRMVSCTGGECHFIPNQTANEINKNENGTNSKSERIQDFFNDTAILDEKLKPIMIKNNCWKLKVDRLGNVARV

SEQ ID NO: 7348 - protein, 971 aa, unidentified
  REGION 1..971: note = Description of Unknown: Cas Enzyme sequence
MMSKIILGLDLGITSIGWALVNVDDNIKNNKIIDSGVRIFTIAEHPKDGKSLALPRREARGSRRTTKRKAQKLRAIRRLLLKNKIITQDELDSLFIGNKWQKDVWELRRDALYRELDNKELSRIMVHLAKHRGYFSNRKSEDIVNNDELVKNTDDKESKKEKEGINFGIKNNLKILDTSKYLTIGEYISSKDEKQKEKKRNSKGNYQNTVARSMLVDEINIIFSKQKAFGNELVNDELLQTYKEIAFEQRPLKSIAHMVGKCPFEKEEDRASKSSYTFELFRALQKLKNLRIITLDGEVSLSKDEVNQAIYKAKTAKFTYKTLKKLFSLEDVLFKGLTYFDHKTGEVIKKDPESEELISFTSYRKIQKNIQSTDNLYWQTIENNSDVLDAIAKILTTEKNDKESIKQLKTIVENEKVCEALVSLSFSQFGHLSNKALKKIIPELEKGFDYDVACKNVGYDFKAIFKGNKTKFLPPLSKLENLEMTNPVVKRAIAQMRLVYNAIARKYGELDAVHVEFTRDIKNSHDDRRKIEKAQGEFRDTKEKAREQAIDKLEKEPNAKELLKFRLWEEQNGHSIYSGEYINPHMLADSYATEVDHILPYSRSLDDSLNNKVLCLTQENQDKGNKTPYEYIDSSKWDEFVGKIEGLKNLKYAKKNRLTKTNFDENSEIAFKDRNKNDTSYISKFVKNYIESHIEFKESRMKRHVFTMNGMLTSQLRYKWGVGDKNRDNHLHHAEDAIILAFSTQSMVQSLSTVSAKREGFSFKKREEKSKELRFVTPLDEFHKKVQESLADIFVSHMPRRKVGGAAHKATVYSNKTLSMKKENGKIDVLKGGSVTNNVKLKHGIALNDTMPRVDLFQNKKTKKYYLVPIYVNDFVKDKLPNKAIVAGNKPWIEMDDEYEFKFSFYKRDLIEIKTKKTPTKESVQILGYYDSTHSGTANLTIKSNDGASEYSFGSQNLVFIRKYQVDALGN

SEQ ID NO: 7349 - protein, 1104 aa, unidentified
  REGION 1..1104: note = Description of Unknown: Cas Enzyme sequence
MRLGLDIGTNSIGWWLHATENDEITEVIDGGVRIFSDGRDPKSKASLAVDRRAARAQRRRRDRFLRRKAALIKRMAEAELMPADPIEAKALELLDPYALRAEGLDRELPLTHFGRALFHLNQRRGFKSNRKTDRGDNESGKIKDATKRLDEEMAIKKARTYGEFLHMRRLTATDPKQIPTVRTRLSVARRDNAEKEEVGYDYYPDRHHLSEEFVQLWAAQAKYSPDVLTDDLRDEIRLIIFHQRDLQKPKIGLCLFSGQHGIPPKDKRIPSAHPVGQRRILFETVNALRIAARGEPARGLTREERDKIIHAMDNRTHVKDVKKMALTLKHLGNKVIKLRPEQSFTLETTNRDAIACDPVRASLSHPNRFGPRWSTLDEDAQWDVVQRIRAVQSEVEHDGLVGWLMMTHALDRDSAEATANAPLPEGYGRLGLTATTRILEALEADVIPYSAAVAACGWHHSDQRTGEVFDPRRWIEDENETPEDWEWPLPYYGEVLDRHVIPGSFDRSQHDPRTQAPEYFGRITNPTVHIGLNQLRRLVNKIITVYGKPDEIVVELARDLKLSEDQKRDVQREIKKNTDAAKKRGEKLVNELEQKDTGANRMILRLWENLGEDVLTRNCPYSGKRISPGMLFDGSCDVDHILPYSRTLDDGFANRTLCLKEFNRQKTNKTPWEVWGETPQWEVIAANLKNLPPNKAWRFAPDAMTRFEDENDFSARALKDTQYLSRIARTYLDALYDGQDGKSHVWVVPGRLTEMLRRHWGLNGIEALSDSDKHTVKSKNRTDHRHHAIDAAVIAATDRSLIKRISDMAQRDEINGAEQVARSVAPPWEGFREDIAVQVQRIIVSHRADHGRIDPALRKSGKDSTSGQLHNDTAYGITRDGTVVSRKPLLSLKPNDIAITTRGANIRDADLQRHLARVTRGLDGKAFEQALSEFANARKLPDQTDNPYLGLRRVRLEEAVSVIPISDKNGITYKGYKPDSNSRYEVWKLPGGTLTHHVVSTFDAHKDTASRPHPAAKRIHRFHKGDLVRLEESKFGSVIATVEKFDGNGTIELVPHNEENASDRYRKDKEDLYIRLRPTSLQKAKARRVYVDEMGRLRDPGPHG

SEQ ID NO: 7350 - protein, 1419 aa, unidentified
  REGION 1..1419: note = Description of Unknown: Cas Enzyme sequence
ENRLGQFKDSSETKIVYKKSQDGSFQFLFTDAYNEMVEDFRQTQPHLFKNKGKDGNGEARRIPYDWTLYYLRKKALTQAINKEELAWILLNFNQKRGYYQLRGDEIEKEKDDSKKVEFVEILVNDVINTGEKQGKDQTKYKIMLENGMSFVKPSNKPVEWKGKLREFIITTELDEDGNAKLNSYNEVKRSFKSVDSEKDWIAIKTKAEKTINDSKKSVGCYIYDTLLQKPNQKIRGKLVRTIERKFYKNELEAILKTQARFHTELRSPVLLAQCADHLYANNYAHKNDLKKKDFLHLFLKDIIFYQRPLKSKKSLIAECKYEHRFYLDKETNEKKKQYVKCIAKSHPLFQEFRLWEFVQNLKIYQRENRVEGRLKTDVNVTEDFLGGESEIVKLFEFLNDRKSIKQSMFLKHFKLNDKTHRWNYVEENEYPCNETRASFIALLKKNKSFDWQSLLTNENVEKLWHTLYSVSEKEELKSALKKLAKRLNVAESILDPFNSLPPFKKDYGSFSAKALKKLVPLMRRGEYWLEENINRNTVDRIDKILTGEFDEEIQNRVRELIDKRNQDFQSISDFNGLPLWLASYIVYDRHAESDDLQKWKQPENIELLKQHSLRNPIVEQVINETLQVVKDIWKEYGGGEENFFDEIHVELGREMKNPKKDRERMTKQISNSKNTNERVRAILKELMTDKSIEGNVRDYSPSHQEIFKIYEEGVLIQYSEAELKKEKLGDISATAYDVSRKPDPTQREIQKYKLWLEQNYRSPYTGMGIPLSKLFTPDFEIEHVIPQSRYFDDSLNNKVICEAEVNKLKGNKTGYEFIEKHGGEKVTLAGGAEVEVSKIEAYEQFVQRNFRGRKKEIMLMPDIPESFTNRQMNDTRYISKVVLNLMSKIVREEGEQEPTSKNVIPVTGKITSRLKRDWGFNDVWNELLVPRFMRMNELTGTTDFGYEDEQVINGKPSGNKFFRTQVPDELKRYFEKKRIDHRHHALDALTIALASRSHVNYLNNQNAAEAKVNERIDLRNKLRRIEEKQIIDNKTHLPKKIQVAKEFLKPWQDITQEVSDALAKTVVSFKQNKRILTKTNNYYESYKDEDGQLRLDKAGIPQKGLVKQKGNNRSVRKPLHQETVHGKISLRDTKSVTFANGLKDWKNLVDKDLKTIIKRLYREGHDEKTTVKYFKKNPYCINNEEVRKVEVYYYKEELSATRKALDISFNTKTIESVTDTGIKQILLNHIEQNIYQNQLDDTGKQLAPETLAFSPEGIEEMNKNIKNLNKGKEHQPIYKVRKYEALGKKFPVGENGNRKEKYVVAASGTNLFFVIKEHRDTKKREFETVPLRDVIDAMKAGVPFVEEEVGYSWFTLSPNDLVYVPTDEEMENPSSVDFNNLSKEQVDRICRMEKASGIECYFIYNNVASLIKQYDSKSK

SEQ ID NO: 7351 - protein, 1138 aa, unidentified
  REGION 1..1138: note = Description of Unknown: Cas Enzyme sequence
MNYYNGFIITENAMTSKHENLGPLTFGLDIGIASVGWAVLGDERIIDLGVRCFDKAETAKEGESLNLARRSARLLRRRLRRRAWRLTKLARLLKREGLIPNANFFKHRIEKYTLAPKSSWQLRVDGLNRPLSAEEWARVIYHLCKHRGFHWISRAEAKPIEGDSKSEGGRVKQGLAETEKLKRAKNYRSAAEMVLAEFPEAQRNKQGDYSKALSRLLLNDEFVLLFRRQRELGNSHTSAEFQEKILGTGDKKSGLFWAQNPALAGNDLLKMLGHCTFEKTEYRAPKASFTAERHVWLTRLNNLRIVVDGTTRQLNEAERRVALLMPYQQVSDLSYKQLRAALTKAGYLPESFRYTGLAYSSGQKADEKAKDPETAALVKIPAWHELRKTLEKKELTSEWQKISTDALDGKPQLYDQIAWVLSVYKDDAEVEAELRKLNLPTTEKMIDALLDIRFDKFSNLSIKALRQIVAFMEQGQRYDEAVANIPEYGHHSQLHKVGAGEHKYLPPFYSGRDKDGRMVFNDDMDVPRNPVVLRALNQTRKVVNALIKEYGSPHEVHIEMARDLSRPLDERRSIEKLQKEFRDNNEKGKAQFAQDFNIVGAVKGKEFEKYQLYREQQGKCAYSIEPMDIHRLFEQGYVEIDHALPYSRSFDDSKNNRVLVLAKENRDKGNRTPFEYLNGKDNSERWRQFVAFVEGNKAYRLAKRSRLLRKDFGEKEAKEFRERNLNDTRYICKFFKNYVEQYLQLHEDSEAKRCVVLSGQMTSFLRARWGLVKVRSDSDRHHALDAAVVAACSHSMVKRLSDYSRRKELKQVREGFVDVDTGEIVNPAMFQQVQDHFPNPWPHFRDELKLRLNMDDPALLRSELEKVSTYSLETLEALRPLFVSRAPQRRNSGAAHKDTIYAQPERFVAQGGVTQKVALNNLSLKDLDKLIDPHRNEKLYSAIRTRLELHGGKGEKAFPSINPLHKPDSGGNQTGPIVRGVTMVIDKLSGIPIRGGIAKNDSMVRVDVFTKANKFHLVPAYVHHTVARTLPNRAIVAFKDETEWTLIDGSFEFCFSLHSNDLVLVQQKGKAAILGYYSSCHRGTGNINLWAHDRSLQVGKSGMIEGIGVKTALSIEKFNVDILGKRYPAPPEKRRDLA

SEQ ID NO: 7352 - protein, 1124 aa, unidentified
  REGION 1..1124: note = Description of Unknown: Cas Enzyme sequence
MCCYFELVNGSTANSEQFQFARKSRKFKLQIFSCAEIIGVFGGHVRLGLDIGTNSVGWWLYETDGSEANARIVSVMDGGVRIFSDGRVPKSGASLAVDRRTARAMRRRRDRYLRRRATLMRILAGSGLMPTDPAEAKALTVLDPYELRAHGLDLMLPLTHLGRALFHINQRRGFKSNRKTDRSDNESGKIKDATARLDWAMRDTGARTYGEFLNLRRTRGSDPRQVPTVRTRLSIAKRDGPDSKEEAGYDFYPDRRHLEEEFHELWAAQAAHHPKVLTDSLRDLVFEKIFYQRPLKEPEVGLCLFSGYGDIPSDERRLPKAHPMTQRRTLYETVNQLRVTGDGRGKRPLTLEERDRVVHALDNRKPTKKLLSMGMKLPALAKVLNLRSGERFTLETGVRDTIACDTIRASLSHPDRLGPRWSTLDDQAQWEVVSRIRRAQSDAEHMALVDWLMQTHALDVEHATATSNAPLPEGYAKLGLTATTRILEHLKARVVTYSDAVVECGWHHSNQRTGECLDHLPYYGEVLERHVIPGSYDKNHDEVTRYGRITNPTVHIGLNQLRRIVNLIIKTYGKPNQIVVELARELKQSEQQKKDAMRNIREATYAAKKRSEKLRELGQQDNGRNRMMLRHWEQLNPEDCMRRFCPYTGERISASMIFSECDVDHILPYSRTLDDSFFNKTLCLTRANRQKTNKTPYEAWGGDSECWTIIETNLKHLDDRQRWRFAPDAMVRFEEENDFLDRALVDTQYLARISRAYLDTLFTEGGHVWVVPGRLTEMLRRHWGLNKLLNDGERGAIKAKNRTDHRHHAIDAAVVAATDRSLLNRISRAAGQGEAAGQSAELISRDTEPPWEGFRSDIDARLSRIIVSHRADHGRIDREGRKHGRDSTAGQLHNETAYGIVDETRVVSRTPLTALKPGDIELTPKGKNIRDAQLQRVLYAVTQNKEGKAFEAALTAFSRVPGPYQGIRRVRLVETLQASARVEVGKGNDGQPTKAYKGDSNHCYQLWRMPDGKVKSHVITTFEVHAGVEKRPHPAAKRLVQVHKRDMVALERSGKTEICYVQKFNQAGVLFLAPHLESNADSRDRNQNDPFALYRMSPGPLAQSGLRRVSVNEIGRLRDGPRIR

SEQ ID NO: 7353 - protein, 916 aa, unidentified
  REGION 1..916: note = Description of Unknown: Cas Enzyme sequence
LNPFALRAKGLNKVLTPAEFGRALFHINQRRGFKSNRKTDKKNNDNGALKTAIKQLRETLKTENCRTVGEWLNKRDVAGLSVRARYHQDKVIKDDGKSKINKYYDLYIDRAMIEHEFDELWKKQSELNPALFTEAARDDLKDVLLHQRPLKPVIPGRCTFMPDEERAPLALPSTQRFRMYQEVNNLRILRENLKEEPLTLKQRDDLIAALEKNNKCTFTKIKGLLGVGGTVKFNFEDPKREELKGNTTSAILSKKEHFGPAWFEFNEEKQDAIVLQLVKEENEARLLRWLQDEIGIDEKRAEAIANVGLPEGYGSLCTQALARILPELRRDVVTYDKAVQAAGFEHHSNISPSATGEILLELPYYGEALQRHVGFGSNDPKDNSEKRYGKIANPTVHIGLNQVRLVVNTLIKRYGHPCEVIVEVARDLKQSKAQRDDDSKRQALNQKRNQRLRTDIADVLQISEERVRRDDIEKMILWEELSDDPADRKCPYSGAQISAAMLLSEAVEIEHILPFSQTLDDSLNNKTVALRQANRIKGNRSPWDAQNDFVSQGWNYVDIIARAEHMPKGKRYRFGENGYQLWLKDDAGFLARALNDTRHMSKVAREYMSLICPNTRVIPGRMTAMLRAKFGLNDVLGLNGEKNRNDHRHHAVDACVIAVTDQGMLQRFAKASANAREQQLNRLVDNMPLPWESYREHVQRAIDAIWVSHKPDHSHEGAMHNDTAYSLLGEGKVSTHKIVDGKRERIEESLKVIAFADAKANDRHGVLENGKPRPYKGYKGDSNYCIEIVRNEQGKWVGEVISTFEAYQLAREHGAVRLRHPTLSISGKPLVMRLMKNDYVRFNVDGTTGTFQIASINSAGRLTLASHQEANVDARNRDRDGNWRYVYKQAGSLMTAKGRRIIVTSIGELRDPGFKD

SEQ ID NO: 7354 - protein, 1090 aa, unidentified
  REGION 1..1090: note = Description of Unknown: Cas Enzyme sequence
GTNVRYKIGLDIGIASVGWSVINLDIPRIEDLGVRIFDKAENPQTGESLALPRRQARSARRRLRRRKHRLERIRRLLIREGILTKKEMDMLYTNKHEIDVWHLRVDALDRKLNNDELARILLHLAKRRGFKSNRKSDRNNKENSTMLKNIEENRTILSGYKTVAEMIVKDPKFALHKRNKGENYTNTIARDDLEKEIRVIFAKQREYGNIKLTETFENEYITIWSSQRPFASKEDIVKKVGSCTFEPKEKRAPKATYTFQSFVAWEHINKLKLVSSKGNRILTNEERRLLFEKAFHKNKITYHDVRTLLHLPEDFHFKGLLYDKNESLSVNEKVRFLELDAYHKLRKAIESVYGKDGTNSFYPVDYDTFGYALTIFKDDNDIRSYLLNQYEQNGKVVKNLADKVYDEELIDELLNLSFSKFGHLSLKALRRIIPFMEEGDVYSLACEKAGYAFTGPKKKQKSVLLPNIPTISNPVVMRALTQARKVVNAIIKKYGSPVSIHIELARDLSQAFDERRKTKKQQDENRKKNETAINQLVEYGLTLNPTGHDIVKFKLWSEQNGRCAYSLQPINIERLLEPGYTEVDHVIPYSRSLDDSYINKVLVLTKENREKGNRTPAEYLGIGTDRWKQFETFVLTNKQYSKKKRDRLLRLHYDENEEIEFKNRNLNDTRYISRFFANFIREHLKFADNDDKQKVFTVNGRITAHLRSRWDFNKNREESDYHHAVDAVIVACTTPSNIAKVTAFYQKREQHKELAKKAEPHFPQPWPHFADELRARLTENPKESIKALNLGNYDVQKLESLQQVFVSRMPRRSVTGAAHQDTLRRYVGLDERSGKIQTVVKTKLSEIKLDKTGHFPMYGRESDPRTYEAIRQRLIEHDNDPKKAFQEPLFKPKKNGEPGPIIRTVKLIDTKNQIIPLNNGKTVAYNSNIVRVDVFEKDGKYYCVPVYTMDIMKGILPNRAIEANKPYNEWKEMTRDYTFRFSLYPNDLIRIELPKEKTIKTVGGKERKIKDVFVYYKTIDSATGGLELINHDQSFTLRGVGSRTLKRFEKYQVDVLGNIYKVRGEKRVELASSGHPSTRKAVRPLQSTRD

SEQ ID NO: 7355 - protein, 1065 aa, unidentified
  REGION 1..1065: note = Description of Unknown: Cas Enzyme sequence
MATRLGLDMGTNSIGWCLTEDDGRIVGIGARIFSDGRDPKSGASLAVDRRDARSARRRRDRYLGRRSAFLDTLVEHGLMPGDANEGKLVAERDPYALRIRALDERLDPFDIGRALFHLNQRRGFKSNRKAERKTKDGEDGKIATGAKELDIAMTIAGARTLGEFLAMRLAAGNPARVRMNGESQAYDFYPQRRHVEDEFVEIWTAQARHHPALLTEGARAALHRILFFQRPLKEQEVGLCLFAGRYDVPKGDRRLAKAHPLFQDRRLYEEVNQLYVTTPGEIARPLSKGERDKLILKLRGVKAASFDSLAKLLKLQPGQSFNKASATRTQLAGDEIYAAMADKKRFGTAWPHLDRDRQWAIIERLIDEENPDTLYAFLTGDCGLDDDHAAATAKASLPEGYGRLGPTATARILDALKADVITYDKAVSSLGWHHSDERTGEILPQLPYYGELLTREIPPGTQDPNDPPEKRWGKITNPTVHIGLRQLEKLVNDIIKIHGRPDQIVVELARELKLNEKDKEEHEKRIRRDTAAAIGRGKKLDEEGFTDNGANRMLLRLWEDLNPYNPLDRRCPYCGELIGMRMLFSGGEADIDHILPYSRTLDDSAANKVVAHRRCNRTKGNRAPFEKWGQDDDRWGIISTQVARMHKSKQWRFGPDAMDRFEQDGGFIARQLTDTQYLSRLAGRYLSSLYADKDESNVYVIPGRMTAMLRRLWGLNSLLGDHNFVENKHSDAPKNRLDHRHHAIDAAVVGSTTRSLMQRIARTAGLAEDKNLDRLFEGLDPPWPGFREELRERLNAVTVSHKPDHGRKGQPAPGKDVTAGQLHDDTAYGLTGDFGPDGKTPVVVKRVDFFSLDAKDIADPDRIRDATLRDELQRATAGKIGNDFERALASFKRDHPQFKGIRHVRVLGERAGTPTLNVIPIKDNQGRAYKAYKGNANARFLIWRMPDGTWKHDTISVFKAHQAGFAPPRPHPTAKKILDLRQNDLIAIDRGGGPEFMRVVKFSESGQVTLAAHNEAGALKARDTASNDVDPFKYIAPTAGGLKKIKARQVRIDPLGRVFDPGPRA

SEQ ID NO: 7356 - protein, 1038 aa, unidentified
  REGION 1..1038: note = Description of Unknown: Cas Enzyme sequence
MATMRYRLALDLGSTSLGWAMVRLNQNNEPHAIVKAGVRIFSDGRNPKDGSSLAVTRREARAMRRRRDRLLKRKSRMMFNLVEYGFFPTNSVTRKEFELLDPYELRARGLNEALQPGGFARALFHINQRRGFKSNRKTDKKENDAGALKAALKNLRAAMAADGSRTVGEWLYRRHKNGQTVRARYRQTPIKQDNGKTKIDKSYDLYIDRAMIEAEFDALWISQTKFNPILFTENARIALKDCLLHQRPLKPVRPGRCTLLTDEERAPLALPSTQKFRMYQEVNNLRILGEGLIEGPLTLDRRNLLIAALEQHSKRSFTQIKRLLGLSGTAQFNFEDPKRQELKGNTTSAILSKDGYFGATWFDLGLERQDEIVSKLVNDENETHLMTWLQNEFGFDENQAEKIANAPLPEGYGSLCTKALNRILPELKREVITYDKAVVAAGFEHHSRLNTFSEIPGKTFDTGFERTDPETGEVQRIHAFNVLPYYGEYLQRHVGFGTGIPEDHPEKRFGKIANPTVHIGLNQIRVVVNALIKRYGHPSEVIVELARDLKQSQEQRKEDNKRQADNQTRNTRLRQDIANILNISVERVRRDDIQKMLLWEELGHDAADRRCPYSGVQISVQMLLSEQVEIEHILPFSQTLDDGLNNKTVAMRQANRIKGNRTPWEARADFEAQGWAHEDMLARAEKMPKNKRYRFGDEGYQRWLREDKTFLARALNDTRHLSRVAREYVSLICPQNTRVIPGQMTAMLRSKFGLNDILSLHGEKNRNDHRHHAVDACVIAVTDQGMLQRFAKASASAREKNLTRLVGSMPLPWETYRTHVERAISAIYVSHKPDHGHEGAMHNDTAYGLLGGGIVRTHKIVDGVRKREDSTLKVIEMTSTKVPERHGMLPDGSPRPYKGYKGDSNYCMEIIKTDEGKWASEVISTFQAYQIVKNNGVQALRNPNFSVNGKPLVMRLMSGIMVRLKSNDSLLTLRVVKLSTTGTIALASHQEANVDARNRDSGDVFKYIYKSASSMRSAEARSITICPIGGVNDKGFVD

SEQ ID NO: 7357 - protein, 1537 aa, unidentified
  REGION 1..1537: note = Description of Unknown: Cas Enzyme sequence
IKQNMTSSRKILGLDLGTNSIGWAIVDEGKEEILGMGSRIFPEGVKAETIGQGDREVSKNAARRESRQMRRQFYRKRLRKIKLLRTLIDFDMCPLSHEELNDWAKWEKSKGKAGRKAPSSSDYMIWQQQNPYELREKALHADLTLYELGRVLYHLIQRRGFLSSRKGNDDGAIYKGKPGMVGIDDTEKQIKEGTLGSFLMSIYPKQGEPFKKLIDEQGNELRVRARYTLRDMYVEEFHQIWERQESVHKLDSKQAIKSKKRFVKGSLESKRNINKIEKINSKYGSDNFETIELKDSDGNINGYKIITKSSVSLKEFLGGKIENDKEGNIKHQSKESVLFWQRELRSQKGLLDQCRFEATIKDKNGKVLINGKNPSQLSHPLFEEFRAWQFINNIEFGKNEKLDDNQRIQILELINSKDANFNFSEIPKKLKLEFVKWNFLEDAKVPGNPTIKNLQTLFKPDVLEKHRNEIWHCFHFYDDNDLLIAKLKKDFGLLEKDEEKAKKIKLKEGYSNVSLKAISRITPYLERGFQMSEATLLGGVRNSFCDRWDYFKTSHQTIEKDILAINRKQGNKEGQAIAEIKEYLVKNDFGFKENDLNFLRLYHHSQEIVVKELKEKLDSIENLRNPIVQHTINETRRLVNQLIKEYGKFDSIHVEMGRNVKNSKKGRQEQSNRINENTNKNDVARKLLTEYGLKHDRNNIQKVLLYKEMQERGVVTICPYTNKAVNISDVLGSQNKFQIEHIIPKSVSLDDSFGNKTICETSFNGLKGNLTPYQFYLKNPDTKLWSATSWEEIEQRVFRVLPYKKAKKFTAKLKENDEVVKNGFIERQLNDTRYIGRKTKEIMSQICNDVKVFPGGLTSELRHLWGLNNILQPTMLVDIPNYKIEDGKSIPHYVVLDEKGIAVESSPIYNDKPKLGANQTAISGKIEKAVFTSNEKFVNLTIRQEGLSNGDYWLNVNLSEPKNLVRIFRERPDSDENQIVLRGRIEKEKFKNDGIGAVSAMGNDNGSYWAQFTVTSKIFEKPEKDKTPKKTTKQLLLYGEVKNGLFNSYIYSCETDELDGRYWLLLDVDFESAYFEKAINERPVEKEKQIIIEGSINDNGVFVSEMDMNHTFLSNEKQGKYWVVFDLLGDLTNFTPQEVPKPILESKQKLVEGSIWIDKHTGEIRFDPKKNREDHRHHAIDALVIALSKQSYFQQLSIYNANRVLKRKVLTHEKEQLNFPEPWDSFHKEATQLAQGILISHKQNNQVLTQVRKKIVKDGQVFKSVGDSVRGQLHKENVYGRKQAPSETTKGYHRRKYVADLKDNQVDKIVDLEIRKIIQNAREEEKGIKKQIDSLLKEKKKSRTEEEDNLFDVQIEAKRSEIVQLYTLKNTKGGERVPIKKVRIREEMSNAQPLKEDLHFVNPRNNHHVVILESEDEELSQGIISFWEVVHRKKHGELLYQSTGEKLSLKETLEANDMFLLGLNDEEIFDNKFDSKYLSKHLFRVQKISNGDYSFRHHLASTLTDSNQEIRISSMKKWKEMNPVKVSVYETGKIEVK

SEQ ID NO: 7358 - protein, 1206 aa, unidentified
  REGION 1..1206: note = Description of Unknown: Cas Enzyme sequence
MRAPYRIGIDIGTNSLGWCLVQLDPVGKPCGIIDLGVRIFRDARNPKSRESLAADRRLARAMRRQRDRRLRRKARLIKVLVKHGLMPEDRIERRQLCTNSKEAGIKAPDPYELRARGLDERLEPFEFGRALFHLNQRRGFQSNLRTDRVSRASKEGSPKHAAKKLESLLQGDDGSPSYRTLGELLYRAGFGPSVRATKVGGSEKLRRFRPTAIRAGSPAYDVYPLRAMYLAEFEALWDAQRRFGLELRDFEAARDETRRAIFDQRPLKPVPVGKCRFNPDDPRAPRALPIAQRFRMLQELNHLRWIDRNRQPHELTASQRARILSKLELRKKVTFDEIRKQLAEELGGSQIEFNFESELRKHLDGDRTAAELSNKRRFGARWWRLSLEERNEIVESLLAAQDEEELKHVALSKWNLTPDQADALLDADLPDGYSRLGRRAIRAMLPHLEAGKRYDEAARAAGYAHHVPHDGQLLEKLPYYGERLIAHTIEVPSASDPAEREYGRLPNPTVHVALNQLRRVMNEIIDRYGRPEEVVVELARDLPMGAADLRKHNREQEENQRRNERLKDEIASLLRDAGASEREVADALRRNDAVLRMRLWKELGPVHDRCCMYSHPPRPISIRALFSSEVQIDHILPRKETLDDSYANKTLCYAQANAVKRKRTPYDAFANHPDYDWQAILLRAKNLPKNKRWRFAADAMERISNAQRPGVPPELADQFTENDGFLARHLVDTRYIARVAREYLTAVCDPRRVWPVTGHVTGLLRAKWGLNNLLPSHNVSGSDDQRVRKNRLDHRHHAIDAFVIACTDRSMLQQVARTTDDGRTKAFESMPPPWPEFSLSELREKVRKIVVSFRADHGSSGIDPVTGRTRTTGKFHNDTAYFPVGTAKGAALVRSRKSIADFATQEEIDAIPCPALRARLQAWIEGETATGKSLKEACASFAHETGIRKVRITEPLTVIPIRDKKTGRIYKAYKGDSNERMEVWRLPNGRWVGQIITTFEANQPLLGSRRRPHPAARLVYELYIDDMIRIEDAALGERTMRIVKMSGQNVFLADHYEAGALKKRDETDNEVDPFKYLIRSVSTLQALKLRKLRVSPSGRVWDPGPPVIGRVVEIAEDGRHLALSRGFMTVSASGAEIGRVPLDDIAVVLVNAHGTTYSNNLAVALAERGATIVLCGSNHMPVAWMWPLSGHHVQAARMRAQLAASR

SEQ ID NO: 7359 - protein, 1061 aa, unidentified
  REGION 1..1061: note = Description of Unknown: Cas Enzyme sequence
MGNNKESNIWAFDLGLGSIGEAVRVGTEFKHVASLLIPPEFAETKTAAGRRRMMRTRLAHKAREDWLDVVWREAGLEPLQKRRPYQDPVSKKWIPEKCQKGDARLEREFAGEGDDTCYTSCLLRIKLLRGEKLEPWQIYKALHSAIQKRGYDKDIPWKRAEAKRAGIKFEDLEKAEAKAEAELAKKDPTYQAALGAWKQFISLVPKEFHFPCYYDALKMGLWNEAKPFELKSQIDHNADSTRNVRFDRPDVTKEIHALATAAGKQIPALKGKADYLLFGPAGEPYASHDAGLRKQHKLHLGSKDDWQGVLGQKIPRFDNRILADCTLIPRFHVCKAEDELVRDVTYLQKLKNLCVLRCGIQQKLTVDNIRELFSNSKPETLSFTTAQWKKWCSANAYTPIINSGHEAIAAPKASGRSRFSRPALRLVKELFLSGLEPAAFYEKMKSEVEVNTNPLKGLVIADLKFIADLKDQTWASFYLPEQKLDAIEAQHSKNGVLNKEAAIRSVIGSINDPIVRHRLTAFNQRLQHLEAAHGLPDEVVLEFIREDFMGEKAKKELKDFQQKREKERELSRSEAAQFSDSKSAPLKLELLRQQARQCLYTGDPLIEEDLDHYEIEHIVPRSAGGPDAMVNYVLTKRETNTAKGDLTPYQWLHKTDTWDAYKNRVEKATINNKKKQLLLREEAPELVERYTALAETAWISKLAQKIVSFRYGWRNGIDKDGNKHITVVSGGLTGRIRRKFKLNHVLNPQAATEEEAEKKNRTDDRHHALDAMVISFIPGWMRDKTKQHFFKFPEEVQKNPRGFFELEIGKVHPHNLVFEKARLGETIYGKRVKGEESLIVQRSSLLDLAYKAVQMKKFYDLDYLKKQINDIRDKNIQQRLSDLVSSNLSEAEWRTFCATFRQLSQNGRHGSLIKKLWMNAADPESYRDLSKDGSGAYFQRKKSHKGQIIYLELKTDDKGKVSEVPCVEPVYVFDSQKQVAARLKDKHGDSIRIYGFFQSGCSIEITEDLVHNSTITLNKGRYLLNSIISSTGQTLVTSSSGQKSPLISLKKIIAAGLKRVS

SEQ ID NO: 7360 - protein, 1291 aa, unidentified
  REGION 1..1291: note = Description of Unknown: Cas Enzyme sequence
MKRTLGLDLGTNSIGWAIITEEDGKKKLAHAGSVIFPEGVARVKGSEQPSTLDRTRSRATRRLYFRRRMRKQKLLRALVSNGMCPLSAEGLNDWIKKDEYPREVAFTEWFKSNPYELRAEGLERKLTLLEIGRVLYHFAQRRGFKSNRKGGDGEQLSFTAGIPERGIKGYSDTQIKLEQYGTLGKAGVALAAQNEAIRRRFVRRTDLEKELKQIWEVQCKHHPAVLTEQLEKLVAKPKESVVFFQRPLKSKKGTVGRCTLEKDKPRAPISAIEAEIFSILHTINTIKVDDRLLTEAERAVVLPRFFMKSNKTVPFADIEKQLKSIGTTGKFKFSRDVKFTGSRTVTWLADLWDVKPLEIVKLFAEQSDDPKAMDARNAWDDRWSAVYNAEDFDELSEVKASGGNTGTKRDLKEYAMTVWGFGEEKLKGLQGFKCKQGYHSLSRKALRRIIPHLYKGTPYHDAVLLAGLPAVFGKQWAAFSNEERAAIEAGVHDQINTQRSARTKTILTNGLVRRYRDTYGEEAGKMNWSNDWNEALDKTLEEGLDQGTKAELGDAGIKKLRGDIEADFRSHVARGPVKFILPKRIEQRVKDWLADNFALGQKALDKLYHHSAIETYPRSKTMLGSPAIRGLNNPMVMRALYQLRKLGNRLIELDWVDETTQVNIEMTRELDSANRRKAWERYQRELEKKNMAAAEVVQEAFGNRPHDPTKTEILKVLLYEEAKELWKDPKCVFTGERIGGIKDLLDSGDWEIEHIWPRSKTNDNSQANKVLCLKEYNASVKRDKLPPYLPNYEKEAMAAGKMRSSIVSMLEPIEAKVDGYTAAINVRKENAKRASTKEEKDKAIQDRWYFQFKLDYWRTKLEHLTALEIKPGFLNRQLVATGQITRQARAYMNSYFNRVASYKPEALTSFRRAWLGERYEEGKDRNYHTHHAKDAVVAAAVDRDLFDSLAHHYELEDNKHITKTFPYPWPNFSAEVNGLEHGGLVTHNYVDVLGRVSRYRRKMPDGTVRYATGDTVRGSLHKDTFYGRIKLKKEGTDEYEEHTVLRRSVKDLSKVDYAKVVDPVLRKKLEEAGPELIAAREGLPVLVSGKEQIVKRVRTFEKSVKNPVPIKMHRDQKDGAEHKHWLWVKNDVTPLMAIYENEKGKRTHHVYSLLELTRLMHGREGRDELLGSIPREHPEPKRKGYHLVERDGKPYIMRVGQTVVLYKDDPEEIQWKDQRDMNTRTYIIRKLEGDGRINLVNALDARMDDELEEVSVWDPAKPYTWLRVRLSNFNGLVVGIDRVLDLATGVH

SEQ ID NO: 7361 - protein, 1168 aa, unidentified
  REGION 1..1168: note = Description of Unknown: Cas Enzyme sequence
MSGNSAIPFEKKKLYRGLAREQIDALGPLTFGFDIGIASVGWAVLCGTRIVDLGVRAFDKAETADKGESLNLARRTARLMRRRLRRRAWRLVKVARALKRHGLITDSKLFLTQPSYVDSVWQLRKAGLDRLLAPAEWVRVIYHLCKHRGFHWTSRAEAAQAEGDAKSENGKVKQGLAGTAKLMKEKGYHTAAEMVLAEFPDAQRNKRGEYTKALSRVLLAQEFSLLFERQRELGSIHATTELQSELLGDGDQKSGLFWAQKPALSGADLLKMLGRCTFEKTEPRAPKASFTAERHVWLTRLNNLRITVDGVTRPLIDVERSIAIPLPYTRSEKFTYKDLRTALQSAGLSTEFRFAGLSYPSLRQREENKAKDPEAETLTKLTAWHDLRLAFKRKSLETTWQQLSTPALDGDPTWLDQIGWTLSVYKDDDEVLRELRKLSLPGGDACIDVLLGIRFDKFHALSLKALRQIVPKMEAGMRFDEAVAAIPAYGHHSQPISRESERTTYLPAFYTRREKDGRLKFNEDLDVPRNPVVLRALNQARKVCNALIKVYGAPHAVNIEMARDLSRPLEERREVLAAQKEFRERNEKAREHFEETFGHKSTGATLEKWMLYREQMGKCAYSLDAFESPDRVINDASYAEIDHVLPYSRSYDDSKNNKVLVLARENRNKGNQTPHEYLTALDGGDDGPRWRSFVGFVDSNKAYRQAKRSRLLRKEFGKDEAKSFMERNLNDTRYICKFFKNYVERFLQLAETSEVKRCVVVSGQLTAFLRARWGLLKIREESDRHHAMDAAVVAACSHRMVKRLSDYARRRELSAVSRGFIDLQTGEVVDAAMYQQLERHFPEPWSHFRHELHARLKLDDVSQMREQIVVLGNYDDPALEALKPLFVSRAPQRRNGGAAHKETIYAQSETLKETGSVKQKVALASLTLKVPDIDKFIEKLVDPHRNAMLYEAIRDRLIAHGGKGDKAFSVASPLRKPDKLGQPTGPMVRSINVLIDKMSGIEVRGGLARNDTMLRVDVFQHKKDRKFHLVPVYVHHRVAGLPNRAIVAFKDEADWTLMDDGFDFLFSLHANDLIRVVQRGNVETIGYYRSCHSGTAALNIAVHDRARYALRSSSLAYSQKNPGKDIPNDKLGLIEGVGVKTAVSVEKFNVDTLGHAYAGPLETRRDLA

SEQ ID NO: 7362 - protein, 1024 aa, unidentified
  REGION 1..1024: note = Description of Unknown: Cas Enzyme sequence
MAYRLSLDLGTNSIGWCLLKLVNSAPVGIETVGVRIFGDGRNPKDGSSLAVMRRGPRQMRRRRDRYLSRRSRLMAALIKYGLMPETEEQRKALEQLDPYELRFTGVDHPLPLHHLGRAIFHLNQRRGFKSNRKLDKGTADDSGKIKTAIRHMASLMEEQKVRTVGQFLYRRHAERQSVRSRLNGEGAKSFYEFYPDRALTADEFNILWAKQRDSHPNVLTDNAKSEIENILFFQRNLRPVHPGKCTLEPDDERAPWALPMAQRFRILQEVNNLRIKVRGQADLPLTIEQRDSVVAALLEKPKLTFDQIRRLLKLPSDIKFNIESEKRKDLKGDETAARLSKKDLFGKAWFDFSQSTQMEIIERLLDDADEKRVIAWLMAEFGVTQTQAEAIDGAVLPDSHCRLGRTALGKVVPQLEKDVVTYDKAVALADPNYHHSDFRDGEIFDELPYYAIPLERYVAFGSGEPNDSEEKRFGKIANPTVHVALNQVRKLVNALIAKYGPPEQVILEVGRDLKNNKEKKDEIKAEQKRNQDRNDRFRQELQKMGIAETGENLMRMRLWEELNPTNVLDRRCPYSGEQISLRSLFTEEVEIEHILPFSKTLDNSAANRTVSMRWANRIKGNRSPHQAFSSNPNPKIVWDEILDRAESMPANKKWRFHADAMQRYENEERDFLDRQLTDTQYLSRITKEYLSKVCNPDAVWVTPGRLTAMLRGRWGLNQILSDHNRKNRTDHRHHAIDAVVIGVTDRGLLNRLARAAALSEAQNLDKLLAEMPEPWPDFHSEARDKVQSIIVSHKPDHGRQGALHNDTAYGIVSGPNAKGVSEVVTRIPLTAIAKAADLKLIRDDAWRKRITDAVSGLPEKEWKQALQALSDQTGIRRIRIVESLSVIPIKNRQGRVYKGYKGDSNCCYEIFLTPKGKWDGEVISTFDANQNDFVAHWHKTYPAAPLLLRLFKDDLLDMEHDGKRRVMRVVKFSQGSIFLAEHFEGGSLKARDAAPEDEDPFKYVIKSPSSLQATGAKKAGVSVL

SEQ ID NO: 7363 - protein, 968 aa, unidentified
  REGION 1..968: note = Description of Unknown: Cas Enzyme sequence
LVGGQTLTWPELWDVLRWYAHNRGYDGNRRWSGQNDEDAEDAEKVLNAHTLLDKHRVKTMAETFCKVMEVDPLGAKSSSIIRFKGLNAAFPRAIVETEVRRILQAHIGRLNGVDEKFATALFSDWKTLPCPTIKLPQRYYGGLLFGQLVPRFDNRIIASCPVTYAQAYEKLCTGGMSHEKAAERARIIAKVPSRNTPEFLNFRWGMLLANVRVARLGNTGLQPLTPAERKELDKRMRTVGSMTEKKFKDAVRDVSGAIRGNFDAMFMEVNQKEALILDPVQDCLTSGHAANLFPILPERIQNRARGQLRRGKTLILGELGKDVPAFDAAVQQILDKVAGKGRKKDKPLTREEILGVRLQANKLSGRAAYARPILVKAFEEVMAGKHPKEENGCLFVTEKMREAQLNRSLTDQTNNHLVQHRLLILSRLLGDMLKEYAGSDKTRVGKLTIEVNRDLREFSGKTAKEIAQDLGSRLANHHHVAEKLEAALGSRSRITAGLIRKARIAEDLGWTCPYTGQTYEPIDLVTRRVDKDHIVPRADRASDSLDSLVITFSAVNKWKGKRTAVQFMQDEQTKPVPDLPNLSVISLTRYRDFVAGLESFKGHNDDKKRKKRRKELMLLADYNEPEFTPRDLTVTSQLVRLGAQVLRKAFDDCEVKPVIVSLPGAVTGEVRKAWDVLGCLSLACPQVLDETGKVKTKKEVRDLTHLHHALDACVLGLAAHHIPNNGRVWELITKRNLTTAEQAELVNCKVFSVVAERRAELNDLSPERKQQIRQRLAEKRVVQHIPKRVSGLHVEQNTWRVREINGDDVLLEQRIRQPDGTRPLKQASERAGKLMGLEPGKLHALQGALVIGDNFGVALDPTPTVIPFHKVWPRLQELKAKNGGKTPRILRNGQLIKVPSGAFRGTWKVFSAKNNKTGMALDIGQPDVVRLKNKTEGHKINVLLSTLLKNGMIGLNTPLTGVAATDTT

SEQ ID NO: 7364 - protein, 1086 aa, unidentified
  REGION 1..1086: note = Description of Unknown: Cas Enzyme sequence
EMIEDFQKCQPQLFENNKKIPYDWTIYYLRKKALTFPIAKAELAWLLFHFNQKRGYYQLRGEEEEENKNKLVEFYELEVIDVLDSGDKKNKDEIWYNVILENGWIYRRTSRIPLDWIGKTKEFIVTTDINDDGSVKTDKDGKEKRSFRSPGADDWTLVKKKTEAEIERSKHTVGTYIYDTLLKCPGQKINGKLVRTIERKFYRDELRLILEKQQTFHPELQDRNNYSICLDELYRNNQDHRIAFGQKDFAHLFINDIIFYQRPLKSKKSEISECRYESRKYKDKEGVLQTEALKCIAKSHPLFQEFRLWQFLQNLNIYQRQKYVEGRLYTDINVTNDFLKSEEDWVALFDFLNDRKEIDQKAFLKYPGFNLKKNAEHYRWNYIEDKTYPTNETRSQILAKLKVSNIPAEFLTIDIEEQLWHILSSIEDKMEIEKALTTFAAKKGLPKEFIENFRKFVPFKKEYGAYSAKAIKKLLPLMRRGKYWSEESISNETRNRITAIVERLDSIEYDKIKIESVTDDDIPKQVLKSFIDCRNPLTSLNTYQACYAVYGRHSEEGAATKWELPTDIERYLRDTFKQHSLRNPIVEQVITETLRVVTDIWKEYGNGQKDFFDEIHIELGREMKNTSEQRKRITSSISENENTNLRIKALLAELKNDSSVQNVRPYSPSQQEILKLYEEGALNSVTDIPEEILKISKNAQSTPSELTRYKLWLDQQYRSPYTGEVIPLGKLFTSSYQIEHVIPQSRFFDDSLSNKVICESEVNKDKDNKTAYAYIKESHGKIIELDFGKKVTLFSLDAYEDFVKNRFAKNRSKMKKLLMEDIPDEFINRQMNDSRYISVLIKNLLSNIVREEGEVETTSKNIAACNGSITSTLKQDWGLNDVWNELITPRFERMNDLTKTNNFGQWTNKDGKRVFQTDMPLELQKGFTKKRIDHRHHAMDALVIACASRSHINYLNNESAKSTSKDLRYDLKQKLCFKTKPDENGNYKWQFTKPWDTFTQDAKHKLSTTIVSFKQNLRIINKTSNWYQRWEKQDDGSLKKIFVKQESGEHWAIRKPMHKETVTGLVQLRFKKIVQLTSALDQWEMI

SEQ ID NO: 7365 - protein, 948 aa, unidentified
  REGION 1..948: note = Description of Unknown: Cas Enzyme sequence
RNDELYITLEQRKAMVDFLDAHEKLTLSDMYSILGISKQDGWWGGKAIGRGLQGNTTKIALKKALGDFENAERLLQFNLENTNSKLLDEVTGEIIQIIDSKLEKEPLYDLWHTVYSISDKEELANALKKKYNINDEDIINRLYAIDFVKPGFGNKSTRVMRRILPYLQQGLKYSDACEYAGIRHSESLTKAENQARQLLDKLPLIQKNELRQPIVEKILNQMINVVNALMSEYGQFESIRIELARELKQSKDDRNTTFLQNEALQRLNESIAKRLSSEGIKPTKRILEKYKFIFPTKGCVDKRTGKFVTKSFDNLSTVNQCIYCGKPFSLSAALNGDECEIEHVIPRDLICDNSQSNKVLSCRNCNKAKNNRTAFDYMRTQSKEAFEAYLDRVEKWFKDGIITSAKRERLLLSHEDYLERKKLGKTTDEDKKYWEEFVSRQVGETQYISRESIRILRQCCRNVYATSGSVTAILRHLWGYDEILHQLNFERYKHAGLTEFVTWESNHGKNKHSKEQIVDWSKRLDHRHHSIDALVVACTQQGFIQRINTLNAYDTKDFMRKQIESENVRFEEKKDLLDKYLISLAPFSTKTVADEVDKILVSFKAGKKSASTGKRIKYVKGKKQVLQVGVIVPRGALHEEGVYGRIEINGKKEIVKKYKLGKGSQGFVFTGKETYEKKEKLDKKTGEYKKIEEDKIKNVLGAIVDGNIRAMILQRLNQGFEDGKDYRDDVKKALENLNNLDKNPIYADKNNTIPIRTVRCRTGLSAIVPIKHNEQGEPIGFVKPGNNHHIAIYRDKEGNLKEHAVTFWHAVERKKYGLPVIIDKPIDVWDSILDKPLPESFLEQLPDVDWTFEVSLQQNEMFVLGMDDEAFENAIHCEDYTMISKYLYRVQSVSESDYWFRLHIETQNDKTPAAKLAGKYQRIKSLKMFFGLHPHKVHISLIGKIKEI

SEQ ID NO: 7366 - protein, 1095 aa, unidentified
  REGION 1..1095: note = Description of Unknown: Cas Enzyme sequence
VKYTLGLDLGIASVGWAVINLDMLRIEDLGVRAFPAAENPKNQSPLAEPRRLARSARRRLRRRAGRLRSIRQLYVRVGLVSDAEMSALFIAISGTPSPWELRAKGLDELLTGPELARALYHIANRRGFKSSRRLADKDTEAGRVLGAIEATRAAMTQGAYRTAGEMLYGDPRFQPEAEGNGTRDLHQPCRRNSKDSYVNSVDRDTLENEVGILLARQRLLGSSHATTQFEAEFLELFTRQRPFATGDAILAKVGKCTFEPTQLRAPRNAYTTERFNLLCDINNKLGWFDAGQKVRATDEQRRVIEELAYNDCDVTYAKVRKALALPDTARFTALTYRDKTGNDSTACEKTGRFCQLKGYKAIRDMAKTVGLWDEVATHPEWMDSLAFALTFYKNEGEIRQCLAEECVPRCLADEAANSPGFAGVSHLSLAAMRKVIPHLERGLVYSDACAAAGYDHSASATGAKFQKLPVEGLSEIRNPVVLRALSQARKVVNAVIDRYGSPCQIHIELAREVGKSAEKRGEIERSIKDNELANKQRDALFAEAFGQAPHNYDERLKWRLYREQQCKCAYSLRDIDINSLLLPGYLQIDHIVPYSRSFDDSIANKVLVLCSENQRKGSKTPFEYFGSDDARWSLFVAWAKDTVRDHKKLDKLISQTPFDLEKQDWIPRNLVDTQYVARFLTSYIRGNLRFSDENVKLPMVCVSGRITSLMRGFWGLSKVREDNDLHHAMDAVVVAAIDQRTIGLVTRYCQARETWRWKAGDTYVDQETGEVVDFKYSFPLPWKGFRDEVNARLSDDPASAIAAIRLPAYSDGLAVNPVIISRMPQRGVTGPIHKETIKSARIKLPGGTVVRPSKIGPEEAARGTREAVIRKHLVDISAKDLENLFAPETNEKLYAEIRRRMEDCGMDAKKAFTEPLRKPTNDGSLGQIVRRVKLREPQPSGVEVRGGIANGDSMVRVDVFTRGGKYFLVPIYVSNFICGTLPNQAIVAHKPEGLWPLMDESYRFLFSIQSYDLIQIHRKGQIIFGYYRECDRAGGQISLSLANNNDTIVRGIGARTVDRFEKFEMGVLGDYHKVGDEVRRGVENSSNIKSGETEG

SEQ ID NO: 7367 - protein, 1105 aa, unidentified
  REGION 1..1105: note = Description of Unknown: Cas Enzyme sequence
MKKILGLDIGTNSIGWAFIESNVYEHPESLNGQILQLGSRIIPMDADAMNKFETGNPESNAAGRTKARGARRLNQRYKLRRTRLIEALKIFGWIPNEFPINFKKKEKHNINAYLPFSEKLKKEAADFFGVANKRTTKEIQYEISEDWIIYFLKVKALHSQINLPELARILYHYNQRRGFKSSRKDNKIENESTEIKYPLYEKWVAIIKVTSIKEAGKGEGKDRDFTFYELACKTADLEFRAIKKRKNPLDWLNKNIEVEITRKTTKDHNVSYTIAEVDQNAWESRKLALEKDIEKEQLTISEYYLQKIRNDRNYTIKQRIVSRKFYQDEFKLIWQKQKEFYQKEFEDKNKIDEIADTFYTHNKEKNKELKGKDLFHLFFNDIIYYQRGLKSQKGLIANCQYEKKTYKTKDGELKEVGIQVTSRSSPSFQEFRIWQTIHNLKLIKKEEIINNKLKINIDASAEFLTTENKEKLFDLFDSSAEVTHESILKLFGFKKDKTVNGEKTYDYKLNYPDDKNFIGNETKAIFRKVFKQHNFTEEGEKYLTNKVLFNQLWHIVYSLPEEEEIITALNNKKYFDLPETIIKHISKLPEFKSQYASLSTKSINKLLPLMRVGKFWSNNNINIKTLERIHKIIDGEFDETISDKARLEIVKRNLSSINDFAGLPTYVAAYIVYGRHSERANESKYETIDDFKIKEIIPYNLLRNPVVEKIIRETLSLVKDIWANEKLGRPDYIHVELGREMKNNNADRKKISEANTKNRIEKERVANLLKELKYPNFNSESPADIDKFRIWKENGGQTGEENFDALFKKSNAEFVKDADIEKYRHWAEQNYRSPYTGNAIPLSELFTEKYQIDHIIPRAKFYDDSFGNKVVVEAEVNALKDNRLAIQFIEDSQGIVINLSNGQKVKILSVEEYKNFADDVFINKKKKRHLKLYEVPEDFVDRQMNDTKYISKTIAQFLRPIAIGNETDEGVIYSSGSITSDLKNKWGLNKLWKEILKPRFERLEGILGEQLILPSATNDCNYYFAKDYKRIDHRHHALDALVIACTSRSHIKYLNSLNSLSNNKKDITKYGEWSKWKYLLNKKKQLENLENGMTEFCIPWGRFYL

SEQ ID NO: 7368 - protein, 902 aa, unidentified
  REGION 1..902: note = Description of Unknown: Cas Enzyme sequence
MNTTQKIQPAKIQPATASNLQLAFDVGHSSIGWAVLEKTGQRASDIKINGCGSVIFRADDCLASSRRAYRRQRRHIRSTRQRIERIARLLAHLLANEKSDKAPELVKRLQLYLNSPSQNCAKLQGEGDSAPWKLAAQILQGGKLLTWPELWDVLRWYAHNRGYDGNQRWSNSSEAENEAAELDDAALDKILKDASATEDEKKDAEKVIEAKNLMRRHGVRTMAETFCKELGIEPKGEKKSSMKRFKGLNAVFPRKTVETEVWQILQAHKFCDTKLIHLLLAKKLSDEDRQFLKGAGIRLPKRYEGGLLFGQLVPHFANRIISTCPITFARRYQQLVADGKAHDEAKHKAEIAAKVPTKKSREFLEFRWAMLLADLTVKSKLNGTLRNLSDKERNQIHAEMKRRGYFSKDDLEKNLCEAAPGFEPANLDAMFKITPELEDSLVLDPIKKYVSTNEIASAIWPTLPAQLQKHLENRLRRGKSIKCSEIRTRLIASPYNSPPEKFDSTIVRLVDSENLKNSTKKRRKADTTAEKKKAPLTVQDFLKRQIEGKFPTGRARYHRGILKQAVAEILRGEDPNKKSNGDIVQKQNDGCLVETEEMQRLNLGQTESAQDAENSYKAWLPRWLKKKSKTGKMVNQARYDKHGDAYGRVIYEARLANQWLAAQTNNHLVRHRLLILDRLITDIINDKNFADGNPERIGKISIEVANDILAMSGMSSVEKAKAKTSMSKQHEAVKKFVMEKLEEEGLAHCMNGNLLWKAKVADDLKWKCPYTQEAISVPDLVFGKMDVDHIIPKSKKLTNAMGAVVITFKQVNAMKGARTAWEFVNDTQGEEIPNTGKHIRNLKGHLGYEDFVASLKTWGEEPASKMKYWPKYLDETGTKEHPDFLRRKKRIGLLETKHWDKN

SEQ ID NO: 7369 - protein, 1102 aa, unidentified
  REGION 1..1102: note = Description of Unknown: Cas Enzyme sequence
MDQESSVGPRFILGIDLGSASLGWALIELDPSGRPHRLLSSKNSARPIPACGVRIFEPGVEGSTLEIEEGKDQSKAVARRMARLHRRQLRRRAYRQATLFRLLQNHSLLPRCENTADLAPSKERNAVLTAFDQNLGRKYRESGAGPEFAQLLLYHLRKAALDRQLEPCELGRVLYHLSQRRGFKSNRREGAKNAESEKEAGEVKAGIAELQHKMNAAGARTLGEYFAGLDPHQVGQNVRRRWTARSMYEDEFAQIWSAQVAFHPALLTDDLRRKVAQLLFFQRPIAAQSHLIGRCELEAEQRRAAWATLEAQRFRILQKVNDLKVIYPGDPIAQPLTPEERRFVFDLLDREGDHKFTALRKKLKLDKKSEFNLERGGETRLRGNRTNVSMLAALGQRWDTFPPETRKQIVEEWRASESEDGLFRRGIEHWGLDEQSARSWVKARPEDGYCALSRKAIQRLMPLMYSGKSFKEAETELYGNRFSGGPMLDLLPPLHVHRKIAGSVEAERLLGQLRLGAIRNPAVERALTELRKVVNAVIREHGKPWEIHIELARELKKPRKERQSLAKRNRTRQKERENAKAALLRECGIHNPSRADVEKALLHTECGGICPYTGKGISLGDLFGEHPQFDVEHIIPLARYPDDSFQNKTLCWHEENRNIKRNKTPFEAYGTDAERWETIQARVRAWKPGNPGKLKRLLLRTEDELEDFTARQMNDTRYASVLACRLLESLYGGRDVVTPDGTRQVIFASSGAVTATLRRAWGLEGILREAAPSSNGHSKGKPRTDHRHHAVDAITVALSKPAVIQSMSRSASLAVESPLGVRAFRWIESPWPVFVDSVRPHIEHMVVSHRPEHKMSGAMHDETNYGPPRQLNGKTVVAIRKPVSGLSSKDIDNIIDPAVRCAVREKCDSLGGDLSKCESANDWPVLPAKHGSSVPIKRARIHKVLDVTAIASGDRQRFVSATNSHHTAVFALVKDDRDVEWEGLPVSLYEAMERKRRKEPVIRREHPDGPAWTFRFSLMGGDTIELHRECDHANGQCLPTLYRIRTIAGNGQLSLVTATDARLIKSIKDAKEWWSPRADNLRKLGCRKVVVDLLGRVHPAND

SEQ ID NO: 7370 - protein, 1063 aa, unidentified
  REGION 1..1063: note = Description of Unknown: Cas Enzyme sequence
MPDERMRDYVLGIDLGTSSVGWAMIALIDGEPHHLIRAGVRVFEAGMEGDLASGREESRNLKRRQMRLQRRQTWRRARRLRKIFNLLQSYGLLPQGVVSSPQERQEFLNQVDEGIRESAWFRDRASSGVHPEPQHVMPYILRAAALDEGLEPHFLGRALYHLAQRRGFWSNRKQVSSRKDKDDDPGVVEEGIAALSVEMQKGAARALGEYFSRLAPSEERIRARWTARGMFEKEFDAVWAAQARHHPDILTEARRKRLRHAFFFQRPLWFDRNTIGRCDLERGKRRIPAYLLAAQRFRLLQAVNNLTVSPPGGAEWPLAPSDRQRLVDELEAKGDLKYDRVRKLLGLRKDYEFNLERGGEKTIRGNRTNAKLLEAFGDRWLVMTPAERDAAVEYVHSFQNPAKLESAAGKYFGLSPEACEKLAAISLEPDYMGHSRTAIERLLPLLEQGIAYSEARKIAYPGAFQAGQAADLLPPVERAMTGIRNPAVMRSLTEMRKVVNAILQQYGKPAQIRIELARDLKKSKKQREAISESHRRNEKSRSAAAEEIIKAQVGIKEPRPDDIRKYLLAIECGWQCPYTEKRITPRTLFGPEAQFDIEHIIPFSRSMDNSFQNLTLCHLAENRNVKGNNTPHQAYSGDSERYERMIERVKQFAGEKRTVAAKLRRFLMNDDELESFLEDFRNRQLNDTAYATSLAAHYLGLLYGGLVDANGARRVQATSGGATHDFRNLWKLNSILGDGETANGGYLRKSRTDHRHHAIDAVVIGLTSAAMIQRLTDAAQRAPSEHRRRFASLEAPWHNFVDSVRAEINRIVVSHRVSKKVSGALHEETIYSPPEKTGKPRTRRVIDPSRPGKRLSKSEVDQIADAAVRGAVVERLRALSADDPQKAFMEPRNIPFLPNKNGNPIPIRSVRVDIPDRVFAVGNKACPRFVATESNHHVEVAITRGVRGRESWEGRVVSRKDAYERVKALLPVVDRAAEADGAFLFSVGPGEILECRRNGSGVERLVFKGASQYSAGPVVISLLPINDARKSPRLVRIVPNKLRDWGARKIVVGPLGDVSEAHD

SEQ ID NO: 7371 - protein, 1058 aa, unidentified
  REGION 1..1058: note = Description of Unknown: Cas Enzyme sequence
VGGQGEKRYRLGIDVGSNSLGWFVVWLDDDGQATGLGPGGVRIYPDGRDPQSKTSNAVDRRVARGARRRRDRYLKRRSDLMSLLVTHGLMPDEEAARKALECLDPYALRQKALDETLPAYHVGRAIFHINQRRGFLSNRKTEKGDSESGAIKVAASKLQQMMQESGARTLGEFLHRRHVVREPVRARNRSSGAKAEYDFYPTRQLLLEEFDAIWQRQAPHHPSMNEKARAAIHNAIFFQRPLKQPPVGKCSLDPAISNDDVEGFRCPWAHPLAQRFRIWQEVRNLAIVETGKPSHLLGKEDGDRIALALFQNGKLSFDKLRSILKLAPEARFNLESEKRDHLKGDETAAALSAKKYFGKTWRSFSLDRQIEIVTRLLEEADERTLIEWLVDNTGIDEATADRLASVFLPDSHSRLGLRAIRKIVPHMESGLNYAEAAKAAGYDHALLPTGELSLNGRLPYYGEWLPDDVLGSGDPRDKNDKRWGRFPNPTVHIGLGQLRRVVNALIAEHGAPAEIAVEMTRAFKLSPKKLAEVEKEQAENQRKNEKRAEEIRKLGQAVNTRNLLKLRLWEELNPYDPLDRRCPYTGEVINIAKLLSDEIDIDHLIPFSDSWDDSAANKIVCMRYANRAKGKRTPYEAFGTSPMIDGRRYEWDAISLRAAAMKGKDWRFGPDARQRYDRQGGFQARQLNETGWLARVGKQYLAAIADPYKIHVLPGKLTAMIRGKWGLNDLLPDHNYSDAKNRKDHRHHAIDAMVAALTDRKLLHKMSSAYDDERQKIEIPLPWPTLRDDLDARLKVMTVSYKPDHGVQGQLHEDTAYGTVKEPEKEDGANLVYRKSFLALNEKEIDRIRDRRLCGLVQAHVAREKREGKDLKAALQAFGERKDIPGLPNGIRHVRLTKSEKTDYLVAVNDKSGKTYKAYSAGENAFIDIFEMPDGKWAGEAMSVFQANQDDAKPRWREKYPNARFVMRVFKGDLISLDYRGQRTVMVAHRLDAAAGRFKLAPHNETGNLDERHNETDDPFRWLMASYNTLKGMNAERVRVDELGRVWRVKPEEAARAL

SEQ ID NO: 7372 - protein, 1024 aa, unidentified
  REGION 1..1024: note = Description of Unknown: Cas Enzyme sequence
MGANSIGWCALALDADGAPSGLLDIGVRIHPDGRNPKDGSSLAAERRGPRAMRRNRDRYLRRRRNLLNALTRFGLMPTDEEARSRVVALDPYQLRAEALRRRLGLEELGRVLFHLNQHRGFQSNRKVDRSSNEGGLIRDAAANTRAELVRTGHPTIGSWLAERRARRFTVRVRLAGSGKTAAYPFYPTREMIKEEFDTIWSAQAAWNPTLTDEMRQAVHDIIFLQRPLRAPLVGKCWLEPAELRAPRAMPTAQRYRIAQTLAHLYLAAPGLPERPLNEKQRSVLAGILYRGSDLTLDQVRKKLGLPGETDFNTREDKLAGCETAKRLGAKKIAGVEWHELSLGAQDAAVRAILDSESDEAAIEALIGVGLSAPAATRAAVVPLPDGHAALSLTALGKILPKLEDGLRYDEAVQAAGYRHHSDTRSGEVRDRLPYYGELLRERIGTGTGEPGDPEEKRLGRAPNPTVHVALNELRRVVNAIVERHGPPTEIVVETLRELGRSKRQREEYEREQKRNRDANDKRRQCLSEMGLPVNAGNLMRLRLWDEQASDPKNRVCPYTGTAITPRMALSDAIEEDHLLPKAVTLDDSAANRVLVTREANRMKARRTPFEAFGSSPDWPRILERAALLPPQKRWRFQPDALAQFSRNGDFLARHLTDSATIARWATAYLDVLAPGRVWSTPGRLTSLVRHALGLTPQAVLGKGGARKERDDHRHHAIDAVVVALTDRSLLWRMTLAVKRAEERGERFIVAFDPPWPGFVEEVRGRLDHVVVSYKPDIGWQAALHNDTAYGPIANASEDQPNVVVRQALETLATWSAEDGTIRVRDPVLGKKIAAALAARETSARKQALAALTHSGGHTVQRVRTVERLNSTQQIADRRTGRPYKLVKRDSNHRAELWRLPDGHTRLVVVSSFDAARQAEAIRLHRSVADMRPHPAAKLLMRLYRDDMIALTENGTRAILRLVRMSDRQLTFAAHFEANADARNRAKDDPFKFVYPGISRLIAGQAQKLFVTADGRILPGSAPLA

SEQ ID NO: 7373 - protein, 1035 aa, unidentified
  REGION 1..1035: note = Description of Unknown: Cas Enzyme sequence
MQTKYRLGLDMGANSIGWCALALGADGTPSGLLDVGVRIHPDGRNPKDGSSLAAERRGPRAMRRNRDRYLRRRRNLLNALTRFGLMPPDDEARSRVAALDPYQLRAEALRRRLEPEELGRVLFHLNQRRGFQSNRKVDRSSNEGGLIRDAAANTLAELARAGHATIGSWLAERRARRFTVRVRLAGSGKTAAYPFYPTREMINAEFDTIWLAQAAWNPSLTDDMRQALHRIIFFQRPLKAPPVGKCWLEPGEPRAPRAMPTAQRFRIAQTLAHLRLAAPGLPEHPPNDKQRSVLAGILYRGSDLTLDQVRKKLGLPSETDFNIREDKLVGCETAKRLGAKKIAGAEWYELSLCAQDAAARAILEFESDEAAIEALIRVGLSAPAAAHAAAVALPDGHAALSLVAMGKILPKLEAGLRYDEAVQAAGYRHHSDTRTGEVRDQLPYYGELLGERIGTGTGEVGDPEEKRLGRAPNPTVHVALNELRRVVNAIVERHGPPTEIVVETLRELGRSKRQREEYQREQNKNREANDKRRQCLAEMGLPVNAGNLTRLRLWEEQSSDPKNRVCPYTGTAITPRMALSDAIEEDHLLPFAVTLDDSAANRVLVTREANRMKARRAPFEAFGDSPEWPRILERVLLLPPQKRWRFQPDALAQFARNGDFLARHLTDSATIARWATAYLDVLAPGHVWSIPGRLTSLVRHALGLTPQAVLGKGGTRKERDDQRHHAIDAVAVALTDRSLLQRMTLAVKRAEERGERLMVAFDPPWPGFVDEVRRPLDQVVVSYKPDIGWQAALHNDTAYGPIPNTNEDRPNAVVRRPSETLATWSAADATIRVRDPVLGKKVAAMLAANETSARKQALAALTHSGGHTVRRIRTVERLDSVQPITNRQTGRPYKVVKRDSNHRAELWRMPDDTVRMIVVTTFDAARQAEAGRLGRPVPDRRPHPAAKLLMRLHKNDMISIGEGSGRLILRIVKMRDGQVTCASHQEGGNLKARDAAKGDGFKYLNASASRLLAGKAQKLFVTPDGRVLPGSAPLA

SEQ ID NO: 7374 - protein, 1123 aa, unidentified
  REGION 1..1123: note = Description of Unknown: Cas Enzyme sequence
MRNAFLHGVSALRTEARSALSNFVLIPNQQLPKLLPQTKKKIMGTENQNLQLAFDVGHSSIGWAVLECGTAAAPTSDINILGCGTVTLRADDCLASSRRAYRRQRRHIRSTRQRIARMKVLFKHLGVLADEQLNKPGCAWPWLLAAQVLRGGELLTWAELWDVLRWYAHNRGYDGNRRWSAAEAEAKKEDSEKEENARTLMGKYDTNSMAETFCLMSGIDPLGKKKSTNLPGDRRPKGQNAAFPRSVVEAEVARVLQLHFGKLKTVDEKLEKALLLSWQVVSCPNLKLPRRYVGGLLFGQLVPRFDNRIISICPISGEKVPSRNCHEFLNFRWAMQLANIKVGKYKDRDLRPLTSNERKTLDKRMRERGHLSPTELKKAVRELTTCDRDNLDTMFMDPDAKEALLLDPVQKLITSDEFQPFWKLLPDRLQKRLRGQWRRWKTFSLAEIREQLEEADIDLNEFDAELQRQLDEQNTRAKKKDKQVTGEQLRQKRFPSQPIRLDGRAAFARRLLAQAYEEVLAGKHPKEDGCLFITEEIRQKQLNREIAEQTNNHLVRHRLLILERLLADIVKEYADGKKESVGKVTIEVNRDLREMSGKTAKEKAMDLGLRIANHHAVSEKLAEALDGTQINGTPVHITAGLIRKARVADDLAWTCPYTSQKYEPVHLVTRYVDKDHVVPRSHRPADGLDSLVVTFSEINKWKGNRTAWQFVSEEQGKPVPNLPNLSIVSLSRYRQFVEGLESYKGHDDDKRRKKKRKELMLLPKYEEKEFMPRDLTQTSQLVRLGAQVLRKNLPHLTTPDITSLPGSVTGAARKSWDVLGCLSLASPKVLDESGQVKTKTEIRDITHLHHALDACVLGLASKLIPNNGRIWKLVIKRNLNDLEKQQLVALKLFDFNAENRFAMRDLDGTLKEQIRQRLAEKRVVQHIPARMDGLRVEQNTWRVVAKRDDEVTLRQRIRQPDGTRPEKIAEERPSKLLGLSPTNGYGKLMANKGALVIPDNFGVALDPQPTIIPFHKVVTRLKDLKKVNNGKMPRVLRNGQLIRFTEKGKEHVYRVCSIKNTARGIMLDFGFPDEITNSRNNNRLSSFLKNGMEIIRAPLTGIPSPTNSNAGSPSDQPTVFNCS

SEQ ID NO: 7375 - protein, 1056 aa, unidentified
  REGION 1..1056: note = Description of Unknown: Cas Enzyme sequence
MRRLGLDVGTNSIGWCLIEDDVRIVDIGVRVFSDGREPKSGTSLAVGRRVARAMRRRRDRYIGRRSAFLEALVRHGLMPADPQEGKLVAERDPYALRVCALTDRLEPHEIGRALFHLNQRRGFQSNRKAERRQKDGTEGKIASGAQALDQAMAEARADTLGEFLAAREEKRVRLNGDTEAYDFYPQRRHIEHEFARIWEAQAPHHPSLLTEEARVALHRILFFQRPLKEPEVGVCTFVQTDHRLPKAHPLFQERRLYEEVNQLEITAPGEAPRKLTRDQRDALILELRGRKEQTFEKLTTRLKLQPGESFNKASETRKALRGNEVYAALADKKRFGGAWAHLSPERQWAIIARLIDEEDPDKLHDFLTKECGLDEEHARATALASLPEGHGRLGETATRLILEELRKDVLTYDEAVRRAGWHHSDDRIGEVLDHLPYYGEILAREIPPGTQIASDPPEKRWGRITNPTVHIGLRQFEKLVNTIITLHGRPDQIVVELARELKLNEKDKEEHKGRIRRDTAAADARSKKLLEESLPDTGANRMLLRLWEELNPANPLDRRCPYCAEPIGMRMLFSGEAEVDHIIPYSRSLDDSASNKVVAHRRCNRDKGRRTPFERWSNDGERWNKVAAQVARLHKSKQWRFGPDAMTRVEKDGGFLARQLTDTQYLSRLAGKYLRSLYPSKEEGSVYVIPGRMTAMLRRLWGLNSLLPDHNYVENEHSNAPKNRLDHRHHAIDAAIVAVTTRGLLQRIARTAGQAEDKDLDRLFEGLDQPWEGFREQLGTALKHVTASHKPDHGRRRPPSRHHDVTAGRLHNETAYGLTGKVGRDGRTPIVVHRVPLTSLKPADLTDDRIPDAALRDALQQATRGLSGKPFESALEHIKRHGSGKRDRNGRPLFLGIRHVRVHKPLNVISICDAAGRAYKAYKGDSNARLELWRLPDGSLKTTVVTMFEAHQRNDLDGRPHPAAKRLLNLRQNDLLAVERNGGPREILRVVKFRTAGGLTLAAANEAGGLKERDGLPNDQDPFKYIHLSGTSLLNAKARQIRVDLLGRVFDPGPRA

SEQ ID NO: 7376 - protein, 1047 aa, unidentified
  REGION 1..1047: note = Description of Unknown: Cas Enzyme sequence
IFKPGVNGTALEIQEGKDESKALDRRTARLHRRQVRRRAYRQGKLFQLLQEHGLLPKSDLSFERSRSEERNRILTSLDLELQHKWNNGLPQPGFSILPLYLLRKAALDKRLEPYEIGRILYHLSQRRGFKSNRKAVEKEAVKELGAVKAGIAELSEKMMLSKARTLGEYLADLDPHQSGQNVRRRWTPRKMYEDEFAAIWNKQASFNAELLNEPLRNAISHWLFFQRPLAVHSHLIGKCELEGGNHRRAAWATLEAQRFRVLQKVNDLQVKYSGSLVAQPLTTLERKLAFDLLDRDGDQTFASLRRALKLDKNSKFNLEKGDERVLRGNNTNKTMLSVFGERWDLLSEDEKIQIVETWRTIESEETLVRRAMRDWGLDEIAAQQLAVANPESGYCTLSRKAIERLLPRMLEGMSFKNAKTREYGSRSSGSHVLDQIPPLRVHRRLEGTAHSDHFASTFYLAPTCDQALSRALTEMRKVVNAIVREHGKPYEVHIELAHELKKTRKERKRHRDKKRQRERDRDAAKANLLRDCGIQNPSHAEIEKALLLAECCGICPYSGRSISLGDLFGESQEVDVEHIIPLSRYPDDSFQNKTLCWYRENHIMKHNKLPFEAFGADPIRWAEMQLRMKAWRPANPGKMERFAIRNESELEDFITRKINDTRYASIQASRLLQLFYGGRDVETQSGPRQVIFTSSGSVTATLRRKWQLESILHETVRSSSGRSTGDPRTDYRHHAIDAITIALTRRAAVQSLRGTTSINPHSKLEAGAFHRIASPWPQFVESIRPQIEALVVSHRPQHKMGGELHDETNYGKPYISNGKTTVHIRKPISGLTTKDIESIVDPVVRFAVQQKAESLNGVLSKCESANDWPVLLSGSGKPIPIKRVRTSKVLDVRQIGERERQRFVATTNNHHMVIFELLKNEHDFKWEGIPVSLFEAMERKRKKQGVINRSHPKGDPWKFKFSLMRGDTLEIHRQCDHEKNICGPEIYQIRAIAANGQLSLAKANDARTKKQIQQAGEWWTPRADALRKLGGRKVSIDPVGKVHPAND

SEQ ID NO: 7377 - protein, 931 aa, unidentified
  REGION 1..931: note = Description of Unknown: Cas Enzyme sequence
LGQRRGFKSNRREGRSGLTKADAKKEEAERSNKLSNIRTLQEELDATGLTLGQRLAFVNPHQAAIRNRKRSDIAPIDTGRRMYQDEFEKIWQTQQTHHPDVLTANFYNRIERLMFKQRDVSAGKPGNCELERNPALPRAPKSSLLAQHFRLVQTVNNLKAEGISGTEWREKQQELIAMLSTVIVEKQTKKGTQTLFGLPFAEVKIRLGLHKRAKLNLDDDDDSTYLRGNRTNAIMARAFGAERWSAMDEQERRRIVRKWINESSPEKLFRIARNQWNLDDVKAEQLASLEAEEGYAALSHVAMLKLLPYMEQGLTYSEAIKQVKEYKVLSGGKVYEFLPPVEDSELPRIPNPVVKRALTELRKVLNAIIRKHGRPARIRIELARDLKRNAEQREKIHKGNKERERERITAKKWIEDCKQRPTESLVEKVALYKRTGGLCVYCTESLGDMTNVFSESSGIEVEHILPRRCNDNSFSNKVLAHRACNVRKADRTPRQAWDPSPEWDKMLNFVNGLRDKKKDKALHDRFIIQTESELQAFTNRHLSDTRYISKLASEYVELLYGGRDAQLDWDDRVRRCVYASSGALTAEMRKRWGLNAILKPKPANTEITRKETKSRDDHRHHAVDAIVIALTTESTIQRAAFETQRHDRASGHLLPRYFPPPWPANGEIEERISSFRGEVRQAVEKIKVSHRVNHTLNGKLNEDTFYGSPKPDGEVARITKFVHKLTDADIKNLDLLIEDKIVREAIRAQLQRFGNDPKNLEGNLPYLERKDGTGTPIRKVRLAKRGLTLETLRHGAVLNAENHHIVIFKRTDPVAGELWYTPGPVTRLKAMRDRAQEAKRIAPQKGPYEIVAKKDGEGSTYMMYLMKGDAVEMLDPVNDLRDIYIFSSMSDGDYVFLRHSAVVSSAKKAGLTLSQLRSEMQRSGDRVRTRL

SEQ ID NO: 7378 - protein, 1393 aa, unidentified
  REGION 1..1393: note = Description of Unknown: Cas Enzyme sequence
FNNENFETQFVSITKVTRVEETGEKGRNNKLKFKIYLEDSRIMPYEEERASKPEWEGKEFTFLVTQKLEKGKFKQNKPSIPSEKDWTLCTIALSEKMGTKYPGTFFFDELVIAYKEKINYKIRQYPVYRSKYQKELEAIWKKQCELNPELSKINSDKLILKKIAEQLYPTQNKINGAKIKELTGNDLLHLLSEDIIYYQRELKSQKALKSECKHEKRKGIDGEYYGLKCIPTSSPLFQEFRIWQDIHNIQLIKKEEIIDNKIQLDKNVTSNYINENVKEKLFELFNSKESISEADILRLIKENNPKNDIIILRKKGSESTHRINLFANRENLKGNETINRYRKVFEKYAFNGNEIINNYNKLYRLWHIDYSISSSDESLAEKGILSALGWEKKNGNYIKNNNWEIFELPLDLCQAITKLPEIKKGYGSLSACAIRKLLTVMRCGKYWNENEVNEKYKSEAENILNRLKDINQDSIDLLEVTDDDIKKSVLKSFMGKTNFIELIKGLNTYQAEYLIYGKHSEKEIADIKTPEEFTTYIQKHIPNNSLRNPVVEQVIRETMLLVKDVWKKFGKIDEIHIELARELKSNSKEREKRANSQKENFEEKLRIKQILKELLNDNFEHYNETEEKINSSFTIKPNPDNPIDIEKFKLWKELSGKNDEEFEKKAKKEKIPTELQIKKYILWLSQNCRSPYTGKIIPLSKLFDSSLYELEHIIPRARLKNDGLNNLIISEWGVNKAKGHKLAANFIMEANGKCKYGNTEYSLFTYDEYIDNCKTIFKFQKNKLKNLLAIEPPENFIERNLNDTRYIGRKIAELLKPIVKDQNGIIFTGGAITSELKANWGLYQIWKDIVRIRFERLENLLNKKLIYIDENDSNKYHFDLSINNKLDEEGIKRIDHRHHALDAVIIAATTREHIRYLNTLSVADTDEERKKYFYTLCKGKIRDYKQPWENFTRDVKEKLMECIISFKETKPILTKPYNKIKKWVNKNGKWKKEKIEQSDNPKWMAIRRSMFKENPFGSVFIKEIYNENPLNAVEIHVHRMLVQNTPRMSTASYVYDKEARKIIKDLIEKIGIPITEKDKLINEIKKHLKKYPLTDIVGKEYKTIQVAKFIEYAGKRVSLDKTFNHKKIDKIPYTKVGKSTLGKLLHQHLDQYKEKGRPNPSLAFSSEGLEALSEKIRNPITKVTIPITKVTIIERPKNPEEKKFQGRFVETDSGSNAYFVIYENVKTKQRLVDKKATIPIHKAIESITKGKSIAEMIEGYKTIILKPGDSVYVPTQEETRKMGNGIHGTLAIDWKNQKNIADRIYQVRKFSGNQCYFLKNNIASLILHYSDNENKELVEEEPDELNVQKKQNSKAGEFGSQNLSEYSIDNIKIREVCIKLQIDRLGNVQPILP

SEQ ID NO: 7379 - protein, 1007 aa, unidentified
  REGION 1..1007: note = Description of Unknown: Cas Enzyme sequence
  MOD_RES 961..999: note = Any amino acid
KIGFSVQDEDTIGSIFAKIENEGIHHSDRKTEGIRIRKELHQYVTRKMLIKEVEHIFNFQKLNFYTIFEDSISKSVIFKQRPLRSQKGIVGVCTFENRLIEVKDAKGNKHYKEVGKKRCPISRPEFEEFRAFSLINNIAYKKKNDKNAKWEFLPQEKRNELYKGKFLVQKDFNFEGIYKYKPLSQWLNEKCGKDNWELNFNHKTNVPACSVSARLQNILGDKWNDVVTKKNKSGKEIFISHIDTDGVITEQVLEQPLFENVWHVLFESNDEDFISEYAQKHHIDEKAFISLWYSMPVGYAKLSLKAINNILPFLREGFIYTDAVLLAKVPEILGEALWTKHKTMITEALKTEIIEKNRYEKRILNIVNNLIANYKSLPRKDKFAEKKGYIINSLNALLPEGSSERDSVQILTAIEDSFGKETWKQMPDEEKEKIQTEVTKYYQAFFDSPEGKFYPLPRLVDAMKDFIYNKFEEEFKGEERKLFYERVNKLYHPSLIDFYPKAKKGYYKHAGIEKEMVMLGNPNIGAFKNPMAMRTLHELKKLVNYYIATGQVDENTRVVVEVGRELVDTNKRWAYETYKKIREDENKEFADAIRELVKRDGINANANNDSDIDKFRLWYEMIESPEGCEQSHKFISVEEDKTYGEAKKKTNKKNKTEEKKDDNEEEKYYTFNQNYFDKINKQIWYKLKKAKDNVEERYKLWTEQQCFCIYTGKPIKISDLFNPNLIDVEHTIPRSISFDDSLANKTVCYADYNRNIKKNQIPFHLPNYEKEIKPRLEKWQQKVKDLQVRVEFWKGKSRQASTKDYKDTCIRQKHLWQFELDYWKNKVERFTMQEVTANFKNSQLKNTQLISKYAFHYLKSFFSHVEVQKGEVTAMFRKIFNIQPINTTKDRSMHTHHAKDAVVLSVIPVAAIRDKMLEVWYKIDEQKDLLQSNTEPNKWLIQEKITQLEEELKQLKYQCTXXXXXXXXXXXXXXXXXXXXXXXXXXXXXXXXXXXXXXXMIRVNGSS

SEQ ID NO: 7380 - protein, 1045 aa, unidentified
  REGION 1..1045: note = Description of Unknown: Cas Enzyme sequence
MKIPYRLGLDIGTNSIGWCVLRLDDQDQPTGIVRAGSRIFSDGRVTKTLATLAAERRRARQMRRRHDRVLKRQARFMRGLIQYGLMPNDEEARRRLSALDPYDLRRRGLDQALSVHELGRALYHLAKRRGFKSSRKSKDTDANEAGKIASAIASTRAAIQADGCRTIGEYLARRHDQRMTVRARTTADGKAYLLYAQRAMVAEEFDVLWDAQAPHHPDICTDTARVWLRDTLLFQRPLLPVMPGRCVLEPEELREPLWSPLQQRFRVLQELNNLRVIDGLQERSLTLDERNTLRDVLYREAKMSFEKARKLLKLPKGTPFNLESEKRKELKGDIVAAQLSADGALGERWFALSFQHQRDLVECIDRIDDPAELKQRLMRSPWNLDDEVATQLTKVRLPDDYGSLSRKALEKIVPALDAEVITYDKAALKAGYRHSDFYTGEIFPRLPYYGQILRSYTSPTPKAANEEERKFGKLANPTVHIGLNQLRQLVNEIIRRWGWPREIIVELARDFGLSGQKRRDLESEQAKNQQRNEKLDERLRDLHQRENRENRQRLVLWDELGKDDALDRYCIYSGQRISMSQLFSAEVEIDHILPFSRSLDDSLSNKVLCLTRANRDKKNQTPYETFGHSPGIYIWSAIEERASHLPRNKAKRFRPEAMEAYDQRAKLGKEALQEWGFTESDGFLARHLTDTAYLSRVARQYLTAVCPPNKVWVATGRLTAMLRQKYDLNAILDPERKGKNRDDHRHHAVDAAIIGVCGRALIQSIATAATRAEEQGASRLLKGLEEPWPGFRDDLAATIGKIVVSHKPDHARETRLHNDTNYGKRGSVDAHGAMLVSTRKSILSLSSAQDAERIADPRLRAELASLLTGLAGKEIKAALENYSTRTGIRHLRMEERLSVIPIMDRVTKQPYRYVKGDGNYCYDIYREDNGRWQGDVVSNFDANQPGFDPEARTARNGKPLVMRLRKGDFLKMEIDGVGRIMRVAKFSEGIIALVEHHEANVDARNRDKNSGLKYVFKAPSKLQAASARQVGVDVLGYVNDPGFQE

SEQ ID NO: 7381 - protein, 1508 aa, unidentified
  REGION 1..1508: note = Description of Unknown: Cas Enzyme sequence
MGRILGLDLGTNSIGWAIIDANINDDGGVKSYNSILDSGVRIFPEGIDPATLGQGDKEKSKNAERRENRQKRRQFYRKRLRKIKLLDLLISHEMCPLRPEELLLWKKWDKNNKSAARKFPSSDHFIAWLRLNPYALRDKALKEDLSLHEFGRILYHLIQRRGFVSSRKEKDKGAIYSGKDDKTGITETIENMEKRTLGQYLYSIIPQKGEPYKEYKDEEGKIIRARSRYTLRDMYIEEFYHIWNRQAKHLGLDGIRVIQTKTRNIKGSLQAKRNINKINKLKTIYGENNIVISGNKVLSRQEVPLLKYLAGDIWMENGKVCHKYTEDSVLFWQRPLRSQKNLLGKCRYEHQYLNINGKKIESGKTPCYLSHPEFEMFRTYQFVSNIEYGTNQKLDEKQKSLVIGLINSKKGSFKFQEIIKKLKLTSERFNYDNDFSVAGNATISQLKPLFDEDIWENKYDEIWHCFHFYNDNDKLFNKLKSDYGCKCDSADKIENISLKDGYASLSLKAIRNINPFLKKGFNLSTAVILGGIKNAFGNELWQKYSDQHHTIEKNVIRMMKEKNAEGQLIQKVKDYLSKGNGNIDFGFLPNDKRFKKLYHPSVEIQTSYNTLREEVPPVPNLRNPLVQRALTEMRHVVNALLKEYGYMDIIKIEMGRDLKNTKSARQEMTYRIRDNQKKNEFAREKLTEFGLAHSRQNIRKYLLYKEIEEQAGHVVCPYTGKTIRINDLLGTGNLFQIEHIIPYSTSLDDSFGNITLCESNFNRDKGEKTPYEYYKSNPDPKAWGGAASWEEVEMRAFSLLPYNKAKRFTSKKSYESETFISRQLNDTRYISKEAVNLMRSVCEDVRVLPGSLTSELRHLWGLNSILQPVNDVDLTKGTVSADENLSILHWAVVKDDGSFVSIHRQQNEKPQLPKKYCLFPGEIKKEVFTSKIFGNMTTPGYDDGKFWCKTRVTADPVFYKVFNEKPSVKADEMILKGVVKNNKFSSERLGRSLDTNIAEDGTYWGVFHVDTIKFCGSERPQAKAGEIALWGTVKEGRFISYNFECPCTFEETNTWAVLSLNTADPAYNKVKREIPKINDDQVLMSGSIDKDGVWISDENPDQAYASALPAGKYWALYNIDVNDCEFIRILNEEPKPGPGEKVIEGNIWIDKQGEVRFEPKKNRDDQRHHAIDAMAIACTERSFLQALSTYHARQKERDMGMRSRRPEFPQPWDNFRSDAEKSAMNILVSYYKNNRALDLGQKYIVKNGNKYLTRVSAIRGQLHKDTVFGKRTPPDGRTAYHIRKPITTLKNKTHVQKVVDKTIRMMIEEHLRENCGVDITKKYDVPPDAFYKDGTYRIKLPNKNGEEVPVKKVRLREEVGNAQQLKKDMNQYVNPRNNHHVMIYKDKNGELKESIVTFWEVVQRQNRNESPYQLPDDGQEIITVMEINDMFLMGVDKNTPIENMCINELSKYLYRIQKLSSGDYFFRHHLASTINNQNEEIRISSFKLWQKYFPRKVILNKTGIIKEC

SEQ ID NO: 7382 - protein, 905 aa, unidentified
  REGION 1..905: note = Description of Unknown: Cas Enzyme sequence
MEITGHGTKGASDYYIGLDIGTASVGWAVTDPSYELVKKHRKNLWGVRLFDTANTAEERRLHRSARRRHQRKLQRLRILREIFDRSIAEVDPQFFTRLRESLYHADDRSGSFISTLFDDDSFKDSDYHKKFPTIFHLRSHLLHHPDEKPDIRMLYLAIHSILKNRGHFLIPGETLDTTSSLYALVDNLQRETSAALGCTLEFSCPPEDLGMILKMRRKSERKSKLTEISTLTRITGDQVEENPKRQATELIKALAGTPFMLSALFSEEAYQDHENNKIEFDTEGYEESKDAIEVLLEPEEFALIEAIEGLRSWALLSDILHGEAYISDAKTISYAEHKEDLKKLKRLVKAYVAESFIAAFKDPAESNNYAHYVGTGNRSGVKVQVNHKSKCSQDDVNKYFEGLLKPFKNNEDDLLVEMLGKLEVRSALPKQRVRDNRVIPHQLHKKELEVILAHAKRYYPFLSVPDADGYSAIDKIMGMMTFRIPYYVGPLNTAHLRDEGKEGFCWMVRQQGKEQAPILPWNWEDVVDKNASAEKFISRMTNACTYLFDQKVLPKYSLLYNRFMVLNELNNLKVNGEPVTVELKQRLYTELFLESGKKKIAEKMLKKFLLTNNIINRGDEVLIEGIDQGFANSLKSHIDFSHYLNEKILTVEEVEQIIEWKAFYVDDTSILREKITEELGRKLSEEQISDIVQIIRSYKGWGRLSRVFLEEVYHEIPATGEVRSIIQMMWETNNNLMKLLSSEFDFLDETQRINNEKLLQTSFSYDTLVKPLAVSPPVKRQIWQTLLIVRELRKVMGKAPRRVFVEMARERGEKVRTTSRKQTLVKLYENCKNDIGFNKALLETLEEKTDAELRNDRLYFYYTQMGRCPYCGGRIEIEQMHNPQLYDIDHIYPQSLIKDDSLNNR

SEQ ID NO: 7383 - protein, 1337 aa, unidentified
  REGION 1..1337: note = Description of Unknown: Cas Enzyme sequence
MAKILGLDLGTNSIGWAVVDKEDGEYSLLDKGVRIFQEGVKIEKGNESSKAAERTEHRSARRLKYRRKLRKIETLKVLSEYSYCPRLTKDELDSWRYKKIYPQNIRFRNWWLTDEGFEKHPYFYRNLAITQQLDLNKEADKHKLGRAFYHMAQRRGFLSNRLDSTPENETGKVNSSIKELQKKKGDRTLGQYFYQDCYLKGEKIRDQYTSREDDYLDEFKRICAFQNIPEKLQQKLHKAIFYQRPLKSQKGQIGKCVFEPTKPRCAVSRPEFEEYRMLCFINNIKIKTPDDEKLRPLNAEERSKIVPRFFLQREHFDFEDLAKQLAPKKQYKYYKERNKNPEDYLLNYSMKTTVSGCPVSARFKDLFGADFIDEDYNYVKDSDNRTPKLISDTWHALYTFDSDKKLKEFAQKHFDFNEDKTVLFSQKIRLKQDFASLSLKAINKILPYLREGLIYSHAAFLANMEETVPAHVWKNEENRKIIRTAIKEIIENHSDNTTIVNMVNGFITNARRENEVWSEEAKQLYFNDLDRRIKTAFGAKRFENFSEYKKSNLINKAQQLITEFMPKNLGKGEHVKVERLDEAVLTFLADNFGKENLNAKKLYHPSAIETYKPAKRGKDGRLYLGSPMTSSVRNPMAMRALHQLRLVINELIKTGLIDDNTKINIEMSRGLLNANERTGLKRWQDDREKKRKEYIERIKEHFSPDYQPTEDEVLKYQLWEEQRRICLYTGKPINIEDFLGSDPKFDIEHTIPRSQSYDNSQENKTLCENEFNRKIKRNRIPSELLNHEEILVRIEHWKEEIEKLEKEIQMAVRQSKGAGDKDQKDKAIQKRHQLTYERNYWQNKYKRFAMEEVPEGFKNSQMVDIGIITKYSRLYLKTVFPKVYTVKGNTVADFRIMWGLQDIYTKKARVNHVHHCIDAITIACMDKSNYETLAKFYHDREDAFERGHEARPEVEKPWTTFTEDVKGIEKEILVSHHTPDVLPKQSKMKLRKRGKIQYDKNGEPIYLKGDSVRGSLHKDTFYGAIEREVLNKKGEAEKQIKYVVRKSLDGLEDSALKNIVDDRVREIVSNAKIQEKELQKQIDDLLKQRKKAEEDEEVVIDNKIVGLKQQIIELYCLPNKNGTPVPIKKVRVYQPMVTNPLPGFKKHRDLSAKEYKQQYNVANDGNYAMAVYEGIDRNENLKRSILMVNNFDAGKFFNGKLEESPFPDKHPKTGLYLKYLLKTGTLVMFWEKSPGELKSRKVDKVKRLYKITKMDKDGRITFKFHQEARNDENLKLDYEKENGAKPPKSLTTGESFIDFVNPFPKLRLSPPKFNFIVEDYDFKISTTGEIKWLNEDL

SEQ ID NO: 7384 - protein, 1536 aa, unidentified
  REGION 1..1536: note = Description of Unknown: Cas Enzyme sequence
MTKKVLGLDLGTNSIGWAIIDKENQKILDSGVRIFQEGVKKDTIGKGDKEESKNSDRRQHRQARRLNYRKRLRKAHLLKLLIDFEMVPLSIDELSKWRYWNKNEKSSGKVFPNSEAFVNWLKINPYLLRKKGLYEDLTLQEFGRILYHFIQRRGFLSSRKGKAKDTGVIYKGKENMDGVDDTRQLLQNRTLGEALYEVHPKEGEAFFIRKDEKGKEVRVRARYTLREMYVEEFEKLWERQADQLGISDKQVPVKKRVYLKGSPQQKRNQAKLSHLIKIYGKENVVLNGESIEVSSNKPFKELLAGEIVQTEDGIRFKSSESVLFWQRPLRSQKSMLGKCSFENQKIFDQQLKKWIITGKSPAYVSHPDFELYRTHQFINNIKFGKSNQLLADEQRWIALDLINSKDKAFDFKQIKKALKLPHELFNYEDDFKVAGNKTHASVSVHFSKEDWKKYKEEIWHDLVFYEDSDLLAAKLNSAYKLDNKAVDKLSKIELEEGYASVSLKAIRNILPFLEMGYRYSTAVVLGGVKNAFGERWERFNIAHNEIIRDIVHITELEKHKEYELIEQVKAYLSDPDNKYGFVLDDKAFKKLYHPSQAIEKKALKTRLSEIENLRNPIVQKALYEMRRLINTLLDRYEKQYGEGFRFDRIQVEFGRDLKNSKQRRQEMVFRNRENEAKNVAARERLAEFGLRPSRNNITKYLLFQEIERKNGVVQCPYTGRTIKISDVLGNDNRYQIEHIIPFSVSLDDSFGNKTLCESNFNREKGELTPYEFYQQNSSRELWAAGSWEEIEHRAYKLLPYPKAKRFTMMKKPGADDFIQRQLNDTRYISKKAAEMLSEISDDVRVLPGQLTAELRRLWGLNHLLRDPLMTIKNLPVSADGDLEHYVIFDSSGKVKELMPVQNKRPESAYPVICMPGNIDNKTLFAEEKHYKQLRFEIADTNLKEGKYWSKLKLSEPLNFTMIYAQRPPLNDKYISLRGQVSKSKFAHDTIKQKITAAVEDGTYWISLPVKNYRLVAASRDQKPEPGQKEILLFGKVQAGVFSSYIFETPTDLPDGRYWLILEPDINTPEFLKARNIPETKADNELLLEGVVDDLGKFTADYDPDFSFKTEKEPGKYFVRFEVIDVLGFYPQNNEPPQLEKNETLAQAITWVDKSTGEIKIDIQKNREDQRHHALDAIVVAMSELSYLNQLSRYAGQLKEWERGKEGRPVFDLPWSSFPDGVLQAIQQILVSYAQNRKVVSKISKMVSKGGKSYKSSGLAARGRLHREFYFGQHPRPIVHQKNPQTGELLFEMDKFGNKQYYYHIRKSVTTIQNNKHVEKIVDEGIKQLIIKRLEQDYLIDTKKAYNIPSDFFYDKDKRPSLFLPNKNGNPVPVKKVRMRESIGNAEQLKDHVNQWVNPYNNHHVVIYEDHDGNLQEQVVSLWEVVERINQGQPMVQLPHDGKRIVETLQENEMFLIGLPEDILNNIGDQSYSFAALSSYLYRVQKISSMYYTFRHHLVSSVSTEQGELRIQSFLKWSELNPIKVKIDQTGKLILKL

SEQ ID NO: 7385 - protein, 1418 aa, unidentified
  REGION 1..1418: note = Description of Unknown: Cas Enzyme sequence
MKKILGLDLGTNSIGWALVDTDEKKILGMGSRIIPMGTDKQDYEKGVGITKNATRREKRTARKGNKRYKLRRNKLLFILHELGMLPEQFQFKNGIPEPTKLQNLELLPVSKKTKQLDALGFIELRVKALEDPIELKDFGKILYQFNQLRGYSGGNNDDSTKKKQDEEEDAVKKKYEVVVQKVEILEVKQSDDAFTVRGGKNKGEKQCYFDVKIIFEGAEIEGLTELQNLKEREGQEEELEIRITRKKDDEVTYKFALPQKSNWRKAMELSEKTLKEENLFISQLRLRDLKQNKWAKIRNRVFLRNRYKEEFDKVWETQVEKHLILKDCPKDTLEKIAYYIFPGDSESQQQLRKTALEKGLKYIIKEQVIYYQRPLKPQTELIGNCRFEKEEKVIPTSHPFFQEYRCWKQINNLFITSKTLVGTKYTYQNRYLTSEEKWAIYEKLQTQKEVGFATVVEILNMDKTKGKLDKEQKDYFLNGLNVKAKLKGCDTFLSFKKELGEYFNDFISQDKQLVEQLWAVIFDVKNHDGSEYDVESKRVYSIVEVLRNYIDEETAKELSLKLAQKIKFPRKYASLSKKAIQNILPLMLPNPQSIPSSVQQRFKNIQTLIETGEINENLNCDLEDYVFDFVKNNPNVLEYGGIMESFAISLVYGKHTAETIKPQIKNYHDIKFEKRNLRNPVVEQLANETMQVIKAIWKQYKFNPEELEIRVELARELKNSAAEREKIWNGQRKSKVINDKAKEILSENGIAITAENILKYRLYEQQKFMSPYTQKKIIPFSKLFDDKEYDVDHIIPKSRYYDDSFSNKVICEKYINEEKSNRTAWEYISQQNSKYKNENGKLEIVSANEFLCHINDNYFGKKKKNLLAEKIPSNPVERQLKDTQYISVAIKSELAKIVGSDNVKTSTGEVTDFLRSRWGLRKLFMNLTESRFKQMELWDLDENGNPETQWVNRYVDENNKNQYEIKNWSKRYDHRHHSIDALVVALTTQSHIHRLNNLNKYYQDELTARKEEFGITVKEGEGILEGFFNLEAKRRDEVLQKIESSRYFEMPFDNLVDQVKSQLETMVVSHKPKDKLGIKTDDFDKNTPDKILKKQIKIRAGLHQETYYGKLNGRDTKRVDISSLSLPDVSKILIDKVLANEIIEHKKQYGSMKEAFTGEGLKAFNDKRIADGKQPAYKVKVWYNKEEKKESGLQRLYENNDKQSVITGDNYLFVVMEKNRKRIFDIASLYDSVSIATDALKDGVNDFKKRIVEDYRIKHKDKPEKVLFTLQQNELVYLPNNIEERDFLLGMSVDEFRDWINIKANKKAFSNRVYKVVMFTGMDCKFIPHSYSNVISVPKELTKEQKDQLKKKYEEKKGIPKNELNFVEFGSYRDCSPYETGEIFVKSLVNKKQKQKPLKIQDSCIKIKIDWLGNIELA

SEQ ID NO: 7386 - protein, 1067 aa, unidentified
  REGION 1..1067: note = Description of Unknown: Cas Enzyme sequence
MKHTIGLDIGIASVGWSVINLDKNRIEDLGVRIFPAPEHPKDGSSLAKQRREASGTRKRNQRKTARLQKIQALFREEKILTSLEIENILNAHSEKSPYELRTDALSRELSAPEWFRALYHIAKHRGFQSNKKIKAGSKEKEKEEGALLEGVKTNALLMAEKGYRTVGEMFFLDPKFTDHKRNKGGDYAHTVSQELLREEVELLFAEQKRLGNPHTSEIFRKSFIEAFTSRLPFAAPGQIESKIGFCTFEKNEKRAPRMSWSAERFILLGKVNNLRILDTFKGERPLTPEERENLINLAYKKAEVKFKDIRKAFSLEESSYFSGIRYSKEDSRESSENGKFVALKGTHELRKEISEKLGKEAWETYESTSAILDEIALTLTLLKTEEDIRSDLESKKIPSVLIDAVIDLDFKSTINLSFRALRKILPFMESGFRYDEACEKAGYPYENAERTKLLPPDDFDDITNPVVKRSLHQTRKVLNAIIRKYGSPWSIHIELAREMGKSFDDRKKIQKMQDENRNERERLKADFISNFHREPSGTDLLKYRLWKEQNCCDPYVQLPVGPGIFEPKYIDPIRLFQQGDGTYAEIDHIIPYSRSLDNSYTNKILVLAEENRNKGNKTPGEFLFSSTHPERWDAFVAWVQSNIRNGKKRRNLLRESFTLEDSREMTERNLTDTRYITRYLANYLESRLQFADPSPSSKKVHRINGGVTATLRGLWGLPKDREESHLHHALDAVVVAVTAPHLIERMTEYDRARKAANFGPGQDRSSRNAPQPWAGFRKELLARLSENPAEEISKIALASYKQEEIDSLRPIFVSHMPVRKATGAAHEDTIQSVKMMDETGCGVIRIPLVKLDIKKIENMVGKERDKRLFEALKKRLLAHGGKGEKAFGASEPVFRKPTKNNTIGPIVRSIKIFKPGSSGVKVRGGIAENAKMVRVDVYTYKDKFSLVPHYVDDIARGLVKKKGMIAHKDEKDWEPITENHSFLFSIFPNDLLEVSQRNGKKDLGYYKKLDRSGGTIKLVSHDGKTPEKRLSLRTCKSIRKFQVGLLGDYHEVKKEKMPSGKPVHELA

SEQ ID NO: 7387 - protein, 1345 aa, unidentified
  REGION 1..1345: note = Description of Unknown: Cas Enzyme sequence
MIKGDYYLGLDIGTNSVGWAVTDENYNLVRAKGKDLWGVRLFEEASTAEDRRSHRTSRRRTDRKRARLQLLREIFEEEVEKIDKGFFNRMDESKYWLQDKKTEGKYALFNDGDFTDKDYFNDYPTIFHLRKALMEGNTSGDIRLYFLAINQMMKRRGHFLFEGQKFSNVPDVEGVLDDLHRVLTESPFDLDIDEDFIQEFRDIIEEFDLKKTEKNNMFKKLINDLNLEKVQIKQLTAITRLVVSGKAPLSDIFNNPSLKEEEVKDVEFDGDKFEEKGDEIEEILGGDFELIQILKRVYDYSKLKEVLSDYTSISQAQVAKYQKHAVDLVKLKKLIRKYDDKNKTSYKEVFVKTDQKCNYVNYVGSTNKNGRKISVKKCTSEDFLKYLGKKLKSICDSEDPSYLHIANDIEKGIFLPKQIVSTNGVIPYQVHHYELQAILGNMVLDHPEFLKEDEDGIKLVDKIDKLFRFRIPYYVGPLNPAHKGEVGANSWIIKREGYEDVQVRPWNFDKVVDAQACEEEFIKRLTNQCTYLPDQKVLPKESILYSEYMVFNELNNLKINGVKPSGALKEKIFEELFCRYKTVKQKKLRSWLIANNYADRDVLLGGFDDDFKSSMKSLIEMRSILGDDFDREMAETIIEWITIHAGNADVIKGKIKKVFPSLDDDKCKKLSVLKYKDWGRFSRKFLMSFEGADIETGEVGTIIHFLREKDDNLMQLLSKRYTFEEELFRYKSKFLKDGVSYDMLDDLYVSPAVRKMIWQVISITEELRKVVGSDPKRIFIEMARGKEDRPERKESRKNQLIELYKSIKKESRDWVGEIDSKDHADFRNERLFLYYTQMGKCMYSGETIDLAQLDDKNLYDVDHIIPRSLKKDDSALNNKVLVKRDLNQHVKKNYYPVPEQFRRSQSGLWKMLLDKKFITKTKYERLIRNIPLSDEELAEFIERQLVETRQTTKVVADIFKQAYKESRIVYVKSRLVSEFRQDFDLLKLRDINDLHHAHDAYLNIVVGNGYYTKFTGNALQFVKKNRGNYSLNKLFKGEIKGPGGKTVWDVATGLKIVRKNLDKPSVLFTREAYEGKGELFNATIVGKDEIKTGTDYLPLKKDSRLEDIAKYGAYKSISGAYFFIVEHQVRKDRIMTIEYVPVYLKESIRNNRNALTEYCKENLGLKDPKILVDKVLMKNLVQINGFRYTLNGRTGKQIKLQPAHQPFWRQQEVDKLKMVLGALDKSEKFGRDLCEDIEDDLMIYLFNKIQDKLKKIPYKNRINIPENILEYSVESSKLSKMEKCKLVKEMLNLVKPTLQPMDSKMIGGAVKSGVTLTSKTISNTEEFKLIHQSITGIYEKEVKII

SEQ ID NO: 7388 - protein, 1474 aa, unidentified
  REGION 1..1474: note = Description of Unknown: Cas Enzyme sequence
MKTVLGLDLGTNSIGWALVDVEEKKILGIGSRIIPMGQDVLDTFSGGKPLQTQTAKRTNYRGVRRIRERHLLRRERLHRVLNVLGFLPEHYSKQIDFKKHFGQFVDEAEPKLAYDNRNFIFKNSFEEMLNDFKQSQPQLFYTKSNGKETKIPYDWTIYYLRKKALSQKIAKEELAWIILNFNQKRGYYQLRGEEEEVTPNKLVEFHSLKIVDVIADEKQNGKGEIWYSLHLQNGWIYRRSSKIPLFDWKDKVRDFIVTTDLNEDGTIKTDKEGNEKRSFRAPSEDDWTLLKKKTEQEIDKSNKTVGTYIYENLLQNPSQKIRGKLVRTIERKFYKEELIAILKKQIELQPELFTDDLYNDCVRELYRNNEAQQLVLSKRNFVHLFVEDIIFYQRPLRSQKTSIGNCSLEYRIYNDKNGNQVKDYLKTIPKSHPLYQEFRVWQWLSNLKIYRKEDGVDVTTEFLKNTEDIVNLFEFLMTQKEVGHKDILKHLVIPALKEKFPSAKPAAFNKEVNKEIAKYRWNYVFDDSKDKEEDKSKKYPCNTTGYEIRRRLEKVVNIPAGFLNSKIEQHLWHIIYSVTDKKEYEAALRSFANKYKLDENSFVEEFKKFPPFPSEYGAYSEKAIKKLLPLMRLGKYWCWDAIDTKTQDRIDKIISGEYDENIKTRVREKAINLTANDHFQGLPIWVASYIIYDRHSEADIAGKWNSIGDLEQYLEEFKQHSLRNPIVEQVVTETLRVVRDIWKQYGQGAKDFFSEIHVELGRDMKNTADERKRLTEQVSNNEATNLRIKALLTELKENSDGKLSVENVRPYSQMQQEALRIYEDGVLNSKIDLPEDIIKISKSAQPSKMELQRYKLWLEQKYRSPYTGSAIPLGRLFTEDYQIEHIIPKSRYFDDSFNNKVICESAVNQLKDKQLGLEFIRNHPGEKVECGMGKVVEIFTEEAYVAFVKEHYAKSKKGQNLLLEDIPEQMIARQINDTRYISKFISSLLSNIVRADKEDDGINSKNLIPGNGKITTVLKKDWGMDAVWNDLILPRFERMNQLTHTDVFTYWNEQYQKFVPVEYSPVDSKRIEKKRIDHRHHAMDALVVACMTRDHVNLLNNQSAKSETSRYDLQNKLRNKTKESWIDKKTNEKVERDVFKEFKKPWDNFTVDARNALETIVVSFKQNLRVINKATNYYQKWVDKNGVKVKETVKQEGVNWAIRKPLHQKTVSGKVDLPWMKVPKGKLLTATRKNVDTSFDLKTINAITDSGIQKILRNYLAYKGNNPEIAFSPEGLEEMNASIKQYNNGKPHQPIRKVRIFELGSKFSLGKTGNKKNKYVEAEKGTNLFFAIYEGKDGKRSYETIPLNIVIERLKQGLPPVELKGENDFYLTPNDLVYVPTEDELINGSKIDLANFTIEQKKRLFNVNDFSGTCYFTPNHLANAIAPKEVDLNFDNKRNKLTGSFDTKTASFDGVQIKDVCIKLKVDRLGHISL

SEQ ID NO: 7389 - protein, 1555 aa, unidentified
  REGION 1..1555: note = Description of Unknown: Cas Enzyme sequence
MEKKILGLDLGTNSIGWALIEHSFDKKKGKILGIGSRIIPMDAAKVSEFERGNSVSATADRTKFRSTRRLYERDVLRRERLHRVLNILDFLPKHYAENIDFENRPGQFKKDKEPKLSYKELSNKKYDFIFKNSFQEMVDDFKLTQPQLFYLKANGSESKIPYDWTIYYLRKKALNEKIEKEELAWILLNFNQKRGYYQLRGEDEEIEDNKEKTFEILKVDRVVDSGEKIKSSGAILYDIYFENGWKYDKRITKTEDWIGKTKEFIVTTSVLASGEISRSYKAVNSEEDWIAIKQKTEQDIESTNKTVGEYIYDTLLIKPSQKIRGRLIRTIERKFYKKELKQILEKQKEFHPELRDRNLYKTSIEELYANNVAHRNNIANRDFTYLFLEDIIFYQRPLKSKKSLVSNCPYEFRYFKKEDGSVEKTGVKCIAKSHPLYQEFRLLQWLKNLRIFSKDEVNEIDITDELLPTTADRERLFEWLNDKTEIDQKSFLKYGPFNLEERIKMRLGEKQYQIFKKDKEQGFDTYYRWNYVEDKKYPLNETRGEILKRLKRTGIDVNVLNNDVETHLWHILYSVEDKAEIESALNSFAKKHNLPEGFVNEFKKYPRLKKDYGSYSAKAIKKILPLMRFGKWWDWEAIDESTRQKIYKILTGEYDEKIKNRVREKAVDLKEEQDFQNLPLWLVSYIIYNRHSETSDVKYWKTAQDIELVKQHSLRNPIVEQIINETLQTVREIWQYYGEGKEKFFDEIHVELGRSLKEPAEKRKKVSERISENENTNIRIKSLLAELFNDDEIENVRPYSPMQQEILKIYEEGVYQNPDVTYSMVSESEINKIRKKNQPSSSDIKKYKLWLGQGYRSPYTGVIIPLSKLFTPAYEIEHIIPKAKFFDDSLSNKIICESEVNSLKGNQLAYTFIKNNRELKIELSHGRFVTLLSPEAYETNVKRYFGNNRSKQRKLLLEEIPDDFTERQMNDTRYISKVVKTLLSNIVREEDEDEAIAKNIVASTGAVTAILKQDWGLNDVWNSLITPRFERLNKMVGYEKYGFWENKNGKVVFQINTIEPDLLKLNKKRIDHRHHALDALVVACSNRNHINYINNENANGKDKSKPRRFDLRNQLRIIEEEEVDTVVNGELQRKRIKVAKEFLKPWETFTQDAKEELNRIVVTFKKNNRVINKTVNYYQKWLKQPDGTMKKAIVEQTKGDHWAIRKPLHKDTVSALVNLQIQKKVNLAAALDNSKDIVNKSLRKKINDLKSEGFEKKQILKYFKQLDNRWAGEDISKVDVYIFSSDKESTKLAASRVKLDESFNEKNIESITDTGIRRILLAHFEKYKGLLDENGKPVTPESLAFSPSGIEELNRNILVLNGGKKHAPIYKVRKFEKFGEKFNVGETGNNKQKFVEAAKGTNLFFALYMAEDGKRNYETIPLNEVVEHQKWRATLSRQEKDVTPLIPVNREKGKFLFSLSPNDLVYIPSAEELANPKSIDFSNLDSNQVKRIYKFVSCTGNQSFFIQSHVASSIVNNFEFSALNKMERSIDDIMIKSVCWKLETDRLGNIIKIVR

SEQ ID NO: 7390 - protein, 1080 aa, unidentified
  REGION 1..1080: note = Description of Unknown: Cas Enzyme sequence
MNYKIGLDIGITSVGWATVNLDSNDEPYKIIDMGVRIFDAAENPKDGASLALPRREARGARRRIRRKKHRLDRIRTLIFSNNLLTEDQFNNLFSHKKLKDIYEIRVEALDRLLNQDEITRLLIHLAQRRGFKSNRKSEKLAEEESGKLLKAVEINKKLMLEKGYRTVGEMLLKDPKFADHKRNKSDDYSHTVGRDLVLEEVQMVFDCQRKYGSEILNDEFESKYVEILFTQRSFDNGPGLPSPYSGDQIEKMIGMCRFEKKEKRAPKAAFSAEYANLLQNINNIRVNINGESRFLTGEERRAINELAFKSPALTYAKIRKELKFTESVLFSTLNYGNKSINDVEKGAKFDYLKNYHKVRVALDKIEKNRIYDYSIEALNGIGYAFTVYKTDQKIADYLNDFNISRKDLEVLLLHVGGFSKFANLSTKALDKIIPFLEQGFKYNVACEKADYNFKGHDGKEKQLLLPAEIDELTEVTSPVVRRAIAQTRKVINSIIRQYGESPTFIGIELAREMAKDFSDRNRIEKEMKENQAQNERIKQEISDQGVLYPSGIDIVKLKLWKQQDGICPYSLKEIQIDRLFEVGYADIDHIIPYSISFNDSYANKVVVLASENRQKGNRLPLHYLKGDKADKFKVWVNNTIRDKNKKMNFLKEDITEEDRKRFKERNLNDTKHVSRFMYNYLNDYLLFAENNTGKKKKVTTVNGAVTSYFRKRWGISKVREDGDLHHAVDALVVACTSDGMIQKVSRHCDYKEKRYVQLDEHVVDKKTGEIIEKFPMPWEGFRNELDIRLMDDPMKFLNSIGEFTEDNIKPIFVSRMPKRKITGAAHKETIFSPKLKDEGLILLKRPLEKLKLDKDGEIENYYNPDSDRRLYQELKEQLEKYDNYGKKAFSEPFYKPTKNGGKGPVVKKVKVYEKASLTVDVHNGKGVAYNDSMIRIDIFHVEGEGYYFIPIYIADRMKKELPNKAVVAHKSYKEWKGMNDKDFIFSLYPNDLIRIEGKKELKLSSVSMKGTLSKEYICKEIHAYYVKSGIKGGVITIINHDNTYTIQSLGIKTLKTLEKYQVDPLGNYYKVGKEKRMPLK

SEQ ID NO: 7391 - protein, 1182 aa, unidentified
  REGION 1..1182: note = Description of Unknown: Cas Enzyme sequence
QGNTAEQKHENYSWRAKGLSEKLELEQLVVVLQQINIQLNNSSGYLGAISDRSKELFFNKQTVGQYQMAVLDKNPNASLRNMVFYRQDYLDEFNTIWEKQTLFHPILTDALKEEIRDVIIFYQRRLKSQKGLISFCEFESRKIEVEIAGQKKIKMVGSRVIPRSSPLFQEFKIWQILNNIEVFGKGKKSKKQKGQTLFDQTEDPLEFGGRRELYEEEKELLASELSIKKELKKADILKLLFDNPKELDLNFNAVQGNLTQATLFNAYKKTIELSGHEIDVEKDSASKILKSIEEIFKALGYSTEILHFDSDKSLNQQAMYKLWHLLYSFEGDNSNTGNENLINKISELYGFEKEYAKILANVTFQDDYGSLSAKAISKILPYLKEGHKYDVACDLAGYKHSASSLTREELENKIYKDRLEILPKNSLRNPVVEKILNQMINVINSIIDNYGKPDEIRIELARELKKSAKEREELTKSISETTKLHQQYKDILSKAPFNLTNISRNDIIRYKLYEELKDNGYKTLYSNTYISPAAVFSGDFDIEHIIPQSRLFDDSFSNKTLELRSINIEKGNKTAYDYIKGKYGETGEDNSLDKYLNRIETLYKNGVLKKSKYNKLKMQDKDIPDGFIERDIRDTQYIAKYAKTLLEDLVKFVVSTSGSVTDRLREDWQLVDVMKELNWVKYQQLGLTEEFTNEEGHKIRKIKDWTKRNDHRHHAMDALTVAFTKRQFIQYLNNLNARRISDEQGISNAEKDERNNVSITTNDMKLNTRDVLGIEKKELYRDNRGKLRFKAPIPLQEFREEAKKHLENTLISIKAKNKVTTLNINTIKEAGGVYKKTQLTPRGQLHNETIYGSQKQYVVKEETINAKFDVEKIATVTKPAYRNALLKRLEQNNNDPKKAFTGSNALTKKPIWLDEQQTERVPEKVKTVSFETIYTIRKEISPDLKIEKVVDEKVRQILNNRLNEYNGNAKQAFSNLEENPIWINKEKGIALKRVTITGINNAQALHEKLDKEGKPILDGEGKKQPVDFVNTGNNHHVAVYRDADGNLQENVISFYEAVTRRNLGLPIIDKDYKKDEGWQFLFSMKQNEYFVFPNESTGFNPNEVDLLNPENYSLISPNLFRVQKIGSLLSGFWFRHHLETSVNTSKELKGVTYRVIQSTNYLNNIIKVRINHIGQIIHVGEY

SEQ ID NO: 7392 - protein, 1196 aa, unidentified
  REGION 1..1196: note = Description of Unknown: Cas Enzyme sequence
MAKILGLDLGTNSIGWAIRETDIFEREHYYELFQSDKYERFKENPDFKKSNLNNEIVDFGVCHFEKGVGDGKSGEFSLAAERRKNRSKRRLYNAKRYRKWELLKCLINNGMCPLTLEELELWSKGNRIEIDGKWKNKGRIYPLNNEDFQRWLSFDPAFFGDKGLSDKGNPIRKNPYDLRSELIIYKEENEYLRRLKTGRVLYHLVQRRGFKSSRKSGQSTYAKNEDIEKLKSENPNFQIALLAKEKLDEGERFRASGVIQRKYFEDEFYAICEKQEIDKDLVEILHKAIYFVRPLRSQKGLVGNCTLEKGKPRIPISHPKFEEFRALQFINNIKWREKGLNEFVGIPISLKKKILEELFFRKLSFGKNKGKISEDNYFKFDEIIKKYSENGTYEFNYKNLPNVSTCPTIASIMNVFQDEWSDCFIQDENRYGINWDGLSIKYKTQDYKNLGRRLKRKIVKGKIKYTEAELKEDKTLGIDEIWHLLFDYIQTKDNQDALEIFCKEVLGFDEKKAKSFAAIDIPQGYGSLSYKAISKILPFLQEGYIYSEAVLFANLKNVLGDKFEDNKEDAKKTIAETIKETTQIKEILNIVNGLIQNYFSEAEISRAKGVDKCIKDLAWQETNNRLKQYFGVADWNKKSETEREKLEQKVFELYLRFLNGEQKDDEKASAKGIKVPEIDYYKLPRLDIAIKEKLKTQFKVSDKALKLLYHPSDIEMYPVSKTEIKGTDIKLLESPQPPSKGWKNPMAMRTLHELRHLVNYLLKIGKIDKDTKVVVEMARELNDANKRWAIETYQRYREEENKEFAKAIVGVVKQKYPNINENNIENINRIRLWWEQIDNNEEIYRQIKSLKEDVEKYRLWKEQDCVCMYTGKLINITNLFDGTQTQLMHTFPLSISFDSSLANLTIGDAFYNNEIQGNKIPTQLPNYKNDIIINGRTYTAIEPRLKKWQDKIQHLVDLIDDNKRRTKKTQDVETKNDLIRKRHLLQFDYEYWQKKVDTFTMEEVPLKWKNSQLVDTQIISKYARSYLKTVFEKVDVQKGTTTDSFKKIYQIKGEEQKDRSKHSHHAQDAAVLTIIPGSAKRDAILEEYYKSLEKKEKYHIKPYESYVSAHIIEIENNVIINHIPHDKTLTPTIKHIRKRGKKTGKIAQGDSIRGQLHKETFLGAIKALERNEEGFPIKENGKYKVRKDKTGEDEMY

SEQ ID NO: 7393 - protein, 932 aa, unidentified
  REGION 1..932: note = Description of Unknown: Cas Enzyme sequence
HPKYEEHKRNKDGKDRYLGTAQRDLIIDEIKQILVAQRTFGNDALTEAFEQEFIGNGEGEAAGIFTAQRDFDEGPGKGSPYGGDQIEKMIGWCTFEKEEHRAAKGTYTFQYFELLSKLNNLKIQEFAGEDWKELNPDQRQLIIDKAFAKEKLQYTDIKKLLKLEPEAKFNLLSYGSKTEQEKTEKTNFVTLRNYYNVRKVLGAEVYEAMPESLKDEIGTILTTHSSDKSRRRVFADRLSLTSEQIEALLPITMTQYGHLSLKAMRKIIPYLEMGMTYDKACEAAGYDFKFNEITRDYIHANVSNPVVKRAVSQCIKVVKQLTREYGKPDAINIEFSRELGKNFDERRKIDKSQKENMARNERIANKLRENGISVNGENITRLKLWEEQGNMDPYTGQYIPYEEVFYGNYDVDHIIPYSISFDDSFGNKVLVSSAANREKGNRIPMEYLGKDPLRIQSLENIAGTIRNYHKREKLLKKKMSPEDVEGWKSRNINDTRYIARLLRNYFRQNIDFAENDSFKEKVAVNNGIVTARMRARWGLGVKHRDNDRHHAMDAVVVACMTPSFVKKVTAYSKRQEVRFNKSLWNAGTLESDIENMSLEKREEYEKMFSKAFPQPWEGFRDELNARLSDSPKELITNIKNTLGTYTDAEIEKLKPMFVVRRPNKKVTGPAHLETIRSGKLLDEGKAISRVSISKLKLNKNGDIGTGNAEFYKSDDNGWLPVYNALKAELEKNGGSGEKAFSDGVFTYTQENGQTHTVRKVKVVQKSTLQAVLNDGKAMADNGSMVRIDVFRTPKKYVFVPVYVKDTVAKELPNRACVPLKPYDAWYELSDEDQFLFSLYQNDVIRIEHKTGIPLTYNGENQGNGKVDNLIGYYSSANIALGCITIRANDSAYSAVNVGIASLPLIEKMQVDYLGRLSQVKERNRQTFSNMKR

SEQ ID NO: 7394 - protein, 1078 aa, unidentified
  REGION 1..1078: note = Description of Unknown: Cas Enzyme sequence
MQLREDIILGLDIGIGSVGWAAVQANNDGSFSPVYLPSSNGDSQYALGVRAFDIPENPKTKELLNVARREKRRQRVTIRRRRKRMQKVRNLLVKHGLLRSDDPQQTHYPYRRERPQHDPWQLRQEGLQRMLRNEELAVILIHIAKHRGFKSNSKKDKSLGGGTETGKMLSAVSSLEARIAESGAETVGEYMAGLDRKRNRRGFDDKAVYDNTILRDLLAKEANILFERQRSFGQNNASDALLTSFKEIAFRQEPLKSVEGLIGSCLFEPGEKRAPKHAYTSEKFRLVQRLTVIRLRYPEGRSERIASLKVKELAGTLGTSKGITYKALRNFLKLDSSVLFEGLDYGKKDKAGKEVDAEKSDIVTRTRACAEGSHTFYKVLGKNIYSGFVEKYTENGQRVIDAASRIISVNDDLQKISEELANLPLPEQEVRLLTEAVHEGRFSHFRGTMNLSLKAMQNILPHMIEEQDYAAGCEASGYDHAKTRPVNPDAIRNPVVRRILKEVRKQFRAVIRELGVIPGRVHIELLRDMGKSAEERNEIENSIKRRTAEKKQAREYFASLVHKRPEDISVTELMRYELWKEQGGKCAYWILWRHCGGGRHYTAGHMPEGSIALTSLLDEYNQVQIDHILPRSRTFDNSFHNLCLCSTAANQAKGNLTPWEWLGRDNPEAWHEYEAWIRSLRIKGLKKRNYTLKNLDQDREGRFHERNLTDSRYAARLVLAWFAEEYGNLGVDDHDLEGCAINRFRSRPGQLTSILRQSWGVNGLKYDDMKQRVGDRHHALDALVVACCTESTLQKMTQLYKLMEHHQEKYRLTPQIPAPWDNFRNDAARMLRNVFVSRAERGNTKGALHEETLRQVRVEIDDNGNEREIIYERVAIKDLNENDLVRIKDAERNKWLIDILRAWIAAGKPKGTPPSSPKGDPIRKVRLRRGAFTSGIKVARGEGLAQADNAKMVRTDVFTKDGKYYLIPVYTSQIARGEAPNRAVVANKPESEWTLIDDTFSYLFSMTPNSYIVTEDRKGLIREGYFTSTDRTTAAITLRQANDHTKEIRSGTKTLKLFQKYRVDRLGRLYRVRKEVRP

SEQ ID NO: 7395 - protein, 1473 aa, unidentified
  REGION 1..1473: note = Description of Unknown: Cas Enzyme sequence
MFSQRNNPYCDLLQNCGTNLKKKIIKDKKYYNLLLMKRVLGLDLGTNSIGWAIVNEAENQQEKSAIIRLGVRVNPLTIDEQQNFEKGKSITTNADRTLKRSMRRNLQRYKLRRDNLIEILKKSNIISDDTILSENGPRSTFETYQLRAKAATEEITLEQFSRVLLMINKKRGYKSSRKSNSSEDGTLIDGMEVAKQLYNENLTPGELCLKLINEGKKNLPDFYNSDLQAEFNKIWQKQTTFYPGMLTTDLKDKLFGKNEKVTWTICKDQFKWEETERIWNNTESKNEDISVQKTLVGLKRNGNKQEQKIENFVWRSKALYEKLHPEEIAIVLSKINAQIYGSSGYLGLISDRSKELCFNKKYVIGYENLPPHKQTRPQTVGEYKMAVLANNPHASLRNMVFFRQDYLDEYNVLWETQAKFHKELNDDLKREIRDVIIFYQRRLKSQKGLISFCEFESKKEEIEIDGKKKIKTIGSRVIPRSSPLFQEFRIWQVLNNVEVSTKDRINKKRKDKASSLFEEQEDKLKIYGKRELYQEEKELLALELSLKEKLTKGEVLKLLFDKPQELDLNFAFIPGNTTQARLFEAYKNIVEQTGHNLNLKNQAFQIIQDVEKIFTGLGYNTQILHFDSSKPLDEQPMYKLWHLLYSYEGDDSTTGQEKLISQITHKYGFEKEFANEIAKIVFQDDYGSLSAKAIRKILPYLKEGNKYDVACLYAGYRHSASSLTKEEIEKKLFKDKLDVLPKNSLRNPVVEKILNQMVNVVNAIIDTYGKPDEIRIELARELKKSAKEREDLSKFIAETTKVHEEYRRILTKPLSEGGQFGLVYVNRNDIIRYKLYEELKDNGYKTLYSNTYISPGSLFSGDFDIEHIIPQSRLFDDSFSNKTLELRAINLEKGNKTAYDFIKEKYGEQGEDNSLENYLKRISVLYNKGVLSHVKYNKLIMQEAKIPEGFINRDLGDTRYITKYAKTMLGDLVKRVVTTTGSITDVLRNDWQLVDVMKELNWDKYDRLGLTYYETNNEGKQLKRIKNWTKRNDHRHHAMDALTVAFTKDAYVQYFNNKNASFNTSSNEYALKTKYFENNRAIPPIPLDEFRAQAKRHLKNTLVSIKAKNKVITQNVNTTQKYGGVNKKIQQTPRGQLHLETIFGSIRQYVTKDEKVGPSFDEDKIKTVSKQIYRTALWKRLQEYDNNPQNAFGGKNSPIKNPIYIDKEQTVTLPEKVKTVTYKTIYTIRKEISPDLSIEKVVDLKIRKILEDRLKEYENDPRKAFLNIEKKPIWLNKDKDISIKRVTISGITNAENLHEKRDKNGIFLLDNEGNKQPVDYVNTGNNHHVAVYRDSEGNIQENVVSFFEAVARRNLGLPIIDKAYKEKDGWQFLFSMKQNEYFVFPNELTGFFPNEVDLLNPDNYSLISPYLFRVQKISFKNYVFRHHLETSIKDTTSNTRNITWTDFRSSKGLDKIVKVRINHIGQIVSIGEY

SEQ ID NO: 7396 - protein, 1242 aa, unidentified
  REGION 1..1242: note = Description of Unknown: Cas Enzyme sequence
MAKKILGIDLGVSSIGWALIEEAENENKIISMGVRIIPLSTDETDKFSKGNTITKNQDRTTKRTQRRGYDRYQMRRKALTKVLIENDMFDPELFKLKALELWGLRSKAVNEQISLKELGRVLYHLNQKRGYKSVRKVENEEKKDTKYVEEVKNRYDELKNQGITIGQKFYNELLRDSYYRIKEQVYPREAYIEEFDKIMSCQQKFYPQILTNEIIDKIRNDIIYYQRPLKSQKSLVSVCEFEGKWIKITESKEIFIGPKVAPRTSPLFQVCKIWETINNIEIKNKNGEKYKITIEKKNEIFQFLDNNEKITQKELFKILDLNSSDGWYGNKQIQSGLQGNITKSKILKELKNYSYDNSITDFNIEIEDTGSETYLLDRKTGEIFDFQPRLRVSPNIEKQPLYQLWHVIYSVDDEEECKNVLIKKFGLIEEAAERLARIDFKTPGFGNKSVRAMRNILPYLMKGYHYSDACSLAGYNHSNSLTKDENLQKKLKDKIELLQKNSLRQPVVEKILNQLINLVNAIIDEKRGWVTREERLNNQFEIRIELARELKQTKEERNKTLKNQNDREKQNKIAAERLAEYRLKATRNNIIKWRLFHEMTRDESKINAQCIYCGKMIGIADALTGNGVDVEHIIPKSLLFDDSQDNKTLSHRACNAEKGNRTAYDYMKAKGEETFNTYVERVKNLYENKLISKSKRDKLLMSEDKIPDDFINRQLRESAYISRKAREILSTVCYNVWSTSGNVTAYLRSIWGWEDALMELEFPKYKEKGLTENVEWDSNGNTHKKEIIKDWAKRDDHRHHAMDALTIACTKQGFIQRINTLSSKKNREEMMAELQQHKIQIHDRLSLLDKYFIAKRPFTTEEVKKKLSQIFVSFKPGKKVATKSVRKVKIHGKKIVVQRNILTPRGPLSEESVYGKIKVVEKDKPLRYLFENPDLIINNVIREKVNERLAQYNNDSKSALKSLKKDPIYLDKDKTLILEKAHCYKEEYVIKYPISSINEKDVDSIIDKKVRELVRQRLNQFYNKPKEAFKEPLYFDDEKRIPIRTVRMFTGLSAVETIRTDAEGNPIAFVKPGNNHHVAIYIDIEGNYIEHVCTFWHAVERKKYGLPVIIDDTSEIWEKILNSDVKFPQSFLDKLPPDGLKLVISMQQNEMFLFGFSEDETIKYLEDKEYSILSNNLYRVQKISTRNYVFRHHIETSLKDDNISKEMRKFYLFASLKAFLSAKPLKVYVDALGNMSLSLQHN

SEQ ID NO: 7397 - protein, 1024 aa, unidentified
  REGION 1..1024: note = Description of Unknown: Cas Enzyme sequence
MRYVLGLDLGTNSVGWAMVRQDGGTFDNGTPILAGVRVFPEGVADMNQKKEKPRGQDRREKRGQRRVHYRRAGRRRRLRRILQSAGLLPNDKRSLHALARLDPYGLRARALEKALMPHEVGRALYHLCQRRGFKSNRKAESGDENKVTKQANALEAEIEAAGCDTLGQYCWKVQSRKPRPPGFRVRGRYTLRKMYETEFDRLWEKQRPFHPALMTDDLRERVRDAIFFQRPLRFDPEIIGDCELEAGEKRCPLAHWLSQQFRMLQEINNLRVLDGGADRPLNQDERSLLAETLAARKDMKFEDIRKGLGFLDNQTFNLESEGRRKGLKGNAVEAALRHTTLKNWYEPLSAETREAVHNALAEVEDAGDLRRLALDQWACSQHQADHLARISLPNGYGRLSAKAIRKILPFLQPAHVCDSRCGSLFPHKEASAGHVVSEAKALAGYPAEPPMPVFDRLPAIPTRGDKASWNTADPPLRQLGAALTNPLVRRTLAETRKVVNAILGEFGKPEEVVVELARDMKHSRDQRRSIHFDNIRHNEENEAIRARLASEFGIPEPSREDVLKYRLWQECDICVYTGRPIPKAKLFTPEVQIEHIYPLSRSLDDSYLNKTLCFGPEVNIRKGNKTPWEAYGATPELEAILRRAERLPWKKRRRFTVKEVAFDDFAQRQLNDTRYASRLARRYLQILGMSVRPVKGQTTSRLAHYWGLYGVLGTNYAKERDDHRYHAIDAIAIALTTRSHLQRLSTVVGASPKDRPMAPPWEDFWRDVRSAVQAIQVSYRPARKLAGALHEETGLGPTRTAHTYAYRVPVQRLTAAMAKKVRDPKVREIVLAWLAEREARKPRAQEPKISEPFPHMASGVPIKRVRIETIEKTALAIRKVAGKAVKYVAPGGNHHVEIYQKPNGAWDGRCVSRFEADNRRRRGLPVVVREPKVDDVFNGCRFIMSLCMNDMALLTMPNMGEVQLHRVQAISVSSPVVVFRLHTASTLEDKAARVLIGPWDTLRKYKVQKVYVDPLGRVHPCRHD

SEQ ID NO: 7398 - protein, 1296 aa, unidentified
  REGION 1..1296: note = Description of Unknown: Cas Enzyme sequence
MSNEIKKILGLDLGTNSIGWALIERNDSNGTGKIIQAGTRILPMTQDIIGKFAEGSTISQTADRTKARTARRLLERKKLRRERLHRVLNILGWLPAHYAKCVDFTSRKGKFFAGKEPKLPFNDGKFLFEESFQEMLNEFKQYNPSMSESSLLPYDWTVYYLRKKALKEKISPTELAWLLLHFNQKRGYNQLRGEEEDESNTKIEEYHSLFIKDVKADDRANGKGEVWYNMELENGWIYRRSSRNPLFNLKGQTRDFIVSTECLEDGSPKADKDGTIKRTFRAPKEDDWTLIKKRTEKDLQNSRQTVGEYIYAHLLSNPGTKIKGGLIRTIERNFYKEELERILLKQAEFISDFTNSQILEKCILDLYPNNIPHQELLKGKNLQYLLLEDILFYQRPLKSQKDKIADCPLEKRYYKTEQGIKSESLKVCPKSHPVFQEFRIWQWLSNLRIIDRLEETDVTSSILQQEIIENLFEFLIQKKEIKQKDILRILKLKETQFRWNYPEDKSYPMNETFWLIKTRTEKIADFNSGLLATNFVEELWHILYSVQDKVQYEKALLSFAKKHSLNPEDFRIAFKKVPSFNEEYGAYSLKAIKKLLPLMRMGKYWSEDNIYPSIKQKIDKILNAEFDPEIPDRVRDKVKHLNSLTEFSGLPEWLAKYVVYGLHSESMENTIWTSPSDMEQFLKEFKQHSLRNPIAEQVILETLRVVKELWMHYGDNLPKPFDEIHIELSRDLKHTKDERKRLSEVQSRNESTNVRLKTLLLELSNDPTVEAVRPNSPMQLEALKIFEEYALAQASVSDDILKISRMANPGKAELQRYKLWLEQNYRSPYTGEIIPLSKLFTPQYDIEHIIPQKRFYDDSISNKVVCERAVNQAKDSMTGMEFIQSKGGSMLDIGFGKMVKIFKEEEYKDFVTTTYANLRSKKVKLLSRDIPEKMVERQLNDTRYISSYMMKVLSNIVRDKEQDSGMNSKNVIATNGKITTQLRNDWGLDVLWNELILPRFERLNNLVGPGFTVFNERHQKQLPAIPLDIEKTLGKPLSKKRIDHRHHALDALVIACTTRNHINLLNNINALDKRKSSDERQKLRNDLKTLLCKKLYQDEQKENYSWIFKQPWEGFVPEARTVFNNMLISFKSNTRVINKSGNRIEKWVDGDKKLVREQNGEHWSIRKSMHKATVSGKVSIRLKKTINLRSALEDPDMIVDRKVKFKVKELFKQNFDKKGIQKHLSEIQKLEVYYFDNELAASRTALSPAFTKEYIDCVTDSGIKKILLKHLDENENESERAFSPEGIVSTPKNQTI

SEQ ID NO: 7399 - protein, 1405 aa, unidentified
  REGION 1..1405: note = Description of Unknown: Cas Enzyme sequence
MNKILGLDLGTNSIGWALIEQTAGQRAGKIIGAGSRIIPMSQDVLGKFDNGQSISQTAERTRLRSIRRLRERHLLRRERLHRVLNILGFLPDHYARQIDFDKRLGQFIPESEPKIAYRVDTPGVKPVFLFEESFQEMLLDFAEHQPTLVSDNKKIPHDWTLYYLRKKALTQKIEKEALAWILLNFNQKRGYYQLRDEDEEEKRNEIEAFHSLRVIDVVATGERKGAEEIWYQVHLENGWIYPRKSRTPLDWIGKTKDFIVTTQLNDDGTVKTDKEGKERRSFRAPSDDDWGLLKRKTEHTIEESHKTVGAYIYDALLQNPDQKIKGKLVRVIERKFYRSELERILNKQREFHPELSQENLYEQCLSELYENNENHRNNISKKGFTHLFLDDIIFYQRPLKSKKSLVSDCKYERRVFLRDGKKEIEPLKCIAKSHPLYQEFRLWQFIQNLRIYQREKEIGGKLQTDVNVTDEFLRTEKDYVALFDWLNDKKEIDQKTFFKYPAFNLKKGIDKYRWNYVEDKSYPANETRSLIVSRLEKVEYVPEGFLTRENEEALWHILYSVEDKNDIKKALRTFSEKKNLSSDFIGIFQKFPVFKKDYGAYSAKAIKKLLPLMRLDKYWSEKAIDSQTKRRIDNILTGEYDATIRTRVREKAIALNTLQDFRNIPVWLASYIVYDRHSEDGDSIRWKTANDITFLPQHDLRNPIVEQVINETLKVVRDIWNHYGKGQENFFHEIHVELGREMKNPASKRQQMTTRIQENENTNLRIKKLLAELLTDPEIENVRPHSPMQQEILKIYEEGALQSAEDLPDDILKISRLAQPTSTELTRYKLWLQQKYRSPYTGQMIPLNKLFTRAYDIEHIIPQSRYFDDSFSNKVICEVEVNRDKDNSTAYEYIRDNAGKKVPLSFGRETTLLTLHEYEHFIKTHYTRNRSKLKKLLMEDIPEDFIQRQLNDSRYISRVVKGLMSNIVREDGEQEAISRNVLACTGGITATLKQHWGLNHVWNEIITPRFERLNVLTNSKLYGGWTTKDGKRVFQIQMPLEMQRGFDKKRIDHRHHALDAIIIACATRNHINYLNNETALGKHTRDEKDKKRYDLRNKICFKKYNDETKQNYSWIFHKPWETFTQDSRAMLESIVVSFKQNLRVLKKATNYYQTWRPNNEGQLVKVTIKQTEGDFWAIRKSLHADTVSGQVRLKRKKTVSLATALDEWEMIVNKEIRKRVKDLFDLHPDKKKVKKLLTEQYPELSKIEIYYWNEDVAASRTTLNEKFDPDWIESITDTGIQKILDRHLQVHRESNSPGGHPFSPEGLDLLHQNMLALNDGKQHKPILKVRTSEPLGNKFRIGQTGNKKDKYVEADKGTNLFFAIYTDDKQNRQYETIPLNIVIERLKQKLLPVPEINEKGNALLF

SEQ ID NO: 7400 - protein, 921 aa, unidentified
  REGION 1..921: note = Description of Unknown: Cas Enzyme sequence
NVEDNHLTIKDKVLELMKFRIPYYIGPLNPAHKGEDKADFAWVIRKEKGKVFPWNFDKLIDKDKSAEEFITRMTKKCTYIKNEDVLPKQSILYSEFMVLNELNNLQINGNPIDIDLKTKIIDHLYKKNKKVTLRKIKKYLLANGYFSSDDPIIFAGVDDELKNTMSSYISLNNIFPGFESNFNQYEMVERIIFLLTLFEDNKMAIERIKKEYNNLDKKTLDQIKRLTFTGWGSLSRAFLEDKLRVVDDNGQPITIMYLLKKENLNLQKALYDTRYNLIKKLDDINSHQLSQKDLTYESIMEDVYLSPGIKRSLWQALKIVDEVMKIIGRPIDKFFVEVARGGGIKGKRSYSRRNQLENLYSKAKEQADLVDLMKKELSKIEDDNKLRGDKLYLYFLQLGRCMYTGKAIDLDKLASNAYDIDHIIPRSYLKDDSLNNRVLVEASANKVKSDTYPYLDIIPKMLGFWKKLKDNNLINDEKYKRLTRKEPLTDREKGDFVNRQLVYTNQAVKALNEILIKSNPKSDVVYSKAGNVSDFRHDFNIIKSREINDFHHAHDAYLNIVVGNTYHTKFGKNAIIFFQKEKDKDSFRSTKKLFFRDTKGAWDKKESIKTVEKMLSLKDVLVTKMVVERKGGFYDETLYPKTDKNAQDLYPLKTLDKRYENTEKYGGYKSLNIAYFMVVNHKKGKKRIETIEGMPVVFVEKLKRKEISINDVLENYLNLEDPKVIVDKLKVGTLLKIEDAYANLGGKSGQQIITHNANQLFLNKDYTKYFHLIEKHERGIEKIKDLEKYNEPEYIISKSSNKNIPDQKLTKDMNLKIYDELIAKFDIGLYKGITIGGFYQDFVDARDNFIKINVRQQAHSLHEMVKMMHCNATPGKFSLFMRNSSSGKGENKISKNITNKKIVIYDESVTGFYRKVRWQKQ

SEQ ID NO: 7401 - protein, 1065 aa, unidentified
  REGION 1..1065: note = Description of Unknown: Cas Enzyme sequence
MGLHVGLDIGIASVGWAVLDPDGHRIVDLGVRTFQKAENPKDGSSLALPRRLARSSRRRLSRRRARMSDFRDFLAESGIVASDQLEITFIPAPDEPTPYQLRYEGLDRQLSPREWARVLSQLCKRRGYKSMKFTVDSSGKDDDEGRVKSAIAENAARMTERGYRTFGEMLWLDERFKESRRNRGDYKGVASRNQIIEEIRLLFEAQRNHGNPFAATSLEDRYLEILQQQQLILEGDAIRAKVGKCSIDRINPRMPAACPTFERFRLVDKLHNVRYTLPGAGTRVPLDKDQRDLVIEKALGRTAKLTYADVRKICALPEQARFVGVRYGSDTTDVSAERKERIPLPRAWHDMRRALSDLPADTWENLSGDIDRLDDIAEVLTYYKYEESVIRELRSLGIPDDVACALSGLRFSGHGHLSRQTLRAILPFMEDGLPYSEACAAAGFHHSQRVDGEKHKKLPPIPVDDVRNPVVLRALTQTRKVLNAIIREFGPIEELHIEFGRDVARSHEDRRKIEKAQKENRARNESVLEDIEKDLGIASPRPHDIMKYKLWKEQGGLCAYSGDYIDRVRMLSGEPGVAEVDHVLPHSRSFDDSFMNKVLVTTTENRRKRERTPYEYLGGDPQRWHEFEERVLSMHLPRPKRERLLRTDFDERASEEFRERNLNDTRYIARYFKSFVEENLIFAGDRKAPVVTVNGRATAYLRTAWRLQKVRADGDLHHALDAAVIAATNRSMIQQVSRFFSVRPLRNPHGEYVDAATGEIVPAKHVPEPWEGFADELRERMGVRWGTDPFGELQHIGREVPRPILVSRMPNRAVRGEVHKETVRRIEGLDEKGLIRTSKRVRLEDLTPRMLDNMVGRTRDRELHEALAERLAAFGGDGKKAFAEPFYKPSKPGRKAPRVRAVRVYDSPSSGGTEVRGGLADNSTMVRTDVFERDGRFYLVPVYLKDTIKGELPMRAIAAFKPESQWREIDDSYRFVFSLHLNDPIRLVRRSGGSSVAMGGYYKGVNRSSACIDIEAHDSSWQKQGQGVAMGVESFEKYSIDPLGRTAHLVRQEKRRGFSNGSGKQ

SEQ ID NO: 7402 - protein, 1399 aa, unidentified
  REGION 1..1399: note = Description of Unknown: Cas Enzyme sequence
MNTAVSKDSRGSDYYLGLDIGTASVGWAVTNTDYELVKEHRKYLWGVRLFDTADTAAERRLHRAARRRHQRRLQRQRLLKEIFEDKISEVDPHFFERLKESSYHREDRSGNFLSTLFNDESFKDTDYFAKFPTIFHLRSHLIHHPEERPDIRILYLAIHSILKHRGHFLFPGESLESISSFSLLFDELLKNIETSLQCTLHVSCTPETFGTILKKKRRTDKKNDLQGVLTLTRTTEEEIEETPKKLTSELIKALSGTPFLLSMLFKNDSYKDSEQDKIEFDKEGFEDLKESIEVLLEPEEYALIETLEGIYNWTLLSDILNGEKFISDAKVASYRNHKDDLKQLKLLVKKYAGSAYYKAFKDPSIQNNYAHYIGTGNKSGKKVQVAHKGKCLQEDVNKYFHNLLKPYQNDEDRDLDNMLEKLEQKSALPKQRVRDNRVIPHQLHLKELQIILENAKAYYPFLTIPDDDGYTPTQKIISMMTFRIPYYVGPLNTSHMEKEGKEGFCWMVRQQGKEDVPIFPWNWTEVVDKNASAEKFITRMTNSCTYLFNEEVLPKFSLLYNRYMVLNELNNLKVNGEPISVELKQKIYNELFLHSGKKTITLKMLQKFLVVNNIVNKGDVTTIEGIDNGFANSLKSHIDFAPYLEANILSVEDVEKIIEWKAYYVDDATILKEKITQELHEKLTSEQIDDITKLVRNYKGWGRLSRAFLEDIYHVDRATGEGYSIIHMMWETNENLMELLSSKYDYLDEIQRINNETLINKKFSYESLVKPLSVSPPVKRQIWQTLLIVHELKKVMGKAPKRVFIEMAREEREKKRTTSRKESLRILYDRCKNDISFNKALLESLDTKTDVELRNDRLYFYYTQMGRCPYCGGKIELDQMNNTQLYDIDHIYPQSLIKDDSLNNRVLAHKACNGEKGNSYPINPKWQNTMIGFWKVLLDRSLISEEKYARLTRTTPLSDEELFAFINRQLVETRQSTKVVASILKNLFQDENTEIVYVKARNVSSFRTDFEIKKSRLVNDHHHAHDAYLNIVVGNAYHTKFTRDVRNFIKELKRGDQYYNASNIFSRSIQRNGRLAWIADERYDANKGRPKSEKQETGTIATVRKMLRNHQVLVTRQAVEVSGALFKLQPLRKKKNLLPLKGSSQTLQDTTKYGGYNAPATAYFALVQHEKKGKEVRQFVPVPILYAEQFKQNPGTLLKYCEEELDLINAKIVIPQILLHELVQLKGYTMSLSGITGTQIIANNEIQLVLGEEQYDYIAQIEKYLSLLKKVKAPEIKENAEILAESLHICKQDNLTLYELLLAKERDSIYRYRPANQAKFLEEKRSVFESLDIKGQCAVLVQIINLFTCTPESANLTKLGGGSSSGIVKFQSQIADKEARLIHQSPTGIFTKSRRVYEI

SEQ ID NO: 7403 - protein, 1473 aa, unidentified
  REGION 1..1473: note = Description of Unknown: Cas Enzyme sequence
MAKILGLDLGTNSIGWALIEVNEQGEFLRLIDCGVRIFPKGVNVDQQNKESSKNKIRRDARRARRNNFRYKKRRQKLLRELSKIGIKPDSYFYTNERKSKRGFKKSDIWNHTLELFRLRKRALNEKVSLPELGRIFMHLNSHRGFKSNKKEEAFVENNEETKKEKGAVDKRINALKRRMQELNCDTLGEYYFYLIEQNQNSHNVNEPKIESTEDFTDAIRGEGAYTLREMFEHEFNRIWAKQKEFYPEVLTDENKEIIGDDCIFYQRKLRSVQHLRNRCTLEYKPITVYKFNKEKAKEQIVAIKFKASDEQDFQNFSAQEIDKLYVYLTKNKYRLTIGDLTSVLGLYKLVSKERRKKDKFRFIFQNLPKEKQIRKKYLPATPVSSFEYQDYRIWEQINRLRFTNSDSTFAELNAEQKQILANALAFKEKIPFKGKKEKTVSEILGFPKETEYNIDKDYLIGNKTQARLINALGKDFWEELSLKERKTLWHNIQYAEDKKWLKGDKNFIEKTQRANKRRNHIHQNNYSLKQEWLATITRLGLSKKQIEKYADVTFEPDYAPYSLKAINKLLERMKQGSDVTTASFEVYGKYASEIQDKSSILEYKVPQLPGNSLKNPIVERAVVEAIGIINAVIDEYDKPDKVRIEMGRELKMPKIAREERNLKNKNINTRREFYAKFLNDHVQIERNNYEASSPDIKKFEMFLELNYSQEAFERIKKNISAKEFRDFLGANIPKNKEKYLLWLECDRIDPYEGKTIGLAQLFTSEVEIEHIIPYSRSMDNSMVNKTLSFKKFNALKGDKIPLEYFDGDTRKLDEFKQRIKHFSDVKKERFLMKSEDLGGFLNSQRVNNAYIAKQIREHLLKAFRNNDIEMTNGQLTEIVRRTLALDQILNPAIRADGYNIRGKAWGIFNGNQAINFLERINDKSPQGYDDYKIVKGSVYNNNFYPVKNRNDHRHHTVDALVTALINLKIQKEITGCTEGYYLKNGKKYSVSEIEKMYQHFSDFKNDIEDESLKFISKFEEKNGRYVFSKEARNDINQVLIAKLGLNDSAQILNETKEEIRYVLVSHKNDKIDSQPRKKLYNSNGTPKMVAGKNGKYQVKSGGDYVRGNMFEANPYGQTNDCAPNEYVKRVPLAGITLAQISRIVDKAIKSIVIENISQFVQNIIDEENINLNGEVKKLILLKMEQADIKEQISNFKDSSDKQSVSRRKTLKLQMDDIKSSINDIVPNKETENDFKKAFDRGRKLAFSSGFYLKNEGKRKSKLGKPAGSIKRDDIPIKKVRIKYISNTMVPVKPEETPRNKKYMKPDGNYSMAVYGSVDSNNGERIFELLSWYKKARIDSENNKRKKDRLSKLDYYSKSKEGLPFLFEVKHNDAFLIFDDNPLEEIVFNNKQSLLNRLFIVNDFDTTGKIVLKRHHLILEKQATKEESALDYTSGEGKVFRCRAWNLNAVPVIFDSIGNIDIEYSKKFIEKHAK

SEQ ID NO: 7404 - protein, 1554 aa, unidentified
  REGION 1..1554: note = Description of Unknown: Cas Enzyme sequence
MKKILGLDLGTNSIGWAVVNADESTRENETTYLRPTGISAAGSRIIPMSADILGNFDAGNSVSQTEKRTGFRGVRRLHERNLLRRERLLRVLKVMGFLPEHFACQIDNYGKFINHGEPKIAWQKGEDGNYHFVFKDSFEEMLEDFAEHQPQLVADGKKVPYDWTIYYLRKKALTQRLKNEELAWILLQFNQKRGYYQLRGEEEEEQHDKLVEFIAQKVVRVEATDEKKGDDVWYNVYLENGMVYRRTSKMPLDWEGKVKEFIVTTDLENDGTPKKGKDGNIKRSFRAPKEDDWTLLKKKTEFDIDNSHKTVGCYIYDTLLQKPNQKIIGKLVRTVERKYYKEELRQILETQIALIPELKDDTLYKRCIEELYPSNEAHRSNIAKPNFANLFINDILFYQRPLKSKKSLISDCPYESRFDKDGNEHPVKCIAKSNPLFQEFRLWQFVQNLRIYQRERMVSDGQLDLFGNVSAGKLQTDVDVTSEFLKTEEDYVKLFDWLNDRASIKQDTLLNSYFKFKKEKGKDQYPYRWNYVEDKEYPCNETRATILGGLAKCSIDASFLTRDKEMSLWHILYSVEDKTEISKALTKYAEKNGLADSFAEVFAKVKPFKKDYGSYSEKAIKKLIPLMRMGKYWSVDAIDIKTKERIDKMLTGEYDENIRNRVREKAINLTNIDHFRGLPVWLACYIVYDRHSEAINNKPWEKPEDIDRYLKEFKQHSLRNPIVEQVVTETLRTVRDIWKQEGQIDEIHLELGREMKNPADKRKKMTERILENENTNLRIKAMLMEFLNPEMGIENVRPHSPSQQDILRIYEEYALNSKEKYDETKRVFIPDTDDIPEYVTKVITGLGSTDKKKQPSKSEIIKYKCWLEQRYRSPYTGEMIPLAKLFTSAYEIEHIIPQSRYFDDSFSNKVICEAEVNKLKDRQLGFEFIQSHKGEKVQISQGKTVEILSVEAYEKFVKDHYANNRTKMKKLLMDDIPDGFIERQLNDSRYISKLVKGLLSNIVREKLENGEYEQEAVSKNLISCNGSITDRLKKDWGMNDVWNSIILPRFQRLNELTGKDCFTAINAEGHEIPAMPLELQKGFSKKRIDHRHHAMDAIVIACATRDHVNLLNNEAAHSKHNANRYQLQRKLRRFEKIVIDGREKEIAKEFIKPWDSFTTDAKQALENIIVSFKQNLRVINKTTNSYQHYDENGKKVMKKQVKGDSWAIRKSMHKDTVFGEINLRFVKQVSLNEALKTPKAIVNKEFKKKILELQEAGRDTKYIKKYLEDNKDVWSDIDIKKIEVYYYTKETKDRYFATRKPLDTSFNRKKIEESVTDTGIQKILLAHLDAKGSDPELAFSPDGIDEMNRNIVAFNKGRSHQPILKVRVYEKADKFAVGQNGNKAAKFVEAAKGTNLFFAIFGIEKENKETGETETVRSYLTIPLNVMIDCQKKYGSQWRDNIETYLQEQQLVADDAKLMFILSPNDLVYLPTKEELKDGIMEMDKKRLYKMVSCTGNQCFFVDEKVAKVIVDKVEFTSMNKAERAITGEMIKETCLPIKVDRLGNIIELNGKKL

SEQ ID NO: 7405 - protein, 1693 aa, unidentified
  REGION 1..1693: note = Description of Unknown: Cas Enzyme sequence
QKHNSMKKILGLDLGTNSIGWAVVNAETETRMVENEYQSGEKTYLKPIGISSAGSRIIPMSADILGDFDKGNSISQTADRTKSRMARRIRERNLLRRERLLRVLKKIGFLPEHFANQINEYGKFLNYDEPKLAWKKNPEGKNEFLFQQSFNEMLEDFKKNQPELVSVKENGEQRKVPYDWTIYYLRKKALTQKISKEELAWILLQFNQKRGYYQLRGEEDEDDNSKLVEYLEQEVVRVEATNEKKGEDIWYNVYLKNGMIYRRTSRIPLDWEGKVKEFIVTTDLEKDGTPKKDKDGNIKRSFRAPKEDDWTLLKKKTEYDIDNSHKTVGCYIYDALLQNPNQKIIGKLVRTVERKYYKDEIKEILDIQKDLIPELKDENLYKACIEELYSNNDAHRNNMAKPDFANLFINDILFYQRPLKSKKSLISDCPYESHFDKEGNEHPIKCIAKSNPLFQEFRLWQFVQNLRIYQREKEIDNKLFTDVDVTNEKLKTEDDYIKLFEWLNDRTSIKQDTLLNSYFKIKKEKGKDLYPYRWNYVEEKEYPCNETRAEILKGLDKCSIPHDFLTKEREMMLWHILYSVEDKTEIGKALKKFAKKNNVTESFAEVFVKIKPFKKEYGAYSEKAIKKLLPLMRMGKYWSANTIDTKTKDRIDKIITGEYDETIKNRVRDKSINLTDETYFKRLPVWLACYIVYDRHSEAKEITKWRSPEDIDTYLKSFKQHSLRNPIVEQVVTETLRTVRDIWKQEGQIDEIHVELGREMKNPADKRKRMTEQIQENENTNLRIKAMLMEFMNDKKIENVRPYSPSQQDILRIYEENALENLSKTDKEFDFINKISKTAQPSKSDIIKYKCWLEQKYRSPYTGETISLTKLFTSAYEIEHVIPQSRYFDDSFSNKVICEAEVNKLKNNQLGYEFIKNHKGQKVQISQGKTVEIFSVEAYEKFVKEQYSNNHTKMKKLLMEDIPDGFIERQLNDSRYINKLVKGLLSNIVREKSQNGEYEQEAVSKNVISCNGSTTDRLKKDWGMNNVWNNIILPRFKRLNELTKKISDIELVNEYHRLFESELSNIAYSKGTTITGSHTDFYKSLDDKEQKKVIDNIMKQLPIAESFLSVNNEGHVIPNMPFELQKGFNKKRIDHRHHAMDAIVIACATRDHINLLNNEAAHSKHNSNRYQLQRKLRRYETVLIDGKKREVAKEFLKPWNSFTIDAKQALDNIIVSFKQNLRVINKTTNCYQHYDSDGKKVFVKQEKGDSWAIRKSMHKDTVFGEVNLRKIKQVKIDEAIKIPMRIVNKDFKKKILEMLKENRDAKYIGKYVKENKEVWSDIDINKINVYYFTQEEKDSNDKVKERFFATRKPLDTSFDKKKIKESVTDTGIQKILLAHLSKYNRLCFIAGQEEFEILVNDRIKNDNTKYTINDIDIQSILNDTNNKFYYKGNVLDSNDFVKEIFGNKNKKSFYEYKSKILQSEELRIEVKEYPEMAFSPDGIDEMNRNIVTLNKGKFHQPILKVRVYEKAEKFAVGQRGNKLSKFVEAAKGTNLFFAVFATNVEDKETGETKVVRSYLTIPLNVMIDCQKKYGAKWQSNMESYLKDNELVSNDATLLFILSPNDLVYLPTKEELKDGIKVVDKKRIYKMVSSSGYQCFFINEKVAKPIVDKIEFSSLNKTERAITDEMIKEICIPIKVDRLGNIIELNGKKI

SEQ ID NO: 7406 - protein, 1065 aa, unidentified
  REGION 1..1065: note = Description of Unknown: Cas Enzyme sequence
MRVLGLDVGIASIGWALIEIGDIGDEEGAQGEILAAGVWKFDPPEEKTQNGSRLKSEIRRNFRGQRRVLRRRRQRMNEVRRVFARHELLPRDDRDALKQTGLDPWKLRTEALERLLRPVEFAVALGHIARHRGFKSNAKEVKSAQAANSNSAMSKAFAATKDKLARFRTPAHMLCADESFLVSGTSVRRLRNREGDHSRTQLREDLVSEAAALFRAQARLQADHATTAFEEEFTKAAFFQRPFQDSEHMVGRCPFELDQKRSPKRGYSYERFRCLCRLRNLTLVEGRETRALSAREMNVAMLDFGADAKFTYAVLREKLALPASVSFAGVAIGDEKKLDFVVRSGAAAAGTHKLRSLIGDALGETTWRDLLASPERLDRIAEVISFRNRYDLIRQDLLASGFDEALTRTLVTAAKDGGLDLFAGAGHVSAKAAREIIPALTQGLTYDKACAQAGYDHTASRARHAFDVGVFGKEALARILSEKRVSRELVDSPTARKALIEALKQVKAIVETYGVPDCIHIELARDVGKSIDERREIARRGEARGRRRDELIERFTREMGRAPRGGGHEELTRFELWLEQDGRCIYSNARIEASQLVAGDNSVQIDHILPWSRFGDDSYSNKTLCLTRANQDKKGRTPFEWFGAEREPKEWEAFIARVDSLPIDGFKKRNYKLRDAEEAADKFRARNLNDTRWTSRLLAEALKQLYPGVEKNVEGEGRRRVFARPGALTDRLRKAFGLQWIKKNEKGERIRDDRHHALDAIIVAATTESLLNRATRQIQKKEREGRPFALTEIFPPWTGFREACVGALEMVFVACAERRRARGKAHDATFRQVATRDGERRAYERKTVADIKLADLERIKDPDRNIATVRALRAWIEAGKPAGEPPRSPKGDPIRKIRLAAKSKVNILLNTGNPNRPAAVDRGEMARVDVFRKPNAKGVFQYFLVPIYPHEIAMLAAPPMRAVQGGTEEENWPRIDSSYEFMWSMTSMTLLEVSRSDGELIRCYFRSLDRNTGALTVSTVSSALPVKMRIGTRTLFGLRKLHVDRLGRVHKIEREQRTWRGKVCD

SEQ ID NO: 7407 - protein, 1065 aa, unidentified
  REGION 1..1065: note = Description of Unknown: Cas Enzyme sequence
MRVLGLDVGIASIGWALIEIDDIGDEEGAQGKILAAGVWKFDPPEEKTQNGSRLKSEIRRNFRGQRRVLRRRRQRMNEIRRVFARHELLPRDDRDALKQPGLDPWKLRTEAFERALRPVEFAVALGHIARHRGFKSNAKDAKSAQAANSNSAMSKAFAATKDKLARFRTPAHMLCADESFLVSGTSVRRLRNRDGDHSRTQLREDLLSEAAALFRAQARLQADHATTAFEEEFTKAAFFQRPWQDSEHMVGRCPFELDQKRSPKRGYSYERFRCLCRLRNLALVEGRDTRALSGREMNVAMLDFGADAKFTYAALREKLELPASVSFAGVAIGEEKRLDFVVRSGAAAAGTHKLRSLIGAALGETTWRDLLASPERLDRIAEVVSFRNRYDLIRQDLLASGFDEALTRTLVTAAKDGGLDLFAGAGHVSAKAARNIIPALMQGLTYDKACARAGYDHTASRARHAFDVGVFGKEALARILSEKRVSRELVESPTARRALIEALKQVKAIVETYGVPDYIHIELARDVGKSIDERREIARRGEARGRRRVELIERFTREMGRAPRGDGYEELTRFELWLEQDGHCIYSNARIEASQLVAGDNSVQIDHILPWSRFGDDSYSNKTLCLTRANQDKKGRTPFEWFHVERGPKEWEAFIARVDSLRTDGFKKRNYKLRDAEEAADKFRARNLNDTRWTSRLLAEALKQLYPGAEKNAEDGRMRRVFARPGALTDRLRKAFGLQWIKKNEKGERIRDDRHHALDAIIVAATTESMLNRATRQIQKKEREGRPFELTEIFPPWTGFREACLDALDTVFVACAERRRARGKAHDATFRQVATRDGERKAYERKMVADLKIADLERIKDPDRNIATIRALRAWIEAGKPAGEPPRSPKGDPIRKIRLASKSKVNILLNTGNPNRPAAVDRGDMARVDVFRKPSAKGVFQYFLVPIYPHEIAMLATPPMRAVQGGTDEENWPRIDSSYEFMWSMTSMTLLEVSRSDGEIIRCYFRSLDRNTGALTVSTVSSALPVKMRIGTRTLFGLKKLHVDRLGRVHKVEREQRTWRGKVCD

SEQ ID NO: 7408 - protein, 1065 aa, unidentified
  REGION 1..1065: note = Description of Unknown: Cas Enzyme sequence
MRVLGLDVGIASIGWALIEIDDIGDEEGAQGKILAAGVWKFDPPEEKTQNGSRLKSEIRRNFRSQRRVLRRRRQRMNEVRRVFARHELLPSDDRDALKQPGLDPWKLRTEALERVLRPVEFAVALGHIARHRGFKSNAKDVKCPQAANSNSAMSKAFAATKDRLACFRTPAHMLCADESFLVSGTSVRRLRNRDGDHSRTQLREDLLSEAAALFRAQARLQAEHATTAFEEEFTKAAFFQRPLQDSEHMVGRCPFELDQKRSPKRGYSYERFRCLCRLRNLTLVEGRETRALSAREINVAMSDFGADAKFTYAVLREKLALPASVSFAGVAIGEEKRLDFVVRSGAAAAGTHALRSLIGAALGEATWRDLLASPERLDRIAEVVSFRNRYDLIRQDLLASGFDEALTRTLLTAAKDGGLDLFAGAGHVSAKAARNIIPALMQGLTYDKACAWAGYDHTASRARHAFDVGVFGKEALARILSEKRVSRELIDSPTARKALIEALKQVKAIVEAYGVPDYIHIELARDVGKSIDERREIARRGEARGRRRDELIERFTREMGRAPRGGGHEELTRFELWLEQDGRCIYSDARIEASQLVAGDNSVQIDHILPWSRFGDDSYSNKTLCLTRANQDKKGRTPFEWFSAERGPKEWEAFIARVDSLPIEGFKKRNYKLRDAEEAADKFRARNLNDTRWTSRLLAEALKQLYPGVEKYAEEEKMRRVFARPGALTDRLRKAFGLQWLKKNEKGERIRDDRHHALDAIIVAATTESMLNRATRQIQTKEREGLPFELTEIFPPWTGFREACLDALETVFVACAERRRARGKAHDATFRQVATRDGERKAYERKMVADIKIADLERIKDPDRNIATVRALRAWIEAGKPAGEPPRSPKGDPIRKIRLAAKSKVNILLNTGNPNRPAAVDRGDMARVDVFRKPNAKGVFQYFLVPIYPHEIAMLAAPPMRAVQGGTDEENWPRIDSSYEFMWSMTSMTLLEVSRSDGEIIRCYFRSLDRNTGALTVSAVSSALPVKMRIGTRTLFGLRKLHVDRLGRVHKVEREQRTWRGRVCD

SEQ ID NO: 7409 - protein, 1258 aa, unidentified
  REGION 1..1258: note = Description of Unknown: Cas Enzyme sequence
MAVYLGLDIGSNSVGSAWVDTDKQEVHLAASVFPAGVDEQENKRGAPKNQARRQTRSQRRTIHRRAQRKRQLVRFLMELELLPRDPSELRDLFDLDPWQLRRKALKEALTPHEIGRVLVHLAQRRGPVGVVTDPENPDEGRVKDAMDRLNALMTERSAETVGQLLADLIDERRRPVERLPDHACSRRTRQRRRKRQGRKPNDPQLLPVRNRQYRLPETDMLFAGRDLIRVEFHRIVEAQRAFNGSDLARMLTDDLVKALDDPTQADAWRHRGLLFGHRRTYWDTGTLGRCDLEPTERCVPTGDRHASYFRVVETVNNIRIERQGEPVRPLTADERDNLIRLLRGPLGQRKQKGKLVPKTSAGVTDIKKALGINPRDKSVRLNIEADEQREINTDWFHREIVHGAFGEARWNQLSEQQRESVNRAILKFDPDHEDDARKLRDGAQRWWGLDAAAADRLLDTWKGRPKLEKRLNLSRRAILNLLPYMERFDAGNNRWPTQQEARKAHAKVLQERFEQTGECAYELAARRYATGALGLTAADRYYMRQEKHQLKDENGQVIRDENGNPLPELPPAPMLSNPVVRKAIHEVRRHLLAWLRRFRRKPDRVVIEFARGVQDTAKRRNEQLAANRERERERKQIEENLRAWGIPGSNWDRAVLRVRLCREQGGVCPFSLSGSNATRTITERMAAEGREVEVEHIIPEALTARTMAFNNLVLCYREANRGKGMRTPLDWLGPEGVRAMLQRLEKAPIKENRVKWERLQMPTPDEEGFRNSQLTDTAYAARQVASYIADALYDGQGLPERGGERKIFTTKGEYTGRLRADWGLHESTIDRAHGLEAPPTPEALAADPDLEQASRRARKEPKDRSDHRQHAIDALVTALLGPELLTVVGRQAREDREYYERTRYRPRRKALDPPRAWPTPEAFRDAVVSAFEKLTVSHRPVKRRLVGAFHEETHYGPVIDPLPPHRTENVWTLFTNRISADRLTPNHLRVPQGWDELSARLDDPSLPPQEKRAIRKQLGALEDPSPGKPGIVRDRDLRDRIRKCLRHNALDPDRFTAAEIKKLVADGRLTMPSGVPIKGVVLLRTNTDPVIIPRKRWDAASDRMVIDDDPRTRRVYIGGNNHHVEIRENCKTGIWSAEIVPTFEAARRVRVEGRAAVNRSDDDDARFVMSLAEGEMIHARRNDRPDERPDYFVVCKLDKLGSSSRIHFAPHWDARKASEQDRWDVTPADLKECGPEPGKPPVKVRVGPLGDIKVLERD

SEQ ID NO: 7410 - protein, 1042 aa, unidentified
  REGION 1..1042: note = Description of Unknown: Cas Enzyme sequence
MAEEICGDFILGLDIGASSVGWAILGTDKGKPARLIRCGARVFEAGIEERDFAEGKDNSRNATRRQARQARKLINRRVRRQRKLLNLLVKAGLLPPGDPAQVIPDLDSSLRAKHLASLPKHSAERRRLEHVLPYHLRAIALSQKLDPFEIGRAIYHLAQRRGFLSNRKAPPKKDGKPDEVKAQITQLEAKMKEAGAETLGQYFAGLDPEQERIRRRWTSRAMYQVEFKKIWDEQARHHPAILTEELGKRVYRAIFHQRPLKNQSHLIGTCEFERGRKRAPWGLLLAQRFRLLQQVGNTLIVAPNGARRAFTADERDRLLSVLQRDGDQTFSQARKLLNLPKGHKFNCEEGGEDRFLGNRTNAELAAVFGERWWKMSENEREQVVEDVISIHKDDALERRGARRWGLDAEAAAKFGQTALEDGHCALSRQALAKLVPLLEDGVPYSAAVKEIYGDRHTDPVDFLPPPASTYPHLRNPMVLRVLAELRKVVNAVIREHGKPTTIRVELARDMRRSKKQRTDAWQKMRQNERDRKKAADKIAKEAGSQNPSRADVEKVLLAEECGWICPYTGRSISMNDLLGPTPQFDIEHIIPFSRSLDDSFLNKTLCEVKENRDHKRNRTPYEAYGASPEKWRDILARVGEFKGGAAEEKLRRFQQQTMEGAQDFAARQLNDTRYATRQATDFLALLYGGLYEKDGRRFIQASKGGMTKYLRDEWQLNTILGDGGAKSRDDHRHHAVDAIVTALTDAATVKMLSDAAERAASEGRRRFGRVEEPWPGFLDDVRQAVEGMTVSHRISRKVNGPMHDETNYGPSKRRDAHGKPENFRVRKRLDALSPAEVKLIADDRVRQLVEKKLAELGGDAKKAFAAPENHPCIETKCGRRIPIHAVRIRKSKAMIQVGQGQRLRHVASGSNHHMEIFEVKDNKGRAHWQGRVVSTYEAMRRLATRRPVVDRTPPEGGRFLFTLAAGEVIQVSQPEGPPLLYVVRSIWDTPSGCRLRRDRINDARRQQDIERTGREPMLSVLQREKCRKVIVTPLGEVRYAND

SEQ ID NO: 7411 - protein, 1046 aa, unidentified
  REGION 1..1046: note = Description of Unknown: Cas Enzyme sequence
MSEKNSGQYILGLDIGASSIGWAILGAPKGKPANLIRLGARVFDAGMEEGDFAAGKENSRNAARRQARQARRLLSRRVRRQRKVFNLLVKAGLLPAGDPAEVLPALDAALRAKFIRPMPKHSPERRQAEQVLPYRLRAMALTEKLEPFELGRAIYHLGQRRGFLSNRKAPPKKDEKLGEVKEHIHKLEKQMKDAGAETLGQYLAGLDSETERIRRRWTSRAMYLAEFAKIWAAQTIHHPGILNQELGKRLHRAIFHQRPLKSQAGLIGTCEFERGRKRAPWGLTLAQRFRLLQQVVNARIVAPHGADRYLTADERDALLRVLEREGDLSFSKARKLLNLPRGHGFNWESGGEDRFLGNRTNAKLAGIFGDRWWAFTDAERDQIVEDVLSIHKDDALTRRGQRRWGLDAEAAAKFGQTALEDGYCGLSRQALAKLVPMLQDGVPYSMAVKEIYGERRTEPADCLPPPAPTYPHIRNPMVLRVLAELRKVVNAIVKEHGKPAAIRVELARDMRRSKKQRTESWKKMRQNERDRKKAAEKIAQETRVQEPGRADVEKVLLAEECNWQCPYTGKSISMSSLLGPSPEFDVEHIIPFSRCLEDSFVNKTLCEVKENRDHKRNRTPYEAYGASPDRWHDVLERVKRFKGSAAEGKLRRFQQETIEGIDEFTDRQLTDTRYATRQATQYLALLYGGIYEKEGRRFIQAGKGGTTAYLRNEWQLNTILGDGGAKSRDDHRHHAVDAVAIALTDAGTVKMLSDAAARAAREGRRRFGRIEDPWPGFLDDVRQAVEGMVVSHRISRKVNGPLHEETNYGPSRERDAQGKPVFFSVRKPLDGLTASDLENIADERVREIVKAKVDALGGDPKKAFALAENHPWIETKRGRRIPIHAVRIRKSEAMIGVGQGPRQRYVASGSNHHVEIFEVKDKNGRTRWKGRVVSRYEAMGRQATRRPVVDRTPPEGGRFIFSLTSGEIVQLAGDQGRQEQYRVRTVSLSKSGSIEIAAARLTDARLKDNIIKSGDWLRIRSMETLAQMCCRKVIVTPLGEIRYAND

SEQ ID NO: 7412 - protein, 1097 aa, unidentified
  REGION 1..1097: note = Description of Unknown: Cas Enzyme sequence
MTPPRPQEYVLGIDLGSNSLGWAVIGLEGGQPAKLLRAGVRVFEAATEGDRESGQEESRNKARREARSHRVLLRHRTQRLKKVFNLLEQFGLLPPWDTPSSGTSPGSEYDLETAFRKVLASLNEQRPPSTLEERRQNFLSALDQAILASPWFTAKKASELYPEPAQTLPYILRATALDERLEPYFLGRALYHLAQRRGFLSNRKGAPKKDEKLGEVKKGINELRQKMAEAGARTLGEYFSRLAPSEQRIRGCWTARSMYEEEFNKLWEAQAKVHPELLTGECKKELHQGIFFQRPLKFDPQVIGHCELEPEERRAPAYLLISQRFRLLQTLNNLKILPPGEPERDLTPADRAKLVEALELQGDRTFAQIRQLLGLTKSYGFNLERGGEKIIKGNRTNADFYAVFGERWLQMSREEREQAVQYVYGFEKPDKLKEAAKRKWGLDDATAEKLADISFEPEYMNLSRRAMEKLLPLLEDGLKFMEARKQVYPESFERAEERELLPPAAEALPDIRNPAVMRCLAELRKVVNAVIRQHGKPAEIHIELARELRNPKKQRQAQAERMRANERARKAAVDRIRKEPGISQPSPDDIRKVQLADECGWKCPYTGRQISMRKLVGPESEFQIEHIIPFSRSLDNTFVNLSLCYVEENKTKGNRTPYEAYSGNPERYEEIKERVRQFKGDRGIVAEKVRRFQMTPEEVETMLGDFSERQLRDTAYASKLAKRYLSLLYGGLSDDAKTQRVYASPGQVTAFLRNEWGLNAILKDGSTEKGGSFPKERTDHRHHAVDAVAIALTSAATVKQLSDAAQRAPLERRRRFATLQSPWPDFVDSVRQEINRIVVSHRVSKKVSGALHKDTIYSPKQDAQGFRHRRVMLTELSAKDVMNEDEPVIVDPVVRALAREKLVSLGGGDPARVFSDAKNLPCMPNRKGTVIPIRRVRIRERVKTIPLGGGRSARYAKPESNHHIEIYAEVDANGNDKKWGADLVAMHEAYARLKAGQPIVQRDHGPLVHFRFSLGPGDVLQCDDGKGGRRLLVVRSLSEEEKTGSIKVEMVRINDARQKKEIKAAHDWITKSPNELRKWHARKVAVNPLGEVREAHD

SEQ ID NO: 7413 - protein, 1205 aa, unidentified
  REGION 1..1205: note = Description of Unknown: Cas Enzyme sequence
MTILVSGKNKTVGGFCRLRSVARRRCLARRAARKRRLRELLTAAGLLTTDAGKLKELMDTNPWELRRKALTEALTPYEFGRVLIHLNQRRGAWGVQTDPDDPEEGKVKEAIDHLTAAMKESKAETFGQFIADRMDGRRHPVPDKCHLQPAPDRCPPKCASQDKDCSFYCDAVRNRRDAFEFHATRDLIQKEFEKLWNTQKKFGGELGALLTDKLKEELNNPTPDDTWRERGVLFGQRKTYWNLGTLGRCDLEPSDRCCPIADMHAQEFRVLETVNNIRLTEYGREPRALTDVERASVKKALQSQKAGSIPAVRKALGIDKASLKRKNLPDKFRLNLEADKEREINTDWFYREIVRGVFGEDAWLKMDDAKQESVNRAVLKFDPESPADTARLQSGATQWWNLSSEEAKKFIEAWKTRPKLEKRLNLSRRAILNLLPYMRQWGCGVTEARQLFAEDGENGASKEQRERYALGGLGLTKADRHFLRKHPNWLPPAPMLANPVVRKAIHEVRRHVMAYLRKFGRKPDRIIIELAREAKQTEKVRNKILAANRLREKERKQIILDFNLAGLPSHQQRAAVDRVILCRQQGSPAVCPYSDLEPGNAGKVITEDQAAKGTDVEIDHIVPLSRSQDNSLNNKVLCYRGKNRPKGNRTPKEWLSAEQFSVLEQRMGHWQEELRRKWENLHRDPLPEKDFLNAQLTATAYAAAQVGAYLRDSLYGGEREGHRQVYFTKGSYTAMLRKDWQLFETLKNADEEAAENATPDPQKRADPGEKNRDDHRHHAIDAAVIALTGPEIIKDVAALAARREEYHERTGHWPRREPLPPPWGDVADFRRQMLSQLFDVFDKANLDGTRAEGAETGTPLVVSHRAVKRKVTGYLHKEDMWGAVDEEEGVFRIRCPIAQLNSKMLRMPEPETDDQVRKRLIRESQRAGMNPSAARKAAANRMQLKDFKRLRVDPPLGKGGLVRDWDLRRVIRECLKNNGIDPDNFTDKQMQEFAKTGRLRMPNGGVPIRAVITIGPISDPVKIAVRDPNTRRQAVNPRTGKPLFRYHISRNNHHVEIMQDEVTGDWSARDGKCVTMFEAAQRIRPPKNPDGTRPEPRLAVNREDAAGQAFVMSLSEGEMVFARRWVPAAKQAVGASDYFVVVKLDGSRIFFAPHWDARSERNQDRWDVSYSDLKHCGPVKDASPYKGCVKSPSAGFRFSFWGVMI

SEQ ID NO: 7414 - protein, 1054 aa, unidentified
  REGION 1..1054: note = Description of Unknown: Cas Enzyme sequence
MRYVLGLDLGPSSIGWAAVTLDEKGNPCGIATLCNSDPKNRSAPPTIPAIGSRIFPAGIENINQGVREQPLNKDRREKRATRRRLRRARGRRRKLIALLRARGMLPASDEKLSELMKKDPYELRAKGLASQVGLEELGRIFMHFAKHRGFQSNRKHQDKAPDSGKVKQAILALKEQVGEQTLGQFYWSKLSQNPLEPVRNRRDDYRWIPQRDQLRDEMGRIWQKQQGFYQGVLTYQFYKELESLLFDQIPFELSNRAKRRIIGTCSLIKGQPRCSYENRKAQRFRMLQKVNDLLVTYGTRREDKLTPEERQKLVAELSCTKERTFDQIRKLLSLPEDAKFNLEYETNTKMLGNQIDAMMAGKLFGKNWHGLAEEKKEAAWRKCLDFLNDERMTVEQCAADIEKITGLKVKESAAIEKLEAPKGNLDFCEKAVDRILPYMEQGMQLYDAIEAAKFSKHFTAKDSLPLPTRDNGINITNPIVRSVLFELRKVVNALIRELGKPEKIVVELAREIKGNAETRQEIIDRQDENRAERQRAAEAIREHMNWDESVSVSVDDITKYRLWEEQNHLCPYSLRKISLSELLSRNTEIDHILPYSMSLDNSMANKVVCFANENQNKGQNTPVDGLAEPQWQRLEEAYRAGAFRFDKAKWERFCTHNAEIAEKYTPERLLRDTSYMARAVRDYLAMLYGSDKAPTAIGTTKGGITAELRNLWGLNAILRDGEVGPKNREDLRHHALDAAVVAVTSCGMIKNITAKLQSGWPNRPSRIRDIPEPWPGFGTDLAAALRQIVVSHRVQRRVRGALHKETNYHRETNGPHAGKFVTRKRLTALTPPMVDDICDESIRKLVKERLEAFGGNARKAFVEPLYLPNSNPAVNGGRPIPVKTVRIAVASNTMVQLDGARWVEPGSNHHVEIFRVKDKGKFENRLIRRIYTTWEVAQRVKEAANSEVTQKRLLVSRENPFPDQFKEVEFVISLSIGETVAMTDEKGSPLMARVVKMSPASDRPFAIDILFRECTAPNDKAGMDLRVTSMRNFEKLVKRKVTVDPLGRVRRAND

SEQ ID NO: 7415 - protein, 1025 aa, unidentified
  REGION 1..1025: note = Description of Unknown: Cas Enzyme sequence
MAKILGIDLGPNSIGWALIDDNKESIVGTGVRIFQEGINRSGGKEESKNATRRAARQARRMNARRKARMRRLVYILQDNDLIPTEQDNLDQFFRIDPYGVRAKGVNKKLSLHELGRALYHINQRRGFKSNRKTDKASDTGVLFTGKDGKSGIDETSQAIKKGGFKTLGEYLNSLNPHEKRQRNRYTLRAMYIHEFNTLIDKQSSYYSDLFTDELKSDLFDAIFYQRKLKSQKHTVAHCTFEPKKKVTPKSSPIFQEFRIWQQIANIKVSYDERENTPLTDDEREKVADALMFKESMTFDQLRKLLSFPKDAHINLQSLEKLKGNTTFTKLGRVFGKKEFAAFSNDDQWHIWHTLHFYDDPIENENWLADHFKVKWDLNDEQIEKLHKVSLEAAYGSLSHKAISKILPHLKISSTDDGLPMTFDKAVQAAGYDHHSQVQTYDGTLSRLPLPDDLRNPIVQQSLFEVRHVVNTIIDEHGKPDIVRVELARDTKNPKWKRNGLLKLNKKRERERDEVKAILVESGIHQPSGEDLIKYRLWQECNETCPFTGKKISFTALFSESSNEFQIEHIIPYSRSLDDSQANKTLCYWKTNQEKHNKTPYEAFGSNEKLWEEILDRVSKFKPSDSVARVSTEAGKVVSKWGNKLRKFKIKNIDDKLSEEFISRQLNDTAYISKEVSKFLSYISPKVYVTAGRATSTLRYHWGLNEILSGNIDHKQREDHRHHAVDALVVANTSHSFVQTMSRFHKYDREPKGDRFPLPWKNFWTDTKEAVNEILVSHRIKDRARGKLHEETNYGRITLPEGEQSYVVRKPLESLTPKQITQIVDPVTRMLILSHLKGLGVNTDEKFTIPKEAWEADLHLPNNPHPIRKVRVAVPTKRMLRLYDDKKQFVEYGKNHHMEIFENGDGNREFRIVSMYDAVQRKKSGQSIVNTTPDNEGSSFLISLGINELVLLDVEEKHIDWNNPPSSKDLGTTLYRVQKMDVNGIIDFAHHTVSVADYNVGKHRKTYNTFSGIKVLCNNLGDIRPV

SEQ ID NO: 7416 - protein, 1352 aa, unidentified
  REGION 1..1352: note = Description of Unknown: Cas Enzyme sequence
GAIFKGKENMSGIDATRSLMDGQTLGSALYDISYKPGEKFRLKKDDEGNELRVRARYTQRDMYISEFQQIWENQALTLGLDQQAIKVRKVRFLKGSMESSRNQTKLTKYFDNYGKENVVIEGKKVTTYKRVLLKEFFAGQIEELDGELKFKSNESLLFWQRPLRSQKGLLDNCRFENNLPVIMANGEFRMKDKKIVTRSKKPCPLSHPEFELFRAYQFINNIKYGKGQKLTADQRQVVLELINSKDSNFNFELIPKALNLTYEKFNFEGDLKVLGNTTIKKLKPLFPEEVWNKDYEKIWHCFHFYEDNDKLFAKLAKDFHLKTDDPKKISSIRLKEGYANVSLKAIRNINPFLEKGYPYSDAVVLGGVKNAFGEPWKNFEVDDFIERLEKDIIRILHEDNQEGEAIQKIKDYLAEPINSYGFTKDDPRFTQLYHHSQEVVEKQKQELVPEVENLRNPIVQQALHEMRRLVNALLLQYRKTDPGFSFNRIHVEMGRNLKNNKTKRQELTRRIRENEHKNDEARMRLAELGLRPTRDNLLRYLLFDEIQKHVSGPVLCPYTGRVININDLLGGGNVVQIEHMIPYSVSLDDSFGNKTLCEANFNRMKGEKTPHKFYQENPDPKLWGVSSWEAVSERAFKLLPYPKAKRFVTKRDFKKSDFIERQLNDSRYISRKAVELLSAICEDVRMLPGQVTAELRHLWGINNILNPVHDIDNFKSDVREKERIPYYVVTDENSRVLSIHRKTNDRPEAERGQLVLTGDVNKGVFSSKYLTMKVDAPNLKDGSYWAIVNVLEPHSFQSVYTEKPAADENHIVFKGRIEKQIFSNDTIGKRIKTNEQIDGAYWAVFSITGKEFKLAEGKGKLKVSGSKIALFGEITNGQFACHIYQSETNLPDGKYWALLELDFEQTDYVRSVNPKPSTSESQLLSYATVDEEGLMAADPDPGYQVKTNQVSGRYYCIFDIESIDSELHRMENEPPELGKGQRLTEAVVWVDEATGEIKYDPKKNRDDHRHHAIDAITVALTEQGFLQRLSTHHAQEENKKRGISSSEKFPEPWPDFANDVKKAANEILISHKQNNKVLSKISKRVIKNGEKHQSVGFAARGQLHKETVFGKRHAPNQTEGYHIRKAITGLKDKKQINKVVDERIRQLILNHLRDNCGVDILKSNFTVPKDAFFDGGQPRLFLPNRNGGEPVPIKKVRMRENIGNAIQLKSILNQHVNPRNNHHVLIYEDFGGNMKEQVVSFIEVVERQKQNGAIYQLPEDGKRIVATLEINDMFLLGLSDEDFEISKMNAEVLNKHLYRVQKVSSSYYTFRHHLASTLDNKDEEVYIQSFIAWNKWNPIKVKIDILGNIERV

SEQ ID NO: 7417 - protein, 1327 aa, unidentified
  REGION 1..1327: note = Description of Unknown: Cas Enzyme sequence
MKKILGLDLGSSSVGWAFILEDEMESKILGAGVRLVSLSSDESNDFQKGKAISINKDRTLRRGARRSLQRFKQRRDAILRKFKSIGFITNEFNQAEDSTLFTHYSFAIRSKAATEAVTKEEFVKVLLMLNKKRGYKSSRKDAPLVEGSQENDMIFDGMDVARKLYQQNLTPGQYALSIMEKGGEVPAFYASDLTNELRRIVTFQLVGNENLPADLLDLVLNKSRNATYYFFDKVLNIPIAENKGSKEDIKKQRFIWRAEAVSQKVDASVLAFIIGDLNDQISKSSNYLGKISDNSKELLMNNLTVGQFQFQALVENPHASLRNVVFKRTDYLNEFEQIWEVQKKFHPELTEELKKEIRDVTIFYQRKLKSQKHLISFCEFEPRNRVAPKSSPVFQLFRMWQNVNNLVSKNSLVIDEDVKEGIIEILSYNGTLSEKELSKLLGLDPSIVKLNFEKINGDQTRTNFLKVLIQLWEKQGNSKKNLGTPLTRMDVALILKDLGLPGDLLDLNLNLKDNAFDKQPYYQLWHLLYSLDDDALVKSALINKFGFSESQAQAMLYVKLESNYASLSVKAMRKILPHLMDGLKDEEARAYFYKSQSSTTETKDLKETNDLVKKNSLRNPVVEKVLNQTINVVNAIIASDLYGRPDEIRIELARELRASNEERSAMTKNLMDGTKKNENIRKQLQENFRIQRVTKNDIIRYKLWEETGGISIYTGNTIQASDIFGGKYDIDHIIPQSRLFDDSFSNKTLCERALNIEKGNQTAYSFLKQKYSPAEFEQYLSRVKDLEKSEKIKKTKAFKLNLTNEKIPDDFITRQLNETQYISRKAKEILTDICSKVYTTTGSVTDRLREDWGLVDMMKELNFEKYKALGLTYEDKGKNGERLLKIKDWSKRNDHRHHAMDAITIALTKQAYILYLNNLNANIGGVVQGNIENKYTERIGGKIVFKSPMVNIRDEFKRALDTILISHKAKNKVVTKNKNKIKTKSGLVIQNTLTPRGQLHKETIYGSQNTYETKWVAINAKMDVDLISKVANKQQREALTARLFAFDNDPKKAFSGKNSPSNNPIYLDEHKRYTLNDKVKLVDLVPQFTIRKNVGPDLDFKKIEKVVDVGIKNKLMERLHAFGGDPKKAFSNLDENPIFLDKAQKISIKTVKMQGVNNALALHSYVDNDGILKPKDWVSSGNNHHVAIYEDENGDYQDEVVSFFTAVTLATSIPPLPIIQKHHEKGWKFLFTMKKNELFVFPSEEFNPTEVDLTNPVNYSQISKHLYRVQILTFKDYFFRHHLETNVDNTKELRDITWKRIQSNNSLKGIIKIRVNHLGQIVKTGEY

SEQ ID NO: 7418 - protein, 1092 aa, unidentified
  REGION 1..1092: note = Description of Unknown: Cas Enzyme sequence
MASLKTLTFSFDIGHSSIGWAVLSSEKSVRGQPVPEPTIEGCGSVIFPKDDCLASSRRSFRRTRRNIRSTRQRIERLKRLLAHLGGLTQSELDAPGHSAPHFLAAKALNSAHPTLDWQQLWHILRWYAHNRGYDGNSRWSRQEADDEGDTEKEKAALEVMGKHGTETMAETICAVLGLKINEKKISSSIPYKTLDAAFPRQVVRNEVLAILEKHKGHLTKLDDAFIDTLIARNEARGQRAWNTIPVPEINLPRRYFGGLLFGQLIPRFDNRIIAKCPISGDKVPNKANLTFLHYRWAMLLANIRVDGKPLTAEQRQAVHQEMEERGRLTPTELHKIIKALTGFDKNQTNIAASFEIHPDSKDALELDPALGFFRKAADKPTAKSTGINLFWKHLPEIAQKRALGHWKKNRPVDLQWMLDQCHQEQYDSTPLSDEIEKQFAKDQTKKKPAYLSRDHFLRRRFAPKALSGRAPYSRKVMEEVLHFVLNTERHPSEKGGPIYRSPEILKAERNRPIDDLTNNHLIRHRLTILLRLVEDMIENYADNDANRITDIVIEVARDLQEYSGLTAKEMAGELTKRLSHFKSAVDYLAKHAPDLEVTGSLIRKCRIAMDLDWRCPFTGKKYDPYELSKLEREHIIPYAVRPTNSLDSLVLTFDWVNRLKGKRTAFQFINDVVDDERFLSPKNYKAFVDKLKVARKETYPDDFNRQSRRKKLMMVEHYEAKDHGFTQGALTKTSHLNRLSARQLEKRFTNPETGEINVRITSIPGQVTAETRKGWRLLHTLNTACPDCEGKNKTEIRDLTHLHHALDASVLALTQHYLPGTLPGQSENEKGAIWAALLRRNKSLDQINLLLRTGLFAKHYKKDRHGTYELEKNGQKKIDVHLEDLPVAVKNNLAARLAEQRVVQHIPADQSGASLELNPWRVWKIEGDPNDPHTSITLRQKSSTVRKDGRREIKRKFKKEKAGKLIGLKPGKLSRNKAVLIISENYGLALDPIPQIIPFHKVSQRLIRLWQENDQKDTRILRNGMLIRVTNWPGKEGVWKVYSCKANLKLNLGLPQGTFAEWENVLVTSLLKKNAIEILSPPLTGITPPDLP

SEQ ID NO: 7419 - protein, 1009 aa, unidentified
  REGION 1..1009: note = Description of Unknown: Cas Enzyme sequence
FPADPAARKALEVLDPYALRARALDEALPLPHLGRAIWHLNQRRGFKSNRKADKPDDESGKIKVGVGRLQTQIAEAGARTFGEWLHIRRRPTPEHPDGLSVRTRLRPEPGEDAKGTGYDFYPGRQLLEDEFETILDEQAGHHAQVLTPEVRARLYEIVFHQRPLKQPQVGTCTFGGGEPRLAKAHPLFQRRRLLEEVNALKIVRVGQVAERLTPEQRDLLLLRLKTSAKVSFASLRKVLKLDPEARFNKESKNRPDLKGDEVAAVMAHKSRFDTRWQHLSPEQQWEVIKKLEAVESDAELAAFREWVAAAYQLAEAQAAAVSAARLPQGYGRFGLSITRDLIEALTDERDADGRVIVYSEAVERLGRHHSDFRTGEVLDELPPYPEVLERHLMPGSGDASETDVFARVGRLTNPTVHIGLNQLRRTVNALIARYGPPREIAIELARELKLTDDEKKKRNRENNENRVAAEKRSAKLLEIGQHDTGANRALLKLWEELNPGNVLDRRCVYTGRQIGIDMLFNGEAEVDHILPFTATLDDSNGNKIVCTREANRHKRKRSPWEAYGGTEEWEEIAARAARLPRNKRWRFEPDAMARQQEEGGFLARQLVDTQYLARLAREYMASLYPDRGEGSSNVWVSPGKMTAMVRRKLGLDRGILDNDNLTGSDRDKNRLDHRHHAIDAVVIAVVDRRLLQEIARTSGVEGEDGLNRIHVPDPWDGFRDQVRDKIRAITVSHRADHGTAGHGRGSTAGRLHNDTAYGLTGLSDAKGNAIVVRRKPFGGLKPADVPNVRDPDLRAALLAHVDGLDGKALEQALASFARLGPLQFRGIRRVRVTEPLSVIPIRDREGRAYKGYKGDSNYRYDVWELPDGKWVTQWRDRDGAERCSIVSMFDAHQAAEQPRPHPAARKVLSLHQDDLLAIERTEGDRQLMRVVKFGQNGQITLAPPNEAGDLKRRDAASNNDDPFKYVAPTAGGLKKARARQVRIDAIGQVRDPGFPARTAVRRTRATAAE

SEQ ID NO: 7420 - protein, 1023 aa, unidentified
  REGION 1..1023: note = Description of Unknown: Cas Enzyme sequence
MKGTAMPSYTLGLDLGTNSVGWAMVAREGEVFENGRCILAGVRVFPEGVPNLNEKKEQAPGQTRREKRSLRRVTYRRRQRRHLLRRILTDKGLLPCDSQAIAALMKANPYELRARGLAEPLKPHEIGRALYHLCQRRGFKSNRKTASDDENKVTKDAGELQAEIEEAGCRTLGQYRAKRIAQKEDGDGVRVRGRYTLRAMYEHEFETLWAAQAQHRPDLLTDALKAQVHEAIFYQRPLRFDPEVIGDCELEEGEKRCPRAHWMAERFRMLQEINNLRVVRSSGETTPLNAEERAKLAEDLGGKTKIKFSAIRKCLGLLDTEEFNLESEGKRDYLYGNRVEAALRHKTLRKWYDALSAKMREAVHTALATEQDPEELRRLAQEEWGCTEPQAEQLLKIKPLKGHLRVSLKAIRKMLPYLQPDHACDDRCRELCPDKHADAGHVVSEAKARAGYELTKPVATFDRLPPVDAVVQNLTNPLVRRALTETRKVVNGLVREYGPPAEIVVELARDMKHSKERRRDIFFDNVRRRKENDAIRDRLVAEFNIPNPSRQDVIKYRLWDECGGLCVYTGKNIPKTKLFSPQVQVEHIYPLDRSLDDSYLNKTLCYGAEVNRIKGGRTPYEAYHDKPEFDEILQRAKRLPWKKRRRFTVKEVEFDDFAQRQLNDTRYASRLATRYLRCLRCEVRPVKGQTTSKLGHYWGLYGVLGTDYSKARDDHRYHAIDALVVALTTRSHLQRLSGVVGNAPKDAPMQPPWEGFWDDVRETVHAINVSHRPHRKLAGGLHEDTGYGPTDTPNSYAYRVPVERLTPAMVGRIRDPVVQQVVRERLVERGIEEKGSKAFGNVLTETPLTMPSGVPIKRVRITTVEKTAVPIRKIGDETVKYVKPGGNHHLEIYQTPDGKWTGRCVSRLKACERLRRGEAVVDAAEQRGKPDVPDGSKFLMSLAINDMVQLTDPETGEINLYRVQMTSHNPDLDKPDMTFRLHWAARIDDNDTRVRLRSWHRASEMAPQKVSVDPIGQVFPCND

SEQ ID NO: 7421 - protein, 1038 aa, unidentified
  REGION 1..1038: note = Description of Unknown: Cas Enzyme sequence
GSGSIGWAAVAEPGGTPCEILAMGVRRFEAGVQGHIEQGKDESRATARRDARGPRRQTWRRQYRLRKVFRLLQRMDLLPPTDDNSHDQRHRAIAQLDRQFRAGAEAGAAGPTHTLPYRLRARALDEKLSRHELGRALYHLAQRRGFLSNLKAAKKDEDVGVVKKGISELESLMEQAGARTLGEFFASLDPQQDRIRGRWTARSMYQHEFDQIWAAQSRYHADLTHERRDRLYHAIFDQRPLKSQKNLIGLCDLEPNKRRAPTACLEYQEYRLLQRVNDLEVTEPDGECRRLTPDERSALIAALAESEKLTFAAIRRLLGMKKSREYGRNYTFNFEEGGDKHLVGNRTGAKLLAVLGERWRQLAPERQRQLVDEVLSFESEAPLVARLERAWGFDADAARAIAETRWEPGYGALSRKAIRKLLPLLAGGVPYATARKQLYGDLRRDDDPVDFLPAKHDCAVLRNLRNPAVARALSELRKIVNALIRRFGKPAAIHVELARDLKHSRDRRKRMADQNKDNEKSRTAARRRILEEIGDERYATHGNVLKVRLAEECNWECPYTGRAISMEALVGDRPQFDVEHIIPFSRSLDNSFVNKTLCYHEENRNVKRGCIPFEAYAHTPRWDAMLARVRRFRADARTRRRKLDLFQTETLAAAEDFVARQLNDTRYMSRLAAEYLGLLFGGQIDAQGRRRIRVSPGRVTAYLRQRWDLNAILGHPDRKGREDHRHHAIDALVVALSGPAEVHLLSRAAEEAEALGQTSLFVPVDPPWDAFLDDARRAVDAINVSSRVSRKLSGKLHQETIFSKPKPSQDKHGRVVQVHHVRKRLESLSKHEVAEIVDDRVRAIVDRKLCEIGGTPDKAFSDRNNHPYLTSKQGRIVPIHKVRIRTGAHPIEIGVGSKRRLVNPGSNHHMEIVAVLDDAGNETRWEGHLVSMFEATQRRRRGDPIIRRHYGDNEKFKFSLGGGEYVTMEHETGKIQLFRVAVISHGRLEFRLHNDARPITLVKKISGGRVRRSPDALRKARTRKVVVDPLGNVLPAND

SEQ ID NO: 7422 - protein, 1046 aa, unidentified
  REGION 1..1046: note = Description of Unknown: Cas Enzyme sequence
MDYVLGLDVGTNSVGWAALRLQDRRPVELIRTGVRVFPAGKEGDVEHGRGTPRSVQRRQARQLRRQIERTARRKRKLLHILQRNGLLPQGGGEAVFEQVGENLRAKWHGHPDAPPAIAHVLPYFLRARALDHPLEPHELGVALYHLAQRRGFASNRRTATDAEDEEEQGKVKEAIAGLAADIEGAGARTLGEFLCSLDPEQQRIRNRYLGREMVQTEFEAIWAAQAPHHPDVLTDVLHREVREAIFYQRPLKSQSHLIGGCSLEPGRRRAPWCRLLAQRFRLLQKLNDLEVIESDGQERGLTGAERRTLYDALDAPSKKMLTKGGKFTLARARRLLGLPRGARFNLEEGGEKNMPYNTTAARLVPVFGERWHDLNPEEQDQVVEDLYSFEKKDALARRGRKQWGLGEKEGKRFGNLELERDYCSHSMKALSKLVPLMQGGLKYYDALEEAYPDRHEVDRALDELPPVLDVLGDLRNPVVMRSLTEVRKVVNAVVRNFGKPAHVRIELARELKQSRRRREDAWRRNREIEGQRQGAARRLAGEMGITEPCFADVQKVGLADECDWTCPYTGQSFGWNDLFGANPAFDVEHIIPYSRSLDNSFANKTICQVRENRQVKRNQTPHEAYHGTDAWPGIIERVRKFRSRMARAKLARFQMEEVPAVGEGQLAERELNDTRYISRKATQYLSVLYGGDVVDGTRRVHSTQGRVTGLLRAAWGLNDVLGEGAATKERGDHRHHAVDAAVVAATDAGMIQSISAAHARLGWCDGDWFPLIEVPWDGFREDIEESVKAVNVSHRVDRSVNAQLHDETIYSPPRDADGRPDAEGEYVHYRKRLAEVSPDKVDRIVDPAVRRAVQEKLAELGIGEPKRAFKDEANHPHLTARDGRQIPIHSARIRVREPSVVDVGGPAPRYVKPNSNHHVEFFEVPDGPWEARLVTTLEAARRLREGEPVVNREHDGQGTFLFSLASTDSVMMDNERERGLYVVSVISQTAAGRLTLEFREHADARPETVRRKTKGARLRRTLGSFCRSRPQKVTVNPFGLVRDAND

SEQ ID NO: 7423 - protein, 1125 aa, unidentified
  REGION 1..1125: note = Description of Unknown: Cas Enzyme sequence
IAIAALAAFSPVGGRQKGLPPAGLPPGGSGLANPLTPKREGLGVKRARIRIGYTEVIMDSRQGLVNNKVYDSSPPSRKGPPMTSYTLGLDLGTNSVGWAMVAREGEVFENGRCIQACVRVFPAGLDMQDSKVGIPRGQERRRARSQRRTVRRREQRIRKLRRILQEAGLLPKDRQGFDKLMQQNPYSLRDRWVSERLEPHEFGRAIFHLGHRRGFKSNKRITKSKTDEEAKPSKKAKEDKETEEPGKTLENLLRDEGITLGQYLARFAVDDTSEEERKRAHKDPEGNKEWVRNHKRNPDYTHRTLRKMYEHEFERLWSKQTDFHPALLTDDVKRKVYEAIFRQGRLWWPLDSIGRCELTGDLRCPKGHWEAQEFRLVQEIANLRVYDRVTGQEEPLSREEQTRVAEELRPKGKMTFKQIHKFLDLKPHQRFRGFEERAMRPGLAGNGVEAAFAGSGLAEWYAGLSGEKREELHDLLVAVEEDRAKGRAYGIDEAALRDKAAEWGLTPEQADELIDIQQNLPDGHLQFSLRAIRQLLPHIREGLRVDQAIPDAGLKPQPKPAALDRLPPVKQFDRYLTNPLVCRALAEARKVVNMLIEEHGKPEEIVIELAREMRQSRKHRREIQERQKTEAKLNREAETEIAKAGGDPKSGEARRRYKLWKQYRSHCGDPAQCPYCPYCGSKKISGTGWLSPDFEIDHIIPRSVRPGDNAFNNVVLCCARCNRAKGNQTPYQWLGHDAERYDAMLRRVEKLPARKRDRFHLQSTEELETAIHELIDTTDPLLKATQHTSRAAVAFLQTLYPEEEKRSRVRCVKGFTTYDLRGLWGLNARSLGMGPADRKNRYDHRHHAIDAVVIALTTRKHIHNLCTAYARTERGDRPDMAPPEPWSDRDSFRREVQQVMEEVGEGKELGISYRPTRMAERRRAKSRKGPRGMQVVTRGSLHEEHGLGPVWTDKKAGQRKEDRYVRRKSIGELTPAILNGKGDEIRNPEIRDLLRAECIRRGLAHRVQEGAKKGWTLEKKHFRLIRRALAYWHECEGEAASPWQPDEERYCVDADKTKLKNGLTKPFPVLPCRKSKDGGVPIKRVRITTVEKTALPIRNVAGKPVKFVKPGGNHHLEIYETPDGK

SEQ ID NO: 7424 - protein, 1036 aa, unidentified
  REGION 1..1036: note = Description of Unknown: Cas Enzyme sequence
MELSEGTVTLGLDLGPNSIGWALIEETGGTGGRIIDVGVRVFQAGLDDLTQDGRGKSRNAARREARQRRRMLERHARRLRNLAKLLQRSGLLPDGDVENSDGRHDMLNELDRTIDSPYQLRARALDQRLEPFELGRVFYHMAQRRGFLSNRKAEPKDDEEKKGKVKEAISGLAANIDQAGARTLGEYFAGIDPREERIRSRYTSRQMYQEEFEKIWIAQTEHHPDLLTEELRDKLYRVIFHQRPLKSQTHLIGECQLEPGRKRAPWALLQAQRFRYLQTVNNLEVHSDLGERRALEPEERKVLCEKLELQEKMTFGRARQVLKLSKKSKFNLEAGGEKHLIGNKTAARLSAIFGKERWTSMRPAEQQAVVEDWRSIIRDETLRRRGRARWSLADEQADKFSRLNLDEGYCAFSRQALEKLIPELEKGKHLATAIREQYPDRWEHRTKPLDLLPAFDDSGLPELRNPIIRRCLTELRRVVNAIIKKYGKPHRIRIELARDIRQTAKQRENTTKRMRANEKARKRAAREIASELGYENPSRQDVEKILLWYECNRECPYTGKSIPIGALFGPHPQFDVEHIIPFDRSMDNSFLNKTLCDAEENRKSKRNRTPHEAYHSNPKKWAEITARVRRFSGDAAREKLRRFRLTQEEVEVALSDFTSRQLNDTRWAARAAKKYLGLLYGGVNDDGVDDSGKRRVQASAGQVTADLRRLWGLNGILGGEEKKSRDDHRHHAVDAVVVALTRADMIAHLTKAAQEAAASGGSRLYESIPLPWQRFRHEVERHILDCVTSHRVSRRVRGPLHRETFYSRPRKDEEGNSYVVTRKHLSTLSAKDLSNILDGRVREAVMAKLSELGGEPSKAFSEDSSHPVLKRGDGKKIPIHRVRVRQNLTELIAVGTPDCPRYVQSEAIHHMEIVEVNDPNGKTRWEGHVVSMYEAYRRKRNGSPIIKRDHGPGKRFLFSIAGGDTIELGNSSDSRELFIVRTVPQSKQIRFVPINDARKLADIPKTGNTAYPETLRSRSCTKAIVTPIGQLRRAST

SEQ ID NO: 7425 - protein, 992 aa, unidentified
  REGION 1..992: note = Description of Unknown: Cas Enzyme sequence
MAGYTFGLDIGCNSVGWALVDEDEKRVVDLGVRVFPEGVDRDTKGFEKSKGARRREARGGRRVHQRRRKRREILVRELRGAGLLPGQNKELENLVTESEPYPLRAKGLDERLELHEFGRVLYQINQRRGFKSNRKSGNKKEEGQIAKEAGELQMLIEEAGCRTLGEYFANVDSEEERIRGRYTFRKMYEDEFDLLWGKQAEFYPGVLTDDLRKKVRDEIIFYQRPLKPTDELIGDCDLEDGEKRCARADWYARQFRILQDVNNLKVVNPDGSRQKLRDEQRKMVLGELEKKKSVSFSSLRRKLGLIETQGFNAEYDIDEKGNKREKMQGDEFSAVMGSRKVFGTNSWREISEQEKAELNDAFLDLDDDDLFEELVGKYNLSEEQTEAAMKVELPRGYMRFSRKALEKLLAPMKEGKRTDEALAVVYPERAVRAEGEHEERLGLPEDVRNPLVNRAMFEVRKVVNAVLRAYGRPERIKVEMARDVKGNRGEREKDHFRMRENEKRNDEARRRLMEDVNIVNPTRDDIIKYKLWEECGKVCPYTGKPISQASLFGPNPEFQVEHILPYERSLDDSFINKTLCHVHENIHVKGNQTPYEAYSSEAEKFEQIKQRVNSSAMPYWKKERFWQAEVDTDKIIARELNDTRYITRETVKYLKGVCGNVKGTRGKVTSELGHQWGFIKDRDDHRHHAVDAVITAVTRQRHLRELGRTKYSRTGEVFSPPWAHFREEVLEKVKHINVSHKPRRKVSGALHKETNYGPTGLKDEKGQDIFVYRKRLQELTPAMVEKIVDPVVRGIVKARLAEQGVDSGSQRIAKEVWSEPLCMKRTKSEKQVRIKKVRIRDVFNNMILMEDRSGKTYRAVAPGSNHHIEIYEYLDKKGLTRRDGAIVTMFEAVGRSRRGEPVVNREYGGGKRFVCSLAINEMFMLDVEDGKEELHRVQKIDQNGRIIFRPHTFGGKLSDTDKPPLIQRKSASTLRGWKVTVDCLGRIHRAND

SEQ ID NO: 7426 - protein, 991 aa, unidentified
  REGION 1..991: note = Description of Unknown: Cas Enzyme sequence
YNLLLLGLDLGTNSIGWAIRETSAEDRETYYQKFKPAAPNYDPSNEIVDYGVVIFEKGVGEGKSGEFSLAAERRKNRSKRRLYNAKRYRKWALLKILIENQMCPLTQEELKLWSVGKWVQENGKWKNKGREYPVSVNFKRWLAMDFDKIGLPEEENEKLKPEFKNPYELRKFLLETPAENTTKRKFQIGRALYHLAQRRGFKTSRKSGKSNYAQNQEIETRKQQDPNYRITFYALEKINSGNRFRASGVIQRKYYEEEFRAICEKQGISNTLTNQLFDAVYYVRPLRSQKNLVGKCTLEKNKTRIPISHPLYEEFRALQFINNIKWKEKNSQNKFEPIPIAVKKKIFEEIFFKKATKGKNKGKIRDDDFKFKEISDAFSENGKYEFNYKDNTNVSACPVIAGLMNTFSEEWKDKDVFISDENKFGINWNNLKLEYSIQYVGKNGKGLKRKGKNFIEKNIGEKRILNYENIWHLLFDYKQTKDNEDGLKQFCKNVLNWNDEKINQFTNIEISQGYGSLSRKAISKIIPYLQEGYIYTDAVLFANLEKVLGEKVFKDNKDKIKKRISETIKEIDQQKEKLNIVNALIQQYLSDENMPLNRPKGVDEMLKKLAEQETERKIKAHLGIKKWTNLSENDKNEYKNFVLEKYLRFLNGEQSSEEKASALNGKSPTLDYYKLPRLDEAIKKLLKEEFNATDKGLKYLYHPSDIEVYSKSKTEKEAVDPITGEVIKVPQLESPIPPSKAWKNPMAMRTMHELRHLLNYLLRTHKIDAKTKIAIEIARELNDANKRWAYETYQRNREEENKEFAKAIYGIVKEKYPNINENDTENINKVRLWWEQIPDGDKIYDEIKELKEDVDKYRLWKEQKAICIYTGKPISLTDLFDGTKIQFAHTLPRSKSFDNSLANLTVAYAYFNTNIQKEKLPTQLENYEKDWTDPVSGETYTAIKPRLEDWKRRRDDLEKRIEDNKKETKKANSKGDIERKNFLIKQRHLLF

SEQ ID NO: 7427 - protein, 1559 aa, unidentified
  REGION 1..1559: note = Description of Unknown: Cas Enzyme sequence
LNSHLISILIRLLKTAMKKIIGLSLGTNAVGWALTTQSFGKKRGTIDGLGSRVIPIPQDILGKYDAGQSYSQTAERTKYRSIRRLHQRTLLRRDRLHRVLNVLGFLPTHYKTAIDFKKNRGQFKSHKEVKLNYKKNTAGNFEFIFMEAFYEMVAEFKAKDQLTKIPLDWTLYYLRKKALTEKISKEALAWVLLSFNQKRGYYHLRGEEEVQSKTKKKEFYSLKVKEVITTKDRNDKGTWYDVILENNWVYKRQSLVSLTNWVGTQKEFIVTTQLETDGTEKTDHEGEIKRNFSAVDSEKDWIAIKKRTEQNLEESSRTVGQYIYETLLNNPSQKIRGQLIKTIERTFYKEELLAILKAQLPFHPELKNRQLYTQCLNELYPRNEAHQDKLKEKKEEEMFSYLFIDDILFYQRPLKSKKSTHEDCPYETRSYIKDGKKKIQKIKCISKSHPLFQEFRLWQFLHNLKIYQKRNTASELFDTDVTDTFFSTEKDWTLLYDFLSLQKEVEQKNILSFLVQRKKIEKKEMKNYRWNYGVTKKYAANETKASFLSKLKKVKNIASQKFLTKEKELHLWHIVYSVKDQNEYRQALTTFAKKNNIEVSSFVENFIQFPPFKNEYAPYSEKALKKLLPLMRMGAYWNEAAISTNAKNTIAKIMARLESIDYDPAVFQKDKKQQLNSIVDDEIPKEFLQSFLPLKNKKPCEGLSAAQACYAVYETCAESGIIKPWKSPSDIDAYLLKEFKQHRLRNPIVEQVVTETLRLIRDIWEYYGKGEKSFFNEIHVKLSREVKNSSQKRKGIASRNWENENTTTRIKALLEALKKDSVHDIRSYSPSHQTILKIYEEGVFQNPNVTFSAASHDEILAIRKSYSPTKTEINTYKLWLAQGYTSPYTGATVPLTDLFSVDYQIEHVIPQSRYFDNSMANKVICEREINQLKGNKTAFAFLKEKGGSLIPLKNGNTVELFTIEDYKTHCHQYFKKNITKLKNLLSEDVTESAMNVQLNGHKYMSTVIKTLLSNIVREEEEKKATSKHFMPVTRAITSKLIQDWGFNDTWNELISPRFLRMNDLTNTTDYGEWDGKINAFRNTVPDAISRGFHKKNIDHRYPAIEALAVACCTKKQITYLNFLHAKKEIEHLKTSLLTQNKAGYFTKTFQLPWDDFISEAKENLEKMVVSFKQNLRIINKTNNKTWQWKLQNNGEYKKELVPQKGPKESANKINWAIRKPMHKETVSGSVTIKRIKKGERNLTAYLEQPELIVDTRIRKKVQRLGVLFEHDLKKIKKTIQETPFLTKGKEITKVRVFEWTKDATATRVSLDEKFTRKHLKSITDGSIKTILENHLKNYLDENEKERFDWAFTLEGIDALNRNIKALNNGKNHQPIYKVRLYEEGSKFRVGKIGAKETKFVEAARGTNLFFAIYHDDEKGKRVFETVPLHRVIMHQKQTANVSIDHRLPILPDPTKGSFLFTVSPNDLVYMPTEEEMTNEILVDLDNLSKEQVARIYKIVSFTGNRLYGVPNNVAKSIQDKLEFTSLNKLEFSLDKRHIKHFCWKLITNRLGKVSAILRG

SEQ ID NO: 7428 - protein, 1225 aa, unidentified
  REGION 1..1225: note = Description of Unknown: Cas Enzyme sequence
MAKKLGIDLGTNSIGWAIVEKDKNEKEFILKDKGVRIFSEGVNIEPKTSSESSKAAQRTTYRSNRKLKYRRKLRKLEMLKVLSDNNLCPKLLDEELNLWRYKKIYPKNDEFRLWLSTDNQEEELERKKQIKNPYAFRFKSSTQKFDLDKINDRYQLGRALYHITQRRGFLSNRLDISDNSIVEEKNSEIEEIIQQAISSDDLLKTYNDFLEAYDKTETNSKALFALGRAFKSILKENENEEFSDIKEKILERLNRKEFLGKVKRAISDLSDKIKEANCNTLGEYFYGLQKEGLRIRNNYTHREEHYLHEFHAICDKQNLPLTLKKDIEKAIFFQRPLKSQKGLVAKCPLENDKACVPISHPDFELFRMYSFINSIKIKPEEEDKLRFLNGAEKRIIEPLFYRKSKPNFDFEEITKKLTPKHLKSSYYKDRNAQNSDVLFNFENYTNVSSCPTIASLRYVFGDNWKVYLIQNFNKKNKDNSSKTAYQIIDAIWHVLFRFNKTEKLKQFVIDYLGCDEKMATKFSKIKLKQDYGSLSLKAIRNILPYLEKDLLYSHAVFLANMKTILPNNIWENKEDRKIINNEVFSIIDTYNTYKNNVDIINGLIKNVKDNKETWNGKNTFVIDAYKSDINKNIKEYFGLKRWGLFLEEEKEIILKNSFKLFSTQMRLNSGRGEFLKKETLDERVKEFLRDNFNVDSEKLKKLYHPSAIEVYKKAKRSEIDGKLYLGSPLISSIKNPMAMRALHQLRKVINQLIKEDAIDENTIVRIEMARELKSANERVAIRQWQNYIQNNRKEYIDDIKKLYKEQCGLDIEPSKDEVLKYQLWLEQNRVCLYTGKTISICDFIGANPKFDIEHTIPRSKSLDNSQTNKTLCCSIYNRDIKKDKIPTECKNHDEIILRIKGWYSGYKSLEKQIRDITKKVRGATTKENRDKYIQNRTKLRFKYNYLKLKYKTFTMLEIPKGFKNSQSVDIGIISKYGNLFLKSLFTKVYPVKGKITSNLRDIWGLEKKERINHAHHAKDAVVVACCSKDINDALATYYHNYEDYKFYGKPKPSFKHRIPWKGFNNDVKSFEDNTLISHHTSNVLPIQSKKAIRKRGIIQRNKNGEIKYKQGDTVRGALHKESFYGAIKREEANKNGEIEEVVKYVFRKPLDSFSDSDLKNIVDDTIKEIITNGRKQEKLLKKEIETLKKQINKVNDAEEKIIRAQIETLVNKIENELYVLPNKNG

SEQ ID NO: 7429 - protein, 972 aa, unidentified
  REGION 1..972: note = Description of Unknown: Cas Enzyme sequence
MPATESRLTLGLDIGSASIGWALADIAGATIAAAGVRIFPAGVDLAQWEQGREGSSNNTARRGKRLQRRQFRRRAGRQRDLFLALQNAGLLPPAVREEGAPGRSAARHGVLSALDEALRTRWAARMAADGVPAPEQVLPYYLRATALDEPLPPHALGRAVYHLGQRRGFLSNRRELNGKSGDKQKEADERSKVKGGIAGLRAEMEASGARTLGEHFSRLDPAAARLRTRWTARDMFQREFGQIWERQAPHHAQLTPALRKRLERILFHQRPIAAGSPGACELEPGAKRAPMASWYAQRFRLLQKANDLRSVAPDESEYPISAAERAALIAALEAEGDLTFAEIKRRKLVALPKGYQFNLQRGGEKKIPGNRTNAILARLFGTPWGQCSPEVRDRIVSQWLDSNLDDQALERLWGRSADLQFVGEIDWDKTQPEDGYAKLSLKAMHKLLPLMENGMAFKTAEQEVYGDRRSDPVAVLPPVEKALPAIANPCVTRALTELRKVVNAIVREYGKPWEIRIELARDLKRNAEQRLQLSNSMRTREKERKRAAQQIVAEAGFSMAGPGDIQKLLLWERGGKACPYCGESINGAQLFGEGQVEVDHILPRSRFPDDSFGNKCVAHTRCNREKRGRTPFEAFSGDLQRWEEILNRVRAWKDPGKLRAFECRAEDLDLDREDSFASRRLNETRYSTTQAAKYLGLLYGGRDADRGDGTRRRVIFATSGMATAVLRRGWELEAILRQPEPSANGKSRGKPRHDHRHHAIDAVVIALTSNATIQQLAVAAAAAAAETGSDRVSSRTLRAPWPNFADEVRQVIEPLLISHRPRHGLQGQLHDETNYSKPHGEFVHVRKPVHTITEKQIDKIVDPAVRQAVRAKIEAVGDPKKLEHDRPMLRTRAGRDVPINKVRLRAKPAASVRPIGSGAVDDTAKHHIALFAGRDKKGRDRWLGEVVSRFEAMQRKAQCHCPQGHRCECVVR

SEQ ID NO: 7430 - protein, 1025 aa, unidentified
  REGION 1..1025: note = Description of Unknown: Cas Enzyme sequence
MARYTLGLDLGSNSVGWAIVTQDGTRFKNRTPILAGVRVFPEGVADLDQKKERPRGQERREKRSQRRVHYRRRQRRALLRRALIEAGLCPTDPQARRAWIAQNPYPLRARGLDERLEPQEFGRALYHLCERRGFKSNRKSQSKEDNKITKDASALQQEIESAGCRTLGEYRDQRLDATNHSQRIRGRYTLRDMYEHEFDSLWESQRRFHADILTDDLKIKCYDAIFFQRPLRFDPQVIGDCELEPGEKRCPVSHWLAQRFRMLQEINHLRVMDAAGDRPLTRQERAALAAALGVKKEMDFGAIRKCLGFLGTQTFNLETEGKRKKLKGNGVEAALQNKVLRKWYKELPEEQRQAVYDALAEVQDPQELRRIAADQWRCNAEQLEQLLKFTPPGGYLRLSNKAIRRILPFLEPDHVCDKPCREMFPDSDPESGHVFSEAKTLAGYPPEPEIPTFESVPPIPRRGDKKAWAAAHPTLRHMGTALTNPLVRRALAETRKVVNAIVREFGKPEELVIELAREMKHTKDQRQQIHWDNVNRAEENEQIAKRLTSEFNIQNPSRDDILKYRLWQECREVCVYTGKTIPKNKLFSPEIQIEHIYPLDRSLDDSYLNKTLCFGHETNALKGNRTPYEAFADTPDFDPILKRAERLPWKKRRRFTVKEVAFDDFAQRQLNDTRFASRLACRYLRTLGVPVRPVKGQTTSKLAHYWGLYGVLGTDYSKARDDHRYHAIDAVTVALTTRSHLQRLSTVLGRSARRNPLDPPWDGFWNHVRDAVASINVSYRPAHKLAGSLHKDTALGPTQKRDTYVYRVSLEDLTTAMVADIRDPVIQRIVRERLKERGIEEKGSAALGKVLTEPTLAMPSGVPIKRVRIQTVEKTAIPIRKVNGQTVKFVLPGGNHHVEIYQKPDASWTGRCVSRFDACKRLRKGIPVVDRADQPDGAKFLFSLCINDMVQITDRDTGEVKLYRVQMTSHNPELDKPDVTLRLHSAARIEDKETALRLASWSAFQKQTPQKVQVDPLGRIHPCRD

SEQ ID NO: 7431 - protein, 1024 aa, unidentified
  REGION 1..1024: note = Description of Unknown: Cas Enzyme sequence
MSSYTLGLDIGSNSIGWALIGTDKKPSIIDMGVRVFPEEGKGGSVSKGGQTVRVSQRAKRGVDIRTRRCKDRKNRRRKKLVNILTKSHLLPADMISRIKLLNDIDIDGKEASLRPYKLRAKGLRERLELFEFGRVIMHLNQRRGYQTNRKGGDPSEDKSVAEEAKNLLKEIDQSGSKTLGEYLYKVAIGETKDTSGFEHGKIRNRRAFREMFKDELDKLWMTQAEYYPKVLKKELRTEIFDSMFWQRRPKYKEPGNFDLDGQPKALRACWKARQFTLWQKINNLRTEKKFEEPEVLRDKYRTKVYEFLNTKKKVSFDTLRSELALGDDVTFNFEEGGKKKNIGGDEFLCDIRKSVGEKVWEELKEKDKEFLVDLIAKEDDEKRIIDSIKSKYTNGDNWVQDLLKVHIPEGRAAFSEDALGKLLPYVKDGKRTDEAIDLAYPPESKITKEVCKELPAIAPIENHVVMKAMCELNKLVNCIMSKYGRPREIKVEMGRDLNKSRSEKDKISRAIKKNTDRNDKVREKLKDLEREYNLQISGTRENVVKYRLWEETGGTCIYCGTNIHPTKLFGSHPDCEVEHILPKKRSLQPKDYNNLTLCHVKCNHLKDNQMPFEAYGNNPEVYQHLLDRVFKSDMPRAKKLRFIRKKLELDGSVKRFLNDARYITRQAQVHLRKLGVKVFGTKGMATGLLREEAGFDTLLESMAIGRKHEDNRNHCIDAVVVAMTTPDLLRDLARGWELRGGFGLAESWAVVRKQIEEKLPKINISYRPRHRISDFFHKETAYGLTEDVKIVFKSGRVEKVGNHAWVCREKLPYITTKDISDVVKTVGDIEDRLPKSAYNIKATLRERLKTLDVDVKSDDTEIPWDKIVSEEEKIEAGFAGDNTIRLLLNNSIGKKIPVRKIRVTEPHSSVLLIGDQNDEPYKAYLLENNHHIEVVEYTQQNGQKERRGFIVTQIEAARRWAEKQPIVQTKHDGGKFLYSLARNDMFIVQFPDGKEMLHRVEKMSESAIILRPHTYGGVCKDTDK

SEQ ID NO: 7432 - protein, 942 aa, unidentified
  REGION 1..942: note = Description of Unknown: Cas Enzyme sequence
MEKAKEFPYVLGLDVGANSIGWAILERREGEKDEYIGLSAIRASGARIFEAGVEGDIESGRDESRAKKRREARLMRRQINRRAMRTYHLFSLLQSACLLPTVAATAPIADSQTSKNIKKQQQRAGRDSILTNLDKGILARWHEKLKSESASAEDIRLLPKRLPYVLRARALDQKLEPHEVGRALYHLGQRRGFESNRKALAKKDEDKSVVKAGIKKLLEDMGNVKARTLGEFFSQRNPEEERIRGKWTSRQMYEDEFEQIWKAQSQRHPEVLTDKLKKEIQRAVFFQRPLKIQSHLIGECEYEEGKKRAPMGILAFQRFRILQVVNNLKIISHYQARPLTPEERKNLIEALEGKGDFLDDKGNLSFTNAKKVIDLKSGRFNFDRGTKPKLVGNRTAAKLRPIFGERWDSFSDAERDQVVEDLRSIHKDEALIRRAMKVWGLDEERAKQLAEVELEPGYASLSRQAIAKLLPLMKQGLPYMTAVDKTYDPPPPDPVDLLPPVDKALKQVRNPAVMRSLTELRKLVNTIVKKYGKPEIIRVELARELKNPRPVRKEISEKISANEKAREDAAQAILKEVGLQNPNRRDKDKYLLWEECGHFCPYTGKPISMTDLLGPNPRFDIEHIIPLHRGRMEDSFANKTLCDSEENRRKHNKTPWEGYGSDPQRWEEILGRVKKFNNEGKLRRFQMKEENLAELESSFTDRQLNDTRYASRLAREYLGHLYGAKHGIDAHGKLRVQVSSGGVTAHLRNELSLNRVLSEGGQKSRDDHRHHAVDAMAIALSSPATVKILNDAAKRSQPGHRPFAFVDPPWLGFLDDVRNSILNSVVSHRVSRKVRAALHEETFYSPPKQDPDGKPCRHVRKPLEKMTKNEIEDIVDPKVKEKVQAKLQELKIKDIKKEKPFSNEANLPYLQAKDGRKIPIRKARIRKPDSAFSVGEGPRERH

SEQ ID NO: 7433 - protein, 1010 aa, unidentified
  REGION 1..1010: note = Description of Unknown: Cas Enzyme sequence
MAIRLGLDLGPNSIGWALTDTDSSSVVAAGVRVFPEGVDRDTKGGELSKNETRRLARGMRRQTNRRAKRKRRLRKLLVKVGLLPPCAAMPAHHPERIAWENQACQSADPYALRRAALDRKLDPHEIGRALLHLCQRRGFLSSRKADKARSKKEASEMLQAISHLEAEISSAGSRTLGEYLANVGTASPLARVRGRHTRREMYQRELEAIWEAQRRHHPDLLTDDLKAKVRHIIFYQRPIRIPKSLVGTCELEPKRRRCPRADRRAQRFRILQDVNNLLLIDEHGEERPLTQEERSRLLEYLSNAARRSFKDIRKHLGFTEAVVFNLERGGRKYLLGMPTDKAMSHKDCFDKAWFSMDEERKNQIVRCLLDEEDPVILQKAVSEWGLSPQQARNVLNAELPAGYANLSREAIAKLLPHMERGLPLMTGDDRPCALTEAGYLRPDQRPVERLERVAQPPDLPNPLVRQALHEVHKVVNAIIREYGCPEQIHIELAREVKGSAEQRKVRTKAMREQEQRRDQAAEEIRKAGGMPSRDAINRYLLWREQEGICIYTGRAISTAQLLAGEVDIDHILPKPRSLDDSMMNKVVCFRQANAEKGNRTPYEWLAQTDPQRYEQVCQRARKLPYGKYRKFLQKEVKLDDFIHRQLNDTAYISRKVREYLQCLVPDPHRDILCTKGQLTAELRHGWGLDTILRELPDSPAWKEDHGDVRPGQKDRSDHRHHAIDAIVIALTDRSRLQQLAREQVCPPPLEHFRQEVKNLISEMHVSHRVQRKVAGPLHEETIYGKTDKPGEFVYRKPLEALTPSEAQDIRDPVVREKVLERLRALGVRSGRKKRGAGANESTIPAEAWREPLWMNEEKRILILKVRLIKKEGSILDIWQGAAWVKPGSTHHVCLFEMPDGKRDAVFVTMLEAARRAANGEPVIRRQHPHQPNARSVMSLSKGELVLANCEDGQRILQYNTGASTTKQLRFTDPKDARPSRDKATLSFSPNKLEARKITIDPLGRVRWAND

SEQ ID NO: 7434 - protein, 1103 aa, unidentified
  REGION 1..1103: note = Description of Unknown: Cas Enzyme sequence
MDTQPSRDYVLGIDLGSNSLGWAMIGLEDGQPAKLLRAGVRVFEAGMEGNIESGQEESRNLKRREARLHRRQLWRRARRLKKVFRLLQTYGLLPAVPPPFRAAPAFVALAFRPADGGLKPTATPDQRQDFLNELDRQILTSAWFAAKKASGVYPEPEQTLPYILRSAALDERLEPHLLGRALYHLAQRRGFLSTRKQARAAKKKEEEGVVKQGISDLRRKMEEAKARTLGDYFSRIPPSEERIRGRWTARAMYEEEFQQIWNAQAKFHGELPTDERKKLLFQAIFYQRPLKDQPELIGHCELEPEERRAAAYLVTSQRFRLLQTVNNLTILPPGEPEKKLTPADRAKLIEALELHGEQTFPHIRKLLGLTRNYGFNLERGGEKSIKGNRTNADFYAVFGDRWSRMSPEERQRAILDVHSIQKPETLVRRAREYWKLDEEAAQRFCDISLEPDYLNLSRRAMEKLLPLLEDGITYGEARRLLYPGRFQAVEPLPLLPPVQDALTEIRNPAVTRCLTELRKVTNAIVRQYGKPAEIHIELTRDLKQPKKRRQDRADRMRANEKARKAAAKRIVEEAGISDPSPDDIRKVLLADECRWECPYTGKSISMRALVGHESQFQIEHTIPFTRSLDNSFLNLTLCHVEENKVKANKTPYEAYSGDPERYERILERVKRFQGDKGIVAQKLQRFLMTPEQVEEFLAGFTARQLTDTAYASRLAADYLGLLYGGVVDQAHARRVQATSGQVTAYLRNLWLLNTILRDGETTHGGYATKPRDDHRHHAVDAVAIALTSPATVKQLSDAAQRAPLEHRRRFAALQAPWPDFVDSVRQEINRLIVSHRVSKKVSGALHEETIYSAPVAAGGTCPDLIGSPPGAALKGGATDVRHVRKPLASLTKTEVEDIVDPGVRRRVLEKLEEVGGDIKKFTKEENLPFLLAKDGRRIPIKRVRIKKRLPTFELGSGRTLRHVTPESNHHLEVFAELDEQGNEAEWDGVVVSMAEAYHHKKLGLPVVQRDHGPARQFKFSLAQGEVVECDLAPGERRLFIFRKVSQLSSGSITIGFAPITDARQAKEMQTSRAWLWSTPGKLRERHARKVVVSPLGEVSEAHD

SEQ ID NO: 7435 - protein, 914 aa, unidentified
  REGION 1..914: note = Description of Unknown: Cas Enzyme sequence
MKPDGTGYVLGLDIGANSVGWAMLKTDANPASLAPVTLDRVGVRVDETGVNIQDFESGREEGPAKVRREKRSIRRRLDRTARRLRALFKLLQKHASLPKAECESERGELPESVSGNQPAANSGHRFKKAMMRDEIIKELDKALLNRWMQRLISESADHEAIRLLAKRLPYVLRARALDEKLEPFEIGRAIYHLAQRRGFLSNRKAAKDEKGKEESGKVKSAIKGLYGELERTGARTLGEYFSKFDPEPRIEQDIAEEEETGKGKDQGEAQKRIRGRYTHRNMYRDELEKIWTAQQVFYPEILTDELKNEVYDRIFFQRPLESQKRLIGRCELEPDHKRAPMAILPAQRFRLLQKVNDTRISTPEGIQRQLSDKERTYLLDYLENKGDLEFSKAKKGEHLGQFFLESDMEHEPLGKVLKRSKKRLGEYVFNGEQTEKKFIGNRTNTDLLQFFGEQWHSFSNEDRDKIVDDLLSEMSEDDLAKLAMERWGLDKEKAREFAQIELEPDYCKLSRKALEKILPLMEQGTQYATASKEVYGEPKSSFAFDFLPPVDDESAVPELRNPVVRRMLGELRKVVNAIVREYGKPDIIRVELARDLRKNKKDRERISRQNFENRKERENAAKVVEDFTKRRAAGRDIQKYLLGKECDFTCPYTGKKIGMADLFGHNPLFDIEHIIPLGRSLDNSFMNKTLCCVEENRNVKRGRTPWEAYGETDKWDSIVQRVRLFKGSAARAKLERFQMKTLEEFEDFTTRQLNDTRYISRLATKYLKLLYGREADERQIVQVGRGGITAYLRDEWGLNRILRDGSQWRPEDPRPKRRDDHRHHAVDAVVIALTERKWLKVLSEAAVRARQEGRIEFAPIPEPWPGFCNDVGRQVKDVVVSHRLSRKVNGPLHKETFYGKPKSGDEGKVHIREY

SEQ ID NO: 7436 - protein, 1047 aa, unidentified
  REGION 1..1047: note = Description of Unknown: Cas Enzyme sequence
MASESAKPYVLGLDIGASSIGWALIGTSNRKPQGLIRCGARVFDAGMEEGDFSAGKENSRSAARRQARQARKLINRRLRRQRKLFNLLVKAGFLPAGDPAQVLPQFDAALRKKHIAPLPKGSRERRQWEHALPYHLRAMGLAHRLEPLEFGRAIYHLGQRRGFLSNRKAPPRKDEKPGEVKAHITELEKKMQDAGAQTVGQYLAALDPEEERIRRRWTSRQMYLDEFKKIWVAQAAHHRTILTEDLCKRVYRAIFHQRPLKSQKGLIGTCEFERGRQRAPWGLILAQRFRMLQQVGNARIVAPNGAARNLTSAERGTLLAVLDRQGELSFGKARALLKLPRGHAFNWESGGEDRFIGNKTHARLAQVFGERWWSFTDSERDQVVEDVLSIQKDETLSRRGQRRWGLDPEAAARFGQLALEDGHCGLSRQALAKLVPLLERGLPYSTAVKEVYGERRKEPVDFLPPPAPTYPHLRNPMVLRVLAELRKVVNAIVRQHGKPAAIRVELARDMRRSKKQRKESWQRMRQNERDRREAAAKIAAEAGIQDPGRADVEKVLLANECNWVCPYTGKSISMNSLLGPNPEFDVEHIIPFSRSLDDSFTNKTLCEIKENRDHKGNRTPHEAYAGQPDKWLEILARVRRFRGSAAEGKLRRFQQETVEGMDDFASRQLNDTRYAARQATDYLALLYGGPYEIGGRRRIQASRGSVTAYLRSEWQLNTILGDGGAKSRDDHRHHAVDAVAIALTDASTIKMLSDAAERAAIKGTRWWRERIDDPWSGFLDDVRQAIEGLNVSHRVSRKVNGPLHEETNYGPSKARDPSGRPVSFTVRKHLEDLSLPDVKLIADERVRQLVTAKLEELGGDPNKAFGRPENHPCFVLKDGRRVPIHAVRIRSRQSAMPVGQGARLRYVASGSNHHMEVFEVKDAKGKTRWKGRVVSRYEAIRRLAKRQPVVDRTAPEGGRFLFSLATHEIMSLTDANGAVNLYRVRKVSQSKSGSIEIAGARLNDARLKDDIIKAGDWLRIRSVDDLARKTCCKVLVTPLGEVRDAND

SEQ ID NO: 7437 - protein, 1018 aa, unidentified
  REGION 1..1018: note = Description of Unknown: Cas Enzyme sequence
MKYRLALDLGSTSLGWAMVLLNDKAEPCALIRAGVRIFPDGRNPKDGSSLAVTRRNARAMRRRRDRLLKRKARMQRLLVEHGFFPADEASRKALETLNPYELRAKGLDAALTPAEFARALFHLNQRRGFKSNRRTDKKDNDSGALKAAIGSLRAQLDPAGADSKARTVGELLWRRMNDPDVRTVRARYREQRVLKEDGKTRVDKSYDLYVDRAMVEAEFDALWARQAELNPAQFNEPARAALKDCLLHQRNLRPVKPGRCTLEPDEPRAPLALPSQQRFRILQEVNHLRLLGGRLLEEALNLEQRDKLVAALEEGSKSFKTAIPKLLGLPGTVQFNLADAKRTELKGNATSMLLGKKDFFGPAWRDFSEARQDEIVMRIQEEESEAQLVDWLVESTGVDEAHALKIANAALPEGYGSLSAKALAKILPAMRAEVITYDKAVQAAGYDHHSHISHAASTGEILPELPYYGEYLQRHVGFGTGELKDPPEKRFGRIANPTVHIGLNQVRVVVNALIKRYGLPSEVIVEVARDLKQSQDQRRETQEQQAKNQKRNERLRKVTAEIRGCAEERVRLTDIQKLILWEELSFDVADRRCPYSGLQIAAADVLTERVEIEHILPFSMTLDDSLNNKTVALRQANRVKGNRTPWDAREDFAAQGWDYDGILLRAERMPRAKRQRFAPDGYEKWLKEDKDFLARALNDTRHLSRVAREYLSLICPAGTRVIPGRMTAELRRRFGLNDILGLDGEKNRNDHRHHAVDACVVAVTDQGLLQRFAQASADARGKGLDRLVETMPDPWLSYREHVRRAVNAIWVSHKPDHGYEGSMFKATAFGIRRDGSVVQKLNADGESGRTNEYVVPITAPAQLQRHGLDDQGQPRAYKGYVPDGNFCIEIVNNEAGKWQGEVTATFEAYAVARKQGAAALHAPARSLSGKPLVMRLMIDDLIRLEIDGRLRVMRIASINAAGRLSLADHNEANVDARNRDKNGDWRYTYKQAGSLKAAKGRRVTISPSGELRDPGFKE

SEQ ID NO: 7438 - protein, 1114 aa, unidentified
  REGION 1..1114: note = Description of Unknown: Cas Enzyme sequence
MQSQIRPYTIGLDIGIASVGWCALGESRIIDLGVRAFDKAETAKEGDSLNLVRRSARLMRRRLRRRAWRLTKLARLFKRQGLIADVGLCKDQRTVVRSPWQLRVDGLDRRLDAEEWARVIYHLCKHRGFHWVSRAEETKAAADVKGEGGKVKQGLADTAKLMMEKRYRSAAEMVLAEFPKAQRNKRGDYGKALSRLALGSEMAELFKRQREFGNPHTGDVLVEAILGKGDHKSGLFWAQKPALAGTDLLKMLGKCPFEKSEYRAPKASFTAERHVWLTRLNNLRVVVDGSTRCLREEERRLALPLPYQQAGNFTYKQLRNALVKAGLLPDSFSFAGLSYPSAAQQSDGKAKDPESAVLVRLPAWQDLRLTLKKAGLETEWEGMAGAATSGKPELLDSIAWVLSVFKDDDEVGAELRKLPLPALEKMVDALLDIRFDKFHALSLKALRNIVPFMENGLRYDEACARAGYHHSLLHKVGQGGHKYLPPLYSGRDKDGRMVLDGDLDVPRNPVVLRAIGQARKVVNALVRRYGSPTAVNIEMARDLSRPLDERRKVEREQADYRDRNDKDKTMFAEQFGQEPRGQEFEKWRLYREQQGKCIYSLEPLELNRLLEPGYVEVDHALPYSRSFDDSKNNKVLALAKENRDKGNRTPYEYLAGADDSARWRQFSAFVESNKAYRLAKRSRLLRKEFGSKEADEFRERNLNDTRYICRFFKNYVERFLQLAADSEARRCVVVSGQLTSFLRARWGLIKLRGESDRHHALDAAVVAACSHAMVKRLSDYARRRELEKVREGFVDLETGEIVNPAMFQQLHEHFPDPWPNFRNELVARLNIDDAAELRAKMESLDTYPTEALNAIRPLFVSRAAQRRNGGAAHKDTIYAQPDRLKTQGGVTQKVPLSSLTLKDLDSLIDPHRNERLYAAIRARLEQHGGKGDKAFPAGNPLRKPDREGNPTGPEVRTVTMVIDRLSGIPVRGGIAKNDSMLRVDVFAKGGKFHLVPVYVHHSVAKVLPNRAVVAQKDEGEWTLIDDSFSFCFSLYPNDLVRVTLKAGSHLGYYAGCDRSTAAISLWAHDRNQRVGKDGLVRGVGVKTALSIEKFHVDTLGNIYPAPSEPRRGLA

SEQ ID NO: 7439 - protein, 1548 aa, unidentified
  REGION 1..1548: note = Description of Unknown: Cas Enzyme sequence
MTKILGLDLGTNSIGWAIRETDNKNQIINYGVIVFKKGVGDGKSGEFSLAAERRDHRSKRRLYNAKRYRKWALLKVLIKNGMCPSLTEEELRLWSIGEWVEENGNKINKGRKYPMNEEFLLWLRMDNKYFRNKGISENGKVIRKSPYDLRCELLEGFIEDEKERKYKIGRALYHLCQRRGFKSNRKGGKSTFKPDENYEKVIKENADITPSQIWKKDLEEKNIRIRGRGKIDREEFVKEFSAICKSQQITKELSEDLYKAIYTVRKLRTQKGLVGKCTLEKSKPRIPISHPMFEEFRALQFVNNIKKRIKNSYEKFESLKIEEKKKIFAEMFFRKSKPNFKFEEITNRFSEKGKYEFNYDRKNPSVSACPFIAGLMDVFNEEWKDKFISDENRFGINWHGLRLKYNVAYGKQQGKERILKIDYAKNDESLWHLLFDFVQTQDNDEKLINFLVDVVKWDEGKAKIFADIKVVQGYGSLSSSAIRKILPYLQDGYIYSEAVSFANLKTVLGEETFNKYKDLAKSIITKVISKIDEDKEKLNIVNGLIQQHYAGTKSNKAQGLTNEIKGQAIKDIDKKFLQYFGETNWNKFTDEKKKKYKDFVTEKYLNFLDGKQLPDEKASYKPNKEEPPTDYYKLPRLDLAIKEALRKEPFNATDENLAKQYHPSDIDIYTKVTENVIDKETGEILDYKKLPQPMPPSKGWKNPMAMRTMHELRTLVNYLLSREDKEDKPRIDEETKIVVEVARDLNDANMRKSISDWNDDREKENEEYKTAIAELYDPPSDDYYNKFRLALEQIEEIEIDENKESTFKRKYDEFVKTFITGEIKKEIDEDAEVEKENTESDKKENTKISDDYLMYLILNRERFNQLLNYKIPNSQKFIKQIIKPVKDYKKRRDELKEMITKYRLWREQKFQCFYTGKQIPLSNLFSDDYQIEHTIPRSISFDSELKNLTICDTSYNNYEKNNQFPTECKNYKTSFICQTIEGEKECTPIIERVNRLIKPKVDELEARITRLKHVAESIPDWEVDRKNANIRLRHYLEFEYAYWKKKYDTFTIERKDWKDKMKNSQLVDTQLVSKYSRAYLKSLFNRVDVQKGEVTAQFRKILGLPKKTRDNHAHHAVDAMVLSLIPGSANRDAILEIWYELQECEKSVKSRPEKQDRIKVLKKQLDEELSNYNLSYIREKEKEIKSNVLINHISKDQTLADTKKKVRKRGKIVYLKDKATKQYLKDEKGNRIPMVMQGDNVRGQLFEEKFFGAIQVTEKNENNFPKKDEDGNYVIEKDTDCKPIIRYVTRIPVSKLSVETKDGIKIIKNDIVDTVLKSKLEKQLNEGKTIEQLVSYENKDKNIKHLIRHIRVYHNEQPIEVKKHSQAFQSIHQHKQSVYAMNGKNYLYLLYEGMVNEKMERDYDLINLKTFVENKELFNKPISEIPQKDVYYRNKLKGKLPCIAKLKVGQLVMMFKENKDELKEISTYDIKKRLYKIRQLETDGRIIFDYHLEARKKEDVKKEVGDGKSQIDFEKPYPKLRLTKSNFYFTIEGKDFEIKPDGEIKWLF

SEQ ID NO: 7440 - protein, 1141 aa, unidentified
  REGION 1..1141: note = Description of Unknown: Cas Enzyme sequence
MVTKYRLGLDVGTASVGAAAVSLDKDGQPDALIWHHVRIFSEPLENGQAGLASKKAGRRKARMQRRQIDRRASRLRRIAHLSSLLGLKREEIGADDGSTLPYLRAQAATEQIELADLLRIFLRLSKRRGYKGEFKAKKKGEVAEGSSELSLAMRTLAESRGIPLKDETDTGITLGQYLLHRMESGLPTKLKIKEVGDESKNKKADDSNAPKNLYALRKMVEHEFNTIWDTQAKHHDILNGKHEDKPIREHFYEALFFQRPLKSSADLVAQCGLEPTLPRAPRAQMAFQRFRIEKTLADLRWGAGKRAESLTPTQKNTIRNLLDHKDKLKFEEIYEELEHAGHPKPQSKGLNLDRASREELLGNSTLAALRKLDRYSTKNHPEYATNLEQAFDSLDDKTQIAVINFLAELGSPEQLDDPSWHTSFVKQNGTPRQFNEALIAFVNRIKEHDQFDRLSKMGFDGGRASYSVKALNTLAEWLEEPNWPGDWQDSMRRMDEEAAIRVCYPQSLNREIKRMEKLPAPESTGNAVVDGSLRQIRWTVNKMIAELGSPPEEIVVEMAREMSLGISRRNERESDNNKQQKARREAEKEIRAHAQTPTPSKIRRYLLWIEQDKSFCPYCNKAISLAEALSGSATEYEHIIPKSLTQVGLKNSEIVLAHHACNQEKGDLTPWESWGNTERWQSIESAAAKFDSKKRYRKAKLLRLKDFEREVLTDESVNGFADRQFHQTSWIAKEATQWLECLCPNKVSISRGEMTSLQRRNWKLETVIPEVRIENNLPVLDSEGKLIEPEYFFKLKKYLEGHPVRREDRDTNPGFEFNRRPDKRLDHRHHLIDAITLALTSRGLFQQMAKSYKAAAEKMQPRDEETPADRERRIKNETRLRIEIPEPPLRNVRAAALEAVRECNISIKPDRQPDGALFKETAYGVAQRDGEDRLRLALRQSVSNLGKTQGKTSLEAARKAITEIISDDVKRIISEKFESRIAQGMDASNALAQPIFHPLYGTPIRKIRCFETYAEDAQPIGFSSRQGEHRKYLINAGYAYLELYLDGSKEPRLIKIRDAIRDKGKVVPQNVMRIYKGDVVKDSKDGLMYRVCLFKAAGTIALLPIWEPRSFKEANEKADKGLKVGGTISFSPAVKRLKRIG

SEQ ID NO: 7441 - protein, 1091 aa, unidentified
  REGION 1..1091: note = Description of Unknown: Cas Enzyme sequence
MDSNIKELIFGFDIGIASVGWAVLAPDRIVALGVRAFDKAETAKEGESLNLARRSARLMRRRLYRRAWRQTKVARLLRREGLIADAQFFHDQRPAPISSWQLRVDGLDRLLADEEWARVIYHLCKHRGFHWISRAEEKRAGEDVKGEGGKVKQGLAATGKKMGEKGYRTAAEMVLAEFPDAQRNKQGDYGKALSRVLLAEEIGILFKRQRALGNLHTSEVFLSAILGNGDRKSGLFWLQKPALSGANLLKMLGRCTFEKAEYRAPKASFTAERHVWLTRLNNLRIVVDGETRPLNELERRIALPLPYDQAGDLTHKQLRAALTKAGALDESFRFAKFPYAQSADGKAKDPESAVLVKLPAWQEQRKLLKDKGLETEWQGMAGVALEGNPELLDHIAWVLSVYKDDAEVERELGKLDLPGGKAMIDALGEIRFDKFSALSLKALRKIVPQMEAGLRYDEACEAAGFHHSQLFKLGEGDARYLPPFYSGRDQDGRMVFNDDMDIPRNPVVLRALNQARKVMNALIREHGSPASVHIEMARDLSRPMDERKKIGKLQDEYREKNDKLKATFAAEFGIPAKGREFEKFQLYSEQQGKCAYSLEPLDLARVLHDIGYAEVDHALPYSRSYDDSKNNKVLVLARENRNKGNATPYEYLDGANDSERWRRFATWVEGNKTYRLAKRTRLLRKNFDAKEAEGFRERNLNDTRYICKFFKNYVERYLKLADESESKRCVVLSGQLTAFLRARWGLAKIRSDSDRHHALDAVVVAACSHGMVKRLSDYSRRKELKAVHDGFVDLETGEIVNPDMHQQLKEHFPDPWNSFRHELETRLFTDDPAQLRADIERLGTHTPDALDALKPLFVSRAVQRRGSGAIHEAIIRSAKSLEQGTSHVKTSLQKIKLASLDNIVGAQDPRIIPLVELLRQRLTDHKDDSKKAFAEPVYMPSKNGKGALVKAVKLASTQKNGMFVRGGVAELGTMLHVDVHRFSGRFQIEPAYAADNSARVKPAQLPEHAELLFSLTKNDFIRVTLGDVRHEGYFVMYESDGRLTLRAHDQPQPDKSYFRKVVGSAKNIEKFHIDILGNRYPAPPEKRCDLA

SEQ ID NO: 7442 - protein, 1471 aa, unidentified
  REGION 1..1471: note = Description of Unknown: Cas Enzyme sequence
MKKILGLDLGTNSIGWALVEEAEKENEKSSITKIGSRIIHYGDNLVKVDKKGKISASMTPEEDFSSGKGLSPNAGRTKQRSARRNLQRYKLRRANLIEILKEHSIIPNDFIFSEEGNSTTFKTYKNRALAATEEIPIEEFVRILFMINKKRGYKSSRKAKGEEDGQLIDGMTIAKLLYENNQTPGQFVYELLKNGKKHVPDFYRSDLQMEFDKIWHFQKLYNAAIFTNETYEKIKGQKKNATKDYFEKVLKIDTPELKGKLDEKKLQHYELRSKAVKQQLNIGEVADTLIEINSEINNSSGYLGAISDRSKELYFQKITVGQYLFKQINDWQNAYELAKKEKINCPPAISLKKQIFYRQDYMDEFNTIWDTQAKYHKELSTELKSEIRDVIIFYQRRLKSQKGLISFCEFESKQIEVIVDGKKKIKTRGLKVIPKSSPLFQEFKIWQILNNIEVTNTKTKEVRELVEDEKQLLFEELNIKTKISKKEALNLLFDKSKEYDLNYKDIEGNKTNAVLYEAYQKIIALSGHDEKDFTKIQSKEAKEYVKQIFNTLGIKTEILDFDSSIEGNAIEKQLHFQLWHLLYSYEGDKSQTGNDKLFQILKNKFGFEKEYAQIIANVALLNDYGSLSAKAIRKILPHLKDGFSYGGRKDRPNEPSACEYAGYKHSKSSLTREEKENKVYKNKLNELPKNSLRNPIVEKILNQMVNVVNAAIEEYGKPDEIRLELARELKKSAEERKEMSEAISKSTSEHEKYRKILQTEFGLKQVSRNDLIRYKLYLELKRLGFKTLYSNTYIAPNELFSKKFDIEHILPKAKIYDDSFSNKTLELKSINIEKGDMTAYDFVKEKYGNVELLNYEKRVEDLYFSKRITEEISQENNQTESKTGDLRISKTKRDKLLMPESKIPSGFIDRELRDSQYIAKKAKTMMEEICKEVTTTTGSVTDRLREDWQLIDIMQELNWNKYNALGLTEEFTNKDGNVIKRIKDWTKRNDHRNHAMDAITVAFTKRSHVQYLNNLNARNDKSSSIYGIEQKELYRDKNNKLRFKPPIPLNDFRAEAKKQLENTLISFKANNKVITKNKNKFKIKGGEKTKIELTPRGQLHLETVYGSIKRYKTEEVKVSGTLNLETINKVSKKNIREALLKRLAEFDNNPKKAFTGKNSPEKNPVYLDEHQSYKVPDKVKIVLQETIYTIRKDVTPDLFKDSKKNDDFENRLKNIYDKSVQEALMKHYNMVKKEVEIFNTTVEKEKDKKKVLDVAFSNLTEKPIWLNKEKGISIKRITFSGISNAVSLRNKKDHNGKFLLDKNKNKIAVDFVTTGNNHHVALYKDGDGNLQDNVISFYEAVERVNQGLPIIDKEFKQAEGWQFLFTMKQNECFVFPNEKTGFDPKEIDLLNPENYYLISPNLFIVQTMSKVAYGNNIIRDYKFRHHLETTKNDRKELKDITYKQYKTLAEFKNIVKVRINHLGKIVKIGEY

SEQ ID NO: 7443 - protein, 1137 aa, unidentified
  REGION 1..1137: note = Description of Unknown: Cas Enzyme sequence
MASKNKNLGPLTFGLDIGIASVGWAVLGEKRIIDIGVRCFDKAETADKGASLNLARRTARLLRCRLRRRAWRLTKLARLLKREGLIADTGILKQPPAKGFRTPNLWQLRVEALDRKLDAEEWARVLYHLCKHRGFHWMSKAEEKKADEDKEGGAVKKGLAGTKRLMQEKNYRTAAEMIFHEFPFPGAHRNKRGEYCKALSRLLLADELATLFERQRALGNPHALPELESKLLDHKTGLFWAQKPALSGEDLLKMLGKCTFEKSEYRAPKASFSAERHVWLTRLNNLRIVADGNLRPLSERERTIALTLPYETGELKYSKLRKALVKAGLPEDFRFAGLSYPSERQKAEEKAKDPEDEKLVKLPGWQALSKTLKGAGLEDEWRQISVAALDGKPQLLDEIARVLSVYKEDEEVERELAKLNLPEKARMVEALLTLRFDKFSNLSLKALYAILPHMETGARYDEACFQAGYHHSQLHEAGRGEHKYLPPFYAGRDKDGRLKFNEELDIPRNPVVLRALNQARKVVNALIKVYGSPYQVHIEMARDLSKPFDERRDIKKAQEEFRERNEKDRAAFNAEYNASGELKGRDFEKWQLYREQHGKCAYSLEPLEINRLFEMGYAEIDHALPYSRSFDDSKNNRVLVLTRENRDKGNMTPFEYLDGNENSERWRQFVAFVESNKSYRQAKRNRLLKKNFGETEAKDFRDRNLNDTRYICRFFKNYIERYLKLHEDSEAKRCVVLSGQMTAFLRARWGLVKARSDSDRHHALDAAVVAACSHGMVKRLSDYSRRKELEKAREGLIDMETGEVVNPAMLERLEQHFPAPWPHFRDELVARLSIDDRQILRVEMERLGTYPPEALEELRPLFVSRAPQRRNGGAAHKETIYAQPERLKSQGGVTQKVSVTGLKPGDVDKLIDPHRNERLYAALREWTGKREEREKRAKEIEKAAKEAKRELTAEEKADIERLRALPRKPDKHGNPTGPIVRTVTMVIDKLSGIPIRGGVAKNDTMLRVDVFTKAGKFHLVPVYVHHRVTGLPNRAIVAFKDEDEWTLVDDSFQFCFSLYPNDFVRVMLKKESYSGYYAGCDRATGAIALWAHDRKTNVGKEGLMRIGVKMAGTVEKFNVDVLGNLYPAPPEQRRDLA

SEQ ID NO: 7444 - protein, 1364 aa, unidentified
  REGION 1..1364: note = Description of Unknown: Cas Enzyme sequence
VEAVVMTKILGIDLGTNSIGYGIRDPFILGNQIIDYGVLTFNKGVGEGKTGEFPLVQERTKNRGIRRNYQARKYRKWSLLQELIQHTPPLCPLTIEELDCWRKYRKDQPRKFPQSKEFLAWLKLDFNGDNTPDFKSPFELRKIASLQKIENPFILGRVLYNLVQRRGFKGKDESEAKTIMEGATINGVPIKGASELQRLMEENNTTVGGVLYKLNSELGERTKRYFSLRSFYEKELITICEVQQIPTQSSFYEKIHKCILWQRPLRSQKGNVGICTFERKEFIDPKTSKKITTGRQRCAISNPLFEVFRAHAFINTIKIKDNNQSERKLSQEEHDLLFSTIFLKNSKPIKFEKIAKKLNVDKQHINYNLDQSVITCPITSKLMKMFASDDLFTLRVPSNTSKGYYDIFDIWHILTNFDDQEKLIEFALNKLHFDEETATEFSKISIPKGYSGISLNAIKKILPFLEVGHVYSDAVFLANLPQVIGHKLSTNEQEAFLTGLNEHLEHFQQELLIAKVVNTLISKHLNLEDNEKYGSFPEYILSSRDKQDIISELISLFGNKTWLELESSQRDQILNKVSELYGNYLKIPPTRDKSLLFLNPPRKEEYIFRYLQIPPWNISEEKIKFLYHPSEIESFLPAHVQNSFPVLGDPIPVSKGFKNPMALKTLFMLKKLINHLLLKGKINPDTKVIVEIARELNDSNKRKAIQMYQREREKENLKFKAEIEEHCREQNLTININDQLIDKYRLWTEQNRMCIYTGRVISISEILNGTGFDLEHTIPASMSFDNELKNLTLCDNFYNRAVKRKRIPTECENYNKEINISGTIYPPIRANIKFIEDNVAKYLNHVKFWSNNSKQATTKEQKDNCILHRHYHSMHLDYWRKKLDSFTITEYKASWRNSQLRDTQIITKYAVPYLKTVFHKVEVQKGAVTAAFREIYNVQFKKDRTSHTHHAIDAAVLTLIPSHVKRDELLAKYFEKLELKQSFHAQPPGWDGFERRFIKEIENTVLVNFYNRNRVLVQSKKIIRKRGKIQYVKQKDESGALVYKLSPEGNRIPMIAQGTTIRGRLHKETFSAAIKTNNGEINYVVKVPFDSTSFTELSDLNSIVDSQLKNHIVQVITDRIDKQNISFLQAISQPIWMKGKDGKEKKVDKNGFPIQPIRHIRCYQKAGRGFLKNAVQVREQDFVSKNEIKRFVYAQNDENALCLFYRHENPTYNQFRFITLLELAKMKLDRISNLLTAYPHLHEVIINKKKQEITIALHSIIQTGTRILVFNNDSTELFDLWPGELSKRLFVVYKFNAAPSNYLYAKLHTVAKLDDEKEYTEIDSNQPQKYLKLTAPNTKCLFEGIDFNISLDGTISFLNNNRFI

SEQ ID NO: 7445 - protein, 1016 aa, unidentified
  REGION 1..1016: note = Description of Unknown: Cas Enzyme sequence
MLGKMRYRLALDLGTTSLGWAMVRLDANNQPCAVIKAGVRIFSDGRNPKDGSSLAVTRREARAMRRRRDRLLKRKAGMMRSLIEHGFFSNDAAQRKQLELLNPYTLRAKGLNEALSPGEFARALFHINQRRGFKSNRKTDKKDNDGGALKTAINKLRETIKAENCRTVGEWLYKRDSTGQTVRARYHEKKVLNADGKTKTDKYYDLYIDRAMIEDEFETLWQKQHELNPRLFTQDAHDDLKSVLLFQRPLKPVKPGRCTLLPELERAPLALPSVQRFRIYQEVNNLRLLDSGLQTVPLTMQQRDTIITALETNGKRSFTQIKKLLGIGGAVEFNLEDVKRTELKGNTTSAILAKPEHFGTVWFTFGEAKQDAIVLQLVKEENEAKLIRWLQDETGVDEKRAEVIANTGLPEGYGSLSIEALARILPELRRDVITYDKAVLAAGFEHHSNLSHAATGEVLLSLPYYGEALQRHVGFGTGNPDDSVEKRYGKIANPTVHIGLNQVRLVVNALIKRYGHPSEVIVELARDLKQSKDQRDEDNKRQAANQQRNARLRADIASVLSISEERVKRADIEKMILWEELSFDPADRHCPYSGVQISAAMLLSDEVEIEHILPFSQTLDDSLANKTVALRRANRAKGDRTPFEAFGAQAVAGFDYAEILERAARMPKNKRYRFAPDGHQQWLKDDAGFLARALNDTRHLSKVAYEYLRLVCPKTRVIPGRMTAMLRAKFGLNDILGLNGEKNRNDHRHHAVDACVIAVTDQGLLQRFAQASASAREKQLNRLVESMPLPWETYREHVQRAIGAIWVSHKPDHSHEGAMHNDTAYGLRADGKVVTHKMLEGERTLVEENLRVIPFASAKMNHRHGVLENGDPKPYKGYKGDSNYCMEIVRNEKGKWEGEVISTFDAYQIARTQGVERLRNLTLSVSGKPLVMRIMLDDAIRLDVKGDLRTMRVATLSGNGQIFMADMTEANVDARNRSKDDVFSYVSKMAGSLQAAKGRKISISPIGELRDAGYKA

SEQ ID NO: 7446 - protein, 1494 aa, unidentified
  REGION 1..1494: note = Description of Unknown: Cas Enzyme sequence
MKKILGLDLGTNSIGWALVDQNFEEKKGNILGLGSRIIPMSQDILGEFDKGNSISQTAERTGFRGVRRLRERHLQRRERLHRVLYLLGFLPKHYSDKIDFSKRLGKFLPETETRLVYDEKNDFIFKNSFDEMLRDFEKRQPDLVSNRRKVPLDWTIYYLRQKALTSKIEKEELAWLLLHFNQKRGYYQLRGEEEEENQNKLVEFHSLKVVDVTADEPQKGKPEIWYSIILENGWVYRRASKNPLFDWKNKTEDFIVTTDLNEDKSVKKDKEGKEKRSFRAPSEDDWTLRKKKTESEIEKTQGTVGQFIYDTLLSNPNQKIKGKLIRTIERKFYKEELNQILRKQVEFHNELRNADLYNACVEELYPHNESHKNSLLNKDFVHLFIEDILFYQRPLRSQKSLISNCQFESRGYVVDGIKKSEPIKCVSKSHPAYQEFRLWQWIQNLKIYNRETDADITSEYLFSEEDFVRLFDFLNERKEIEQKILLKHFRINEKTHRWNYVEDKKYPCNETHSMIKSRMEKVENVSLDSLTPEIEERLWHLIYSVNDKVEYEKALKSFAIKNHLNQESFFENFRKFPPFKNEYGAYSLKAVKKLLPLMRMGKYWSYENIDLKTKSRIRHILTGEFDESIRERVRDKAIRLTNESDFKGLPLWLVSYIVYDRHSENAVTGKWDTVKDLENYLAGFRQHSLRNPIVEQVITETLRVVKDIWNKYGNGEKDFFNEIHIELGREMKNPADKRKQMAERNTENENTNLRIKALLIEMLNDSNVENVRPYSPIQQEILKIYEEGVLKSDIEISEEIQKISKLAQPSGSDLTRYKLWLEQRYRSPYTGETIPLNKLFTPAYEIEHIIPQSRYFDDSVSNKVICEAAVNKEKTNQTGMEFIKNHHGQIIETGSGEKVRIFSEDEYQEFVKQQYNKNRGKRNKLLMEDIPEKMIERQMNDTRYISKFIMQLLSNIVREETSKDDGVNSKNVLANNGQITSVLKNDWGLNDIWNDLILPRFERLNELTKTQNFTTYNERYQKYLPAVPFELQKGFQKKRIDHRHHAMDALVIACATRNHINYLNNQNALDKKKSREQKQVAREDLRAVLCDKKYNYDSNSNYQWVFKQPWGNFVVDAKQKLETTVVSFKQNLRVINKTTNKHEKYLNKDGRWLKEKVVQTRGESWAIRKPMHKDTVAGHVNLRDRKIVNLSAAIDKWELLVDKNLKIKIKQLINEGFDKKKIVKFFSDLEYKWMNKDVSKSELYYFSDEKEMLVASRISLDISFNEAKINSITDTGIRKILLKYLELKQNNPEIAFSQEGIEEMNQNLSILNDGKPHQPIFKVRTFEPKGNKFSVGQTGSKKDKYVEAAKGTNLFFAIYQDENGKRSYETIPLNIVIERQKQGLVSCPGIDEKGNTLLFFISPNDLVYVPLFDEKENIQSVDFQNAKKEQAQRIYKMVSSSGTQCFFVKSEVATSIVNKLEFSALNKMEKSIEGFMIKEICIKLTVNRLGNISR

SEQ ID NO: 7447 - protein, 1066 aa, unidentified
  REGION 1..1066: note = Description of Unknown: Cas Enzyme sequence
ASLAKQPFEIKTLNCQFPTRSTRSTKTPKLTMLRLTPELENTLSHNFGGFGMATMQYRLALDLGSTSLGWAMIRLNDKNNPSAVVKAGVRIFSDGRNPKDGSSLAVTRREARAMRRRRDRLLKRKARMTTALIAHGFFPAASAERKVLVTLNPYALRAKGLDEALKPEEFARALFHINQRRGFKSNRKTDKKENDASALKTAISKLRQDMATTGCRTVGEWLHKRDADGQTVRARYRQTKIIKDDGKTRIDKSYDLYIDRAMIEAEFDALWAKQAGFNPSQFTESAREDLRYCLLFQRKLKPVMPGRCTLIPEEVRAPLALPTVQRFRMYQEVNNLRILRDDLREEALMLQQRDKVIEALEANRKRSFTQIKRVLGLGSVTFNLEDVKRTELNGNSTSAELSKDAYFGERWASFDEAKQDLIVQQLVTEENEATLIRWLHAETGVDERRAEAIADAGLPEGYGSLSAKALERILPALRAGVVTYDKAVIAAGFDHHSQISAASTGEILPELPYYGIPLQRHVAFGSGRPEDNDEKRYGKIANPTVHIGLNQVRLVVNALIKRYGHPSEVIVELARDLKQSREQRDEDSKRQAENQRRNTRMREDISGILSISPERVRTADIQKMILWEELSFDPADRRCPYSGVQISATMLLSDQVEVEHILPFSETLDDSLNNKTVAMRQANRVKGNRTPWQAKADFESQGWLYAGMLARAEQMPKAKRYRFAEDAIQRWLKDDAGFLPRALNDTRYLSKVAKEYLSLVCPQNTRAIPGRMTAMLRAKFGLNDVLGLNGEKNRNDHRHHAVDACVIGVTDQGLLQRFAQASAKAREQHLNRLVENMPLPWDNYRDHVARAVENIWVSHKPDHGHEGAMHNDTAYGLMGNGRVSTHKMVDGKRERVEDNLKVIEFSSTNDADRHGYLPNGEPRPYKGYKGDSNYCIEIVRNDKGKWEGEVISTFEAYQLVRERGVARLRHPELSVSGKPLVMRLLKDDVIRVVVDSYIRTTKVCWIRSDTRIALSNVSEANVDARDRDKTDPFTYIVKSASILQKLSARRITISPIGGLHDPGFKE

SEQ ID NO: 7448 - protein, 1274 aa, unidentified
  REGION 1..1274: note = Description of Unknown: Cas Enzyme sequence
MKKILGLDLGTNSIGWALIEVDDKNKPIKIIALGSRIIPLSSDDRDEFQKGQAISKNQKRTIAKTQRKGYNRHQLRKDNLKDLLKELNIYPTEELLNLQSLDLWKLRSDATSSEINISPQQLGRIFYMLNQKRGYKSARSEANQDKKDTDYVTEVKGRFTQLKENNKTIGKHFYDELLIANQENKYFRIKEKVYPREAYLEEFDKIINIQKKKHAFLTDDVIKRLRDEIIFYQRDLKSQKGLVNVCEFEGFEVSYTDKETQKEKKTFTGPKVAPKTSPLFQLCKIWEMVNNISLKVKNPDGSKYKWSDRIPTIEEKEQIVKHLNENSKLSFLDLLTILQLKKDNVYVNKQIRNGLPGNITYTQIQNIIQENKYLQFNLNIIPTTKPAILLDKKTGEILEEKEGLQIDAKIEKEPFYQLWHTIYSIKDLDACKSALIKRFGFSDAIAEKLSRLDFNKQAFGNKSNKAMRKILPYLMQGYGYSQACSLAGYNHSNSLTKDEQSAKTTVDKLELLPKNTLRQPIVEKIINQMINVVNAIVESFGKPDEIRVELARELKQSKEERNDADIQNSNNKKLNEEISKRLASLGLPATKKYIQKYKFIFPVKDKNTKEAQVVNQCIYCGEHFNLSEALTGDNFDVDHIVPQALLFDDSQTNKVLVHRSCNADKTNKTTYDYIAAKGQESLQQYIDRVDSWYKKGILSYSKMQRLKVSHLEYLERKRVKKETEADKKLWENFIDRQLRETQYIARKSKEILQQICNNVTSTEGSVTATLRELWGWDDVLMNLQLPKYKELGKTVIKEWTSDHGKRKHQKEGIINWGKRDDHRHHAIDALVIACTQQGFIQRMNTLSSSDVKDEMKKEIELSAIKFKENLDTLEKYLITKKPFSTRDVEKEADKILISFKAGKKVATTGVRKEKRNGKKTIVQSGIIVPRGALHEQFVYGKIRTIAKDFKTDSLIKFPIKYLFENPNLIADTVVKQKVLERLLAFEDDTKKAIQSLKKSPIYLDIDKTIELTNAHCYKDEFVIKYKLVDLKKEDVKYIVDEKIKKLVKKRLEQFYGKEKEAFKNILWFNEAKQIPIRTVRCFTGLSAIEAIKKDASGKEIGFSIPGNNHHIAIYKDEKGKLIQHLCTFWHAVERKKYKVPYIIKNTKEVWSALLNNEPPQNFLNKLPDDNLELQFSLQQNEMFVLGLSQEEFEDAMKQNNKPLISQHLYVVWSVSYSDYWFRHHLETKNSELKNIEDAKESLRYFRFKSVSALIAKNPIKIRLTHLGEITKIGE

SEQ ID NO: 7449 - protein, 1178 aa, unidentified
  REGION 1..1178: note = Description of Unknown: Cas Enzyme sequence
MRKILKSINNFSVALKLLSNTLIMAKILGLDLGTNSIGWAIVDEKANKIIGMGSRIFPVGVDNLGDGEGELSKNASRTGARGIRRQFFRKRLRKKILLKELASLNMCPLSDVDFDNWKSTKKFPTQELASWFASNPYELRHKAVTEKISIEEIGRIFYHLIQRRGFLSNSRSAGKDDGAIFKGNAKEGKIGIDETRIQIENKTLGSYLYEIAPKDNLPFVDGLERIRNRYTTRQMYVDEFEQIWEHQKKYHSELSDETKEKLGGRKLDGYNEDGILFHQRPLRSQKHLVGNCSFELKKTKAQLSSIPFELFRINQWINTVEYNGHKLNATERNLAYNFLIEKEKPSFKDIRKAIGKIDASFKFNYKDEDKIVGTFTISNLCNKKFFGKKWFDFSEKQQEDIWHVLYFFDNKDKVENYAKENWEFDEIQAKAISIFNLKDGYSSISRKAINNILPFLEMGFQYDIAVVLGGIKNVYGQDWETLNSDDKVLILDNVYEIVRSNLKGGFIEPLKHFLRTELKLTDKQLAKLYHHSVSIEDFKLLDKLPLGAIADKEIQAIRNPVVINALFEIRKLVNELVTQYGKPDEIKVELARNLKASKSGRNEERKRNQKLERENDRVKDELTHLGKHFSHDNLLLYKLWEECKRTCPYTGRSISVTQLFSGEVQIEHIHPWSKSLNDSFMNKTLCFADENRAKGDKIPYEFYSLQGENKWNEVKERALKLFSDTAQYPNSYQKFKRFVQTKFDDDFASKNLNDTRYISKSAKDYMSKICNKVSVSPGQMTANLRQKWGLNAILNPEDKTKTREDHRHHAIDALVMACGTVSHLQKLSEWNRYDRKPENKNFPLPWIGFVKDAEVAVDKILVSHKKLNNTITVRTHKTEKNGVVYRNTGVAARGQLHLDTVYGQNKNCKNDEYVYRVAINSLSFSQLTSILDANLKDVIIKDILKLLTDSEKEIFNKMLSKEKNIEKEYQKNIKEKVDKILKENEFFMPNEGKRYKRLNIIEPENSKRSPVPIKKVRVKKVLGKAEQLGNEIKQFVDPNKNHHVLIYKDEKGNLKEEVVTFWTVVERKRQNQEVYQIPADGTEIVTTLQINDMFLLGLKEENVNWENPDYEVLKECLYRVQKLSSKFYEFRLSKEASIQNNFHPFYIRIQSFGDGKTGWETFNPIKVKISVSGKIQRV

SEQ ID NO: 7450 - protein, 999 aa, unidentified
  REGION 1..999: note = Description of Unknown: Cas Enzyme sequence
RVIYHLCKHRGFHWISRAEEKAAEGDKGEGGKVKQGLAGTKKLMAEKNYRTAAEMVLAEFPEAQRNKQGDYSKALSRVLLGDELKALFEHQRKLGNSFASEKLEASILGSGDRKSGLFWAQNPALTGDKLLEMLGYCTFEKSEHRAPKASFTAERHVWLTKLNNLRIMVDGTTRGLNEMERRLALPMPYQQAGDLTYKQLRAALTKAGFLPESFRFTGLSYASGQKADEKAKDPETGVLTKLPAWHELRKILKDAGLESEWQKISTDALEGKPELLDQIAWVLSVYKEDDEVVTELRKLSLPNAEKMIDALLDIRFDKFSNLSLKALRQIVPFMEQGQRYDEAVANIPEYGHHSQLHKVGAGEYKYLPPFYKERDKTGRMVFNDDMDIPRNPVVLRALNQARKVVNALIKKYGSPHEVHIEMARDLSRPLDERREVEKLQKEFRDNNEKGKAQFAQDFNIVGAVKGKEFEKYQLYREQQGKCAYSVEPIDLHRLFETGYVEIDHALPYSRSFDDSKNNRVLVFASENRNKANRTPFEYLDGKFNSPQWLQFVGFVEGNKAYRLAKRSRLLRQDFGEKESKEFRERNLNDTRYICKFFKNYVEQYLQLHGDSEAKRCVVLSGQMTSFLRTRWGLVKVRGDSDRHHALDAAVVAACSHSMVKRLSDYSRRKELEQVHKGFVDADGVILDLAMFDQIEKHFPNPWAHFRNELEARLKLDDPAMLREEMQRLGTYSEEALQSVHPLFVSRAPQRRNSGAAHKDTIYAQPERFVAQGGVTQKVALSSLTLKDLDKLIDPHRNEKLYAAIRARLEQHGGKADKAFPANNPLHKPDSEGNPTGPIVRGVTMVIDKLSGIPIRGGIAKNDTMLRVDVFTKVGKFHLVPIYVHHTVAKVLPDRAIVQGKDEDEWTLIDDSFDFCFSLHSNDLVRIQQKGKSAILGYYSSCHRGTGNINLWAHDRSLQVGKDGMVEGIGVKTALSIEKFNVDVLGHIYPAPPEKRRDLA

SEQ ID NO: 7451 - protein, 927 aa, unidentified
  REGION 1..927: note = Description of Unknown: Cas Enzyme sequence
MKKILGLDLGTNSIGAALINMPESINDFGKEGNIEWVGSRIVPIDAQYLNKWEAGSKTDTKAASRRIKRGSRRLKQRYKLRRTRLIKVFKALGWLNESFPEDFKKKINNEEDFKFRISDELPFEKSTIEEATKLLGILNKKGELALPEDWIIYYLRKKALTEKISISELCRITYMMNQRRGFKSSRKDLKDENIKENKWVEILRIKEVKQVSFELNKNRNYKFEISVYNDKIKPWIVEKKKKPEWEEKEFTFLITEKIETKKDGTISIKQNNPQIPKEDDWALCVTAQDNQIGEEYPGTYFFNGLVNSVKNKTDFKIRQYAVYRKKYKKELEDIWKKQIELNEELKRINTDKATLQKLAGILYTSQTLANKPKLTEILSNTLLHLISDDIIYYQRDLKSQKSSRGECQYEKREGIEKNEKGEYIKTGKYGLKCAPKSSPEFQEFRIWQDIHNIKILQRLAIIDDYAKVDIDVTKDFIDDNIKEKLFELFDTSREISQQNIYDEINKHKPEANLKNKTHRINMFFNEDKRLQGNETKEYFRRIFKKCNYETEGEKILSDKNKFYKLWNISYSISLNDEEKSKEAIYKAITKKENKRNKDKKITFDFPIYVAQAIASAPDIEATKKYASYSSKALHKLLPLMRCGKFYDETKVADKVKERAKNISTSLELINKNPNRIHEIADDDVQKQLLKSFINKDDLLKGLNTYQACYLVYDRHSERADDRKYSLPSEFNIMEKLPNNSLRNPVVEQVIRETLFVVKDIWEKYGQPDEIHIEMGRDLKKNAKEREKATNNSKKNFEEKQQIKKLLYELLNDGFEQYENVDDDITKFKIVSTRFEVKPNPNNPTDIDRFRIWKSTSELRDNDFEKKVKDEKIPKNQEIKKYTLWLSQKCVSPYTGKIIPLSKLFDQSLYEIEHVLPKAKIKNDSFDN

SEQ ID NO: 7452 - protein, 1079 aa, unidentified
  REGION 1..1079: note = Description of Unknown: Cas Enzyme sequence
MQKENHPYTLGLDIGMASVGAALLLPDSQRILALHVRTFDKAETAKEGESLNKIRRDARLIRRRIRRRVHRLVRLARLMKRHGLIDAATPESFALPDTSPWTLRAEGLDRLLEPKEWASVLYHLVKHRGFQSNRKSEAKADEKAGQMLSGVSRNQALLKETGYRTMGELAAKHQAFEYAKRNKGGAYTHTFARADIEAELALLFERQNTFGCRFASADFYVAVRDLLLARKPTLSGANLLKMIGKCTFEKSEFRAPKASYRAERFVWLGKLNNLKIVGGGDARSLTDAERRLIIDLPFTQAKLTFKQVRKALDLEPHQRFNLLSYRFDPKGRDKDPEDATLFEAKYFHTLRKAYEAAGLKTEWQRDALDPERLDALAYALTCYKDDAEARDWMTAQGIQSPIIEAVLNESFDQFIQLSQKALKAILPHMEAGERYDQAVKSAGYNHSQPDAAAEKQKTLPAPDKDIIRNPVVYRALNQARKLVNAIIARYGPPAAVHIELARDLSKPWDERKKIEREQKEFQAEKEKAFADFEDRFNFRPKGPDLQKWRLFREQLDQCPYCQQALEVDRLFEPGYAQVDHALPYSRSFDDSMNNKVVVHTKCNQDKGNRTPYEAFDGANNSEHWQRFAAWVQSNKALRQAKRNRLLRVNFGVDEAEEFRDRNLNDTRYICKEFKHMIETHLAWHPDSTADNRCVVLSGQLTSLLRARWGLIKVRSEGDLHHALDAAVIAATSRSLIKRMSDYSRREELEQVRNRYIDPETGEVLDLSALRQIEADFPKPWPHFRDELLARLSANPSQQLERLANYDAATRASIQPVRVSRAPTRRGLGAAHQETIRSVGKAGKLLAEGLSAIKTPLASLTLKDLDNIAEQRDTALIEAIRERLMAFGDDSKKAFAPNQPPLRKPSAEGKAAPIIRSVKLLATQKSGIPIRGGIANNGAMLRVDIFTKAGKFHAVPVYASDAVKAELPKRAVIAFKPEEEWTLMDETYQFLFSLYPNDWVCILYKNAPLREGYYSGLNRATGTVDLWLHDRNQTQGKKGMLEGNGIKTALAVEKYHVDLLGGLHRVHHEERQPIHRKHSR

SEQ ID NO: 7453 - protein, 1398 aa, unidentified
  REGION 1..1398: note = Description of Unknown: Cas Enzyme sequence
MKKILGLDLGTASIGWAVVNEAENENERSSITKLGVRTIHFDNFVSTESGKESKEPEKDFISGKGISPNAGRTKKRAARKNLQRYKLRKENLIEVLKENGFISDETIFSENGNKTTFETYRLRAKAVTEEITKEQLVRILLMINKKRGYKSSRKAKSQDEGQLIDGMEIAKKLYQNDITPGQYVNQILNEGKNYIPDFYRSDLQYEFDKIWEFQKQFHQDILTDDFKRQIVGKGKTNTTKIFLARFGIYTADNKGGDRRMQAYQWRVDGLFKKLTKEELAFVISDVNGIISNSSGYLGSISDRSKELFFKKQTVGQYLMAQLDYNQHTSLKNQIFYRQDYLDEFNTIWESQAQFHKELTIELKEEIREIIIFYQRRLKSQKGLISYCEFESRPIEVEVDGRKKIKTTGSKVCPKSSPLFQEFKIWQILNNIQVIDKTEAKRFLNQEEKDILFHELNIKDRISKNDALKLLYRNYKDLDLNFRDIEGNRTQSSLYKAYQTIIELSGHGKYDFSKMRTAEITEIIEPVFKSLGYNSAILKFNSNLEGKEIENQPMYQFWHLLYSFEGDSTITGNEKLLSKITELYGFEKEYALIIANVTFQSDYGSLSTKAIRKILPHLKDGFAYAGRKENQEEPSACEYAGYRHAKNSLTKSELENKILKDKLDILPKNSLRNPVVEKILNQMINVVNATIETYGKPDEIRIELARELKKSADEREQLTNAINKTTIDHEIFKEILQKEFGLTYVSRNDIIRYKLYKELEFRGFQTLYSNTYISPNKLFSKEFDIEHIIPQSRLFDDSFSNKTLESRSVNIEKGNETAIDYITTKKGADGIEEYLNRIAELFKAGKISKTKYNKLKMKGADIPSDFINRDLRDTQYIAKKAKNILEELVKDVVSTTGSITDKLRADWQLIDVMQELNWDKYDKQGLTETIENREGHKIKRIIDWTKRNDHRHHAMDALTIAFTKRSHIQYLNNLNSRSNKSGSIYGIEAKELYRDDKGKLKFKPPMPLNDFRAEAKKHLESTLISIKAKNKVCTINLNTTKKKNGVNKKKQLTPRGQLHLETVYGSIKQYKTKSEKIGASFNEEQILKVSKKKYRELLLMRLKEFDNDPKKAFTGKNSLEKNPLFIDDFHTQKVPERVILVEMEPIYTIHKDISPDLKIEKIIDSKVRSILESRLKAFNGDSKKAFSNLEENPIWLNQDSGIAIKRVSITGISNAISLHDKRDKDGKLILDAEGKTLPVDFVNTGNNHHVAIYKDENGNLKENVIPFFVAIERASQGLPIIDKGYKKEEGWEYQFSMKQNEYFVFPNEINGFNPIDIDLFNPDNYCLVGPNLFRVQSISSKYYIFNHQYETKNADGTLFKTKKQLSGITYIFFQNEKWLNGIVKVRINHIGQIVSIGEY

SEQ ID NO: 7454 - protein, 1560 aa, unidentified
  REGION 1..1560: note = Description of Unknown: Cas Enzyme sequence
MENILGLDLGTNSIGFSLRNPNINSDIIQQFENYGSTIFKKGVGSEKGVEFSYAAKRTQKRSIRRLNQSRKYRIWETLDVLMIHGFCPITEDELNQWRRYDKAKGLNRKYPADAVKFEQWVKLDFDGDGKPDYTSPFQLRKELATMLLDINEEINKYKIGRALYHIAQRRGFKSSKGETIKEQEKEAEEKGINNDIEITIDLKKSEKKIAGKIEDYIEKQKGKGIEIKTVGWALAELENAGERIRENWTPIRLQYENEIKYIFEFQNQLTTESEFYAKIHKAIFYKRPLRSQKGLVGKCTLEPTKERCPVSHPEFETFRAWSFINNIQFRVKDIENGGWINLKQEEKEAIFEHCFLRTKANFKFEEINEFLTKRLNHHYAYNYKDKTNVAGCPVSARLKNLFGEDWRSYKFDSTQSRTDKKGNSHIIAYSIDDIWHVLFSFEDEENVRDFAENKICLGDKSKAFLNLWLAIPQGYSMLSLKAVKNINRFLQKGLIYTDATLLAKLPEILGNDLWNENEEFFLTHIGELTAENRIQRKILNITNNLISQYKAKSIENNEQFAYKNTNYFLDKSDLLEIENQCIDSYGEKTWADKMTEEERLHIKSEVETYYKEFFSSSKRDYFKIPKLGDTIKEFIVGKFDFLLCKNTDRKKDETCSCSACKKVNLLYHPSQIAIYAPAKEQSIEYNNLTLSLRLLQSPKTGAFKNPMALRTLHELRKLINYLLLEGEINEETRIVVETARDLNDANMRWAIDAYQRQRESENKEYELAIRELLNDSDFNGNANPSNNEDIDRMRLFVDQYDIPEYGKLVAVAEPNVKSKKEKKKIEKAESFNRSPEFLQKIMMEKDLVKKYRLWKEQEFRCIYTGKTIKITDLFADNIIDFEHTIPRSISFDNSLENQTVCFADFNRNIKKKKIPYQLSNHAEILARLNNWKAKIERLQDNIEFWKLKSKKATDKDNKDYVIRQKHLWQMELNYWKGKYDRFTMKEVTSGFKNSQLVDTQLISRYALHYLKSVFSNVDVQKGSVTAAFRKIIGIQDEYEKKNRDQHSHHAIDASVLTLIPKAATRDRMLELFYKKQENKDMINGNKNPIEVAYLKAENGKIESDLQFEIRKCKIGSANKIVETIEDNIIVNAITNDKTLSPARKVLRKRGKIVPIRDINKQPVYITDANGNIKYLTHKDGNLIYKRDEKGQFIFDGNGNKIPIPIVEPKIVTGDCIRGQLHEESFFGAIKKVKRAGNNKPILLDGKFVFEDGLYYVIRKDLKYKKNANDAGFQTLADIKKDIVDPNVYEAIRKQVESAGNSLKDAIEKGIYMLGKDGAPMKYDKNGKSLSKIRHLRVFVRSTEPLTIKKQTYFSNKPLIHLQNREHKKFYYANNATTPYYVLYQGVIKDKIERKFEIINLFDAARLRNKNKLDVQVYVCSDKKETIKIDLHAILTIGQRVLFYKKEPIELKEIDKEELGKRLYVITGFEKDGRIRFTYHSEARDDKKLMEAFPEKGLDKVGKEYGKSGKNGFSSINWEVPWPKLKLSIGNLNMLIEKIDFEIKPDGEIILKEKNTWSWKR

SEQ ID NO: 7455 - protein, 1112 aa, unidentified
  REGION 1..1112: note = Description of Unknown: Cas Enzyme sequence
MKTLSLDLGVTSCGFSVIKSNEKNSYALDDFGVVMRDNPNDSGTQKERREHLQSRSLKEKKRNRVKEVKTLFKMAGLTYKEKTNYDIWHLRAIKAFSEKLSNDELFAIFRYFCKHRGYKSLKIEDLIAEIESQEKIGDCESGDITPPKDLEKFSDTLAYLDALKCKYKEKTVAQIIWEIESTSPTPTFRNHDNYRYMIRREDVSKEIKKIVRSQHAFGLFDPLLDAESFIHSIKKIILNQTPVRLNDALIGNCTIYKNEKCAPLYSLSYDRFNAYKLINDLKIGNVSANAEQKERLISYINTKITESKNLLGLTVKELKTILGIHDETLKLNNHGEYRTIKGKKEQNYLIKFSFISKLAKFDPDILKPLLSHPDRDQLFDRIATIIQRNINPEDMLNAFKDLFETIRIEMNDKAIQTFALSLFKEKKSGTGNYSFKALSELNRLLVDGKNETDAKILLGVSSSENYESFPKGIKYLHVNQYEKDESTISNHIVKSIVSWAIRIIKDLHDKYGPFDQINIESTRELSQPEEVKRQIKSSNDANEKEWQDLILKYTPHATQKGINLSQSPSYILKLKLWEQQKFFGIYSHQPLGIDDILSEKTEIEHIVPRACGGSNAEYNKAVDLKNENMQKGNRLPLDYLHDDRRSVFIGFVTELKESGLINWKKMKNLLAESLDESYKEAKDTISLHATSYAEKLLGEIIKRYYPFLDETKRRNGIGVMHISGRATSYLRRILSIENKSRDTNFHHAEDAIILGMMSRGYLQNISTNFMENYAKTVQEAKENFKKIVPLINGAHPNEIFAHLRESYNHEIETNPFYRSLDGSFRVPSYWVSKKPIGTKAHNETIQSAKNFAYYVPISTLLGRIKPNHKMHPDDFKKNYDSDVLEKLQVFHDNPKDYTVKVFIARRNEIIEILNRANFITSKDEQSDIDKALRSAYNAPMLDVNGNPMRRIKRVGEEASIPIRGGVAHTAPSLVSMRCEYVNTSKLDLKRIDIRAFSSSAQPSAHQIDIFNNDLIEVFVNKSKSVELKVVGILKGFTESKGGRANIRNPKYPSLKDKQPKAYHTEVSIGSICGIKKYKTNATGKVLGYYYLGRIIEEVVELFSPVVAYRKLL

SEQ ID NO: 7456 - protein, 1106 aa, unidentified
  REGION 1..1106: note = Description of Unknown: Cas Enzyme sequence
LRRSLLVDILIKNNMFPDETLKRLPKMQLWELRSKAVKKSISLIELGRLLLWLNQKRGYKSSRSDTNLDKKDTEYVVTVKNRHEKIKDQNLTIGQYFYRELSQDEFFRVKENIFPRAAYIEEFNAICKRQQLEHPQTLTDKLIDKIRNEIIYYQRPLKSQKGLVSVCEFEGFWRKAKDSKDYFVGPKVAPKSSPLFQLSKIWENINNIKLGSRTGGEIVLTLDQKLALFQHLDNNEKLTQTDLLKILDIKKENCYVNKQLVKGINGNITKHAIRQCLVNTPKYEHLFNLKLNIIETGVEGYLYDAKTGEVLESKATKIIDPLIEKQIFYQLWHTIYSIQDQIECSKVLQNKFEIEKDVADKLAAIDFSKYAFGNKSAKVIRKILPYLMEGDRYSEAMSYAGYNHSNSLTKEDNLKRKLSDQLKPIAKNSLRQPIVEKILNQMVNVVNAIIDKYGKPDEIRVELARELKQSKEERNDTDKFMGKRQRENEQIARRLAEYGLRATRNNIIKWRLYEEIDNEEKKLNAICVYCGQPISLLEAIKGNDVDIEHIIPKSKLFDDSQSNKTLAHRHCNKDKNDRTAYDFMSSKPNYVFNEYVERVNSLYSNHVINRTKRDKLLMTESKIPDNFIDRQLRESQYIATKAREILQTICHNVWSTSGTVTAELRHLWGWDDVTMNLQMPKYKEINLTEFVEWESDHGRSKHKKEIITGWTKRDDHRHHAVDALTIACTKQGFIQRFNTLAASKTREDMKFVVDNRSIQFKEKLSLLEKYLIGEQPLSVIEVETAVAGILISYKAGKKVAVLGTRKVGKLGNKKVVQTGIVVPRGQLSEESVYGKIKTIEEKKLPYLFENSHLIVKPHIKKLVEDRILKFDGDFKAALSSLKKQPIYLDSKETILLEYATCFKDEYVLKYNVDINFSKVDKVIDSAVKKILQTRLDKFGGKAKEAFKDVQREDKSITKWYEDEGLLRPIKSVRCFTGLSAVVPVKKDEQGNDIGFVKPGNNHHIAIYLDNEGKKFEHVCTFWHAVERKKYGIPVIIKNASEVWDKIQMQPDGTYPESFLEKLPDIKWELSESMQQNEMFVLGMTHEDITEAISNNNYQTISDKLYR

SEQ ID NO: 7457 - protein, 921 aa, unidentified
  REGION 1..921: note = Description of Unknown: Cas Enzyme sequence
MKLNTYIGLRAIAYVLTEGEDIIKYGIKRVNVSFDDYYEFIAGLPVSKRINRRMKAQARRNLWRYKSRRNNLLRLLEMHFGCKPQHLTRTENLQLRVKGLTEKLSNQELVNVLMQLQKKRGYKSLRGVNDSNSDYLKEIERHEEELKQYPSLAAYLLTMDSSKNVIVTRKSYEREFNKIMDRQQIDEKLRKKIFDIIYYQRPLKKPKVARCKYESNRSVCHASNPIYQTFRIWRDVMNIVIYDAEKNELEISFEQRKRWFEKCNAGKNLTKASCLKDLGIKRPAQYTWYSGKVIAGNPINKVFSELKIEADYYELWQDIYSATDNERLGRLLADKYKLSDTVINELLDLDFNKLGWSDYSMKAIRKLLPLMQQGKRLKEAILDVYGKVAMGEVALRNVVLEQHFESYKALVEQLKSKYPITEYQFEIDHLLKQSNKGRKEIAQSRRKEEKLAKQYPELSQYDRIKLQLWEESGGISPYEPDVIIDRSQLFTDQYNIDHIVPKSKLFERSMTNQVLCRAELNKLKDRMTGLDFAKHLGIEEAYRKAVEKFPESKKELLLMSEADIPTDWLSRRQNSDYNTRCFATIGNAVNIPNKLISRYMKEWKVDSYGEQDARHYLCKAWVMANMSQDTVNYFDSIKQHSESNDSVSVYAIQPALASIDFENAPVFIPRIKFVRKTKFGFTPRFALHKESMYGRREIKSRNAKGEIVEQEYFKIRQPVSKLTEAMIPKIMDKAIREKIQARIAEKSNHEDGILSLIENPITHNGKPVKRVSVAQNAEKIFALHSTDGSGRTYRYKDFERKIDYVFSDKNYCLKVWIDEKGKVKKEAIALIQHIDQLNEGKTIEPSFMLFENDIIELNGRRWFVVGAAEALSLRPIHILSATDTHKIKADEWLKIKKVEVNQLGETLRSYGIENCKQLSLG

SEQ ID NO: 7458 - protein, 1166 aa, unidentified
  REGION 1..1166: note = Description of Unknown: Cas Enzyme sequence
MERSLGLDVGANSIGWAVIEQTDSSGSIRGCGVYVFPEGVENLGQGERELSLNATRRGARQRRRQLFRKKLRKRALLRLLIEHGLCPHLSDDELRHWQKTGAFPDRDDIRQWLRLNPYQLRARAATGEPLQLHELGRIFYHIAQRRGFPSKSRSASADDSSVIERGDPKLGKAGIEQTRALITPERPTIGAALAQLYPPEGEPFTNGRSRVRNRYTDRQMYIDEFEHIWNAQRPHHPDVLTDELKTALGGRRKDGYPTDGVLFFQRPLRSQKHLVGRCTFEPSKPRCQRSHPLFERFRALQFITTITCNDLPLDADDRAKALRLLLSKKKVTFADIRKALKKTAADDIFNYADEDSIAGSPTNAALAAKNIFGAAWFDKSDDEQHRIWHALQSFDDIDKLAKYATEKLGLSNDAAQRFAKISLTDGYASLSLKAIRTILPFLEQGYPYHIAVALAGVRRALGKKWDELDDEQRKTLCDTVESLVGSGIRGGYRAALEQLLREQYGLGDQEIARLYHHSDLTATTQLLDRIPTDEQFTAQLLAYRNPIVTNVLFALRRLVNELLQRYGRFDRITIELARDLKRSKAERQAIRREQQRNEIIRATIADILAREGIEATAENILKYRLWLECGKTCPYSNRPIGFHQLFNGEVQIEHIFPYDRSLDDSFLNKTLCFADVNRQKGNRTPYEYFTQNFGPDKWNEVKHRLQGVFRRQSLWDKNDPLNYFPDRRKKYERFIAEKLPADFAARQLNDTRIASVRAREMLQLVCPTVTAALGPTTARLRRFWGIENVLDTGSGSDGKERSDHRHHALDAIVLSCTRQSHIQLLSTASARTQRHHKPIPEPWDRFRYDVEHALQGCVVVHHRSDRVLTRRTVTTQKNGKTLVFRSLAARDQLHKETFYGQRTDPETGTIGYHVRKPLQEITKQAQVEKIVDPVVRALVEQRIAEAGGYQGDAVPKGAFFGTSPDGSPQPLVFLPNRRGEPVPVLKVRLRESLANARPVKPDINCYVNPSNNHHAVVYRFPDGQLGIEVVQFWDAVFRQRRGEPLYQVPAGCELVMTLHINDMVLLGCSQEDFDRILAAYPPDERGRHLAPYLHKVQKLSQSSPKQWELCFRHHADARPVDEAKHDYILIRNWGTGKQGWETYNPIKLRITPSGMIFRWGELPDVP

SEQ ID NO: 7459 - protein, 1453 aa, unidentified
  REGION 1..1453: note = Description of Unknown: Cas Enzyme sequence
MKKILGLDLGTNSIGWALVEQNFDEKQGKILGMGTRVIPISQDILGEFDKGNSISQTAERTGYRSVRRLRERYLLRRERLHRVLNVLGFLPEHFAEQIDFEKRLGKFKDETEPKLAYNDKQFIFQNSFNEMLADFKLHQPQLLHRKNRKGKDAKIPYDWTIYYLRKKALSKKIEKEELAWILLNFNQKRGYYQLRGEEGEENPNKRVEFYSLKIVDVKADEQQKGKDDIWYSLILENGWIYRRSSKTPLFDWKDKTRDFIVTTDLNDDGSIKTDKDGNEKRSFRAPGENDWTLLKKKTEQDIDQSYKTIGTYIYDTLLKDPNQKIKGKLVRTIERKYYKEELKAILSKQIEFHPELKNESLFADCIRELYRNNENHQHTLNGKGFLHLFLDDIIFYQRPLRSQKASISNCSLEKRKYKNADGKDQVVALKAVSKSNPVYQEFRIWKWIFDLSIYRRNDDVNVTNQFLKSFENYERLFEELSSRKEIKQEALIKYLVEQTGLKGKAANTEAAKYRWNYVEDKTYPLNETGVMITSRLEKVESLPNNFLTKDKEYQLWHIIYSITDKTEYEKALKRFAQKHKIHVRSFVENFKKIPPFKSEYASYSEKAIKKLLPLMRAGKHWSWEAIDANTRDRIEKIINGEYDANISDRVREKAKSLTEHYHFQALPDWLAKYVVYGRHSEASDITKWNNPDELKKYVEEFRQHSLRNPIVEQVVIETLRVVKDIWEFHGKGVKDYFGEIHVELGREMKNTAEDRAKITNQINENENTNLRLKALLIEMLQQGDVENVRPYSPTQLEILKIYEDGVLNSNTEVPDDILKISKTAQPNSKELLKYKLWLEQKYRSPYTGEIIPLNKLFTPAYEIEHIIPQSRYFDDSFGNKVICETAINKLKDNQLGLQFIKTHHGEVIETGFGKTVRVFEEDAYLDFVKKNYAKSPSKKAKLLMEDIPEKMIERQMNDTRYISKFISSVLSNIVRSEKDDDGVNSKNIILGNGKITSQLRQDWGLNDVWNDLILPRFERMNKLTKSAGFTVYSKNHQKYLPSVPLEFSKGFQKKRIDHRHHALDALVIACATRDHVNLLNNHHANSETKRYDLQRKLRKFEKVKYFSKKENRDIERDLPKDFLKPWKSFTEDAKVQLETIIVSFKKNLRVINKATNKYEKWIEKNGVKTKELVSQAKGDSWAIRKSMHKDTVSGKVELPRIQVPKGKILTATRKSIDTSFDLKTIKSITDTGIQKILKNYLLSKDGNPELAFSPEGLEDMNKNIEKYNDNKKHQPITKVRVFELGSKFHVGQIGNKKKKYVEADKGTNLFFAVYLDEEKKKRNYETVPLIEVIEHQKWRATLPKEVQKQTPMIPLKPEQGKFLFSLSPNDLVYIPKEGEKTNKENIKPNDIYKVVSFSGNQCFFIRHEVATSIVNKAEYSTLNKMERSIDGTMIKEFCIKIEVDRLGNITRTF

SEQ ID NO: 7460 - protein, 994 aa, unidentified
  REGION 1..994: note = Description of Unknown: Cas Enzyme sequence
VQEETLMAYTLGLDLGTNSIGWALVDHNSEGVPCGIKACGVRIFQEAVDAKTRTPKNRARRAARMARRLVARRKRRRENLLRLLVNNALLPPDLPSAAGLESRYNALGDPYELRRKGLTQQLSLHEFGRVLVHLVHRRGFQSNRKARPKEEGDIKQAISQLQQEIQKFGCRTLGEFLAGQKDKKRARYTSREMYQQEFNALWDAQRTFYPDVLTKELKVAAHNIIFHQRPLKFKSLSAGKCTFERNKFRAWRAWPAAQRFRLLQDLNHLQIKSPTTRNYRALTEEERKRLLRLLETQKTVSWDGARKALKLHEGELFNLEEGKRDKLLGDQTAYALRMILGEQWDELSDENRQALACDLLTIESEAGLLSRLHAHWRFGEETSEQLAKVEFEPGYLRLSLKAIRKILPYLERGLTYDKACTEAGYGHAANSAGIAAPKLGNPPQIRNPIVLKALWETRKVINAILVRYGRPGVIRVEMARDMKLTKRQKEALEKQNKQNEKLNRQAEDELRTRGIQQPSREDKLKYRLWKEAGEVCPYTGATISLAMLFSTEVDIEHILPYSRTLDDSYMNKTLCLAHENRDVKQKRSPFEAYSADPAKYESILQRVRSMPWPKRRRFEQKEIDTEGFISRQLNDTRYICREVKDYLATLGVAVEVSKGETTAWLRHVWNLNQILAESGSSEKNRNDHRHHAVDAVVIALTSRRLFQHLSSLSAKTNGPLILRRLPVDTPWPQFRQDAEQRIRAIVVSHAATHKLRDAFHEDTAYGYSKHNQCFVYRVPLDGTITDGQIERIRDKRVQELVKTRLKEFGGDKKLAFGNPASPVRHGENGPPIRSVRIEAPVSRQSVFPIRDRAGSDYKFLKFGNNHHVEIIKQQGTGKRKGIFVTTMEAARRARIAKLPIVQRTPPWQDQNTTFGEDWSFVMSLCPNDFVAIEENGASKVMRVQKLNATNGNIVFRVHTDARTEQDTEYRKSASALTCTKLQIDPLGNIQSAYD

SEQ ID NO: 7461 - protein, 1072 aa, unidentified
  REGION 1..1072: note = Description of Unknown: Cas Enzyme sequence
VNRGMERLNEHIKEFVPSLRLGLDIGEWTGGIALVRGNEVLHAETYTDHHATTLKDRRTIRRGRRTRRAKKMRLARLRLWILRAKLPDKSRLPDPYLLMSRKEYQHPPAELSQHHPVHRESEAFFTSPWSYAVIQGIRRDPQAFVLALTHIFQKRGYKYDTRSIGDLTPDELMEFLKSCCLLEKAQALRDELEKKIRKLEEEEEAATGGQNKSRRKNKRRISELRQELKNALTRPPEPRKALPRQMKEEELRQLVKAFGDSAGLSEQTVREWQDQLIKLLNKVIREPRFDNRVISGCSWCGKNTPRKSRPGVRELAFKAAVQNIRKDRLMPLSEEEKREFLGLFRDADFKEKSLKARMSRFEGLLKRHHAQVDMASQLAELCGKEAPKGRTSLCLQHLKMQAEGAFKCNRHPGWICKMGGPDDGHTRLELLRDEGPAERLARNPCREAHEERVIRRIEQILFNPDGAPRFGEIPRLISIEFPKPNTAHTDRCPYCHEKLAIDPTAKEKINPPYKLYRHKEKDSFFHCPACGGPLTIKGKKRNPKTNKEYTYEFSDQDAFLRKAKGGMKEKKKREYLKETKGLCVYCGKKIEDISGMEPDHIFPRSRGGPNVDSNLVASCLDCNKQKGDRTPWEWIGGSSDWESFEKRLRSLPLPQRKKEILLSREEYYPENPTALARATARKRAFIARLSKMLEAHGVSRDQISLNYERDKKVVIQTVEGWTTSRLRNSWRYHEDGSANFPPKQDWNLHNHAEDAAIIAASPPHTWRESVFVETRPIDDPERPVPGLCPRSLAPNWSAYFERVAHTRPLVTVLGDYRSDWKRTFADLTYFSPRFAGKKRTQRVSIEDLKAKRFRDVVDRKIREKLEALKEKYVLSEKKGLPPEAIEELRQDFPGLRRVRIGQQPGGAIITVTPRDGPPRLVQVKPGADGAIFWLMPGRTLQTARDRDFTISLIRPAPLKELKVSPLIDPEIKEGATVVAEWHRYDFVYLPAIKGQKEGWYQVKELSGSGIKLLPETAIRKELADRMGLTSPASAEDTEEKSEEGELALGKNDLLTVLRWEHYQLRPHRATKL

SEQ ID NO: 7462 - protein, 1529 aa, unidentified
  REGION 1..1529: note = Description of Unknown: Cas Enzyme sequence
MSNKILGLDLGTNSIGWAIRDIDSNYENQIVDYGVIVFEKGVGEGKSGEFSLAAERRKNRSKRRLYNAKRYRKWELLKLLINNQMCPLSNDELRLWSIGDWVDENGKMKNKGRKYPSSPDFIRWLAMDFEKIGQPYVENEKLKPEFRNPYELRNFLLENNNDGSQKRKYQIGRALYHFAQRRGFKTSRKSGKSTYAENKEIENKKTENPNYQIANYALEKLNNNHRFRASGVIQRKYYEEEFISICQKQGLDETLTQQLFNAVYYVRPLRSQKGLVGKCTLEKGKARIPVSHPLFEEFRALTFINNIQWRETNSNKPFEPIPIELKKSIFEQLVFRKIEKGKDKGKVSEESFFKFEEIVRKFSENYKFEFNYAKYNEKKLKEENKYELISNPNVPACPVIASLMNVFDEEWKEKFITNNNRFGIHWDGLTLEYTVQYGNSKGQKRKLNYEGIWHLLFDYLQTKDDAEGLKNFCKEVLQWDETKAEQFSKINIEQGYGSLSRKAISKIIPYLQEGYIYSEAVSFANLSEVLGKETFDAQKDDIKKAIADTIHQIDREKEKLNIVNGLIKNYFGEQNTIKAKGLDETIKEIAKDEVERKLKNYFGETNWQSKTENFKKEYFDFVLEKYLTFLDGKQKPEEKASYRLGKSPQIDYYKLPRLDEAIKKTLKEKFGATDARLKRLYHPSDIDIYPKSNKTKKVIDTDTGEIKEVPQLGDPMPPSKAWKNPMAMRTMYELKKLINYLLEVGKIDVETKIVIEMARELNDSNLRKAIEYWQNDRNVENEEFKKEIIEILGKKELSDDDYNKFRAAVEQYILKLSEMDEKKYNEFIRLAFEKKNKKEDVQTQSTNKEESQKDEKDVVISNDYITYLLLYRKGFVKLLLDQPLGIGRILNPVKDFKNKLKSIKEMLDKYRLWKEQKFQCLYTGRFISFTELFDPTKCQIEHTIPRSISFDSEMKNITVCDAVYNSEVKSNKFPTECTNYEKTFRCRTAEGEKDCTPIKERVERIIKPKVDELKARIANLNEASKKIPSWDVDRKNANIRLSHYLKFELDYWQKKYQTFTVKPEDWKDQWKNSQLVDTQIITKYARAYLKSLFYHIDVQKATIVNEFKKIYQIQNDEQKDRSRHSHHAIDAAVLTLIPGSAKREEILKQYYQALEQKQKFHTKPYDTFDANHVLTIDENILIYHATRDKTLTPTRKKVRKRDKVLLTKTGKPMVMQGHSIRGQLHKETFLGAIKVVERNKEGFALKENGKYVIKKNKNGKEEIWKVARVQIKELKKEDFDDPKPGKEYIVDELLRKHIKKQLDNGTSLNDVVDFQGKKIRHIRYKNFVQKTFDVKQHIFLSKQKHKQFTYAQNTQDSGNYLYLLHEGEVEKKVKKEIRKEIIREAKIISLFDFCKLGFSSVKQIWNDNGLNITENNIPLKYIIKAGRKALFYDKSKEELKDLDRKALQNRLFKVYKFNEIGSPYIYLQNHIEARSEKELENLDKGKDGYTKFDPNIFQYRLKLKCDKLNCVFEGNEFKIKPDGTIVFNF

SEQ ID NO: 7463 - protein, 1019 aa, unidentified
  REGION 1..1019: note = Description of Unknown: Cas Enzyme sequence
MRIWGFDIGTTSIGFALVEHDPARGTGRIERMGVRIFPEGVTDKKEPRNKTRRVKRLMRRGVRRRKLRRRLLNETLASVGLLPKFGAPEWHQAMAADPYLLRRDGLTRALQPFELGRALYHLAKRRGFAGRKFEEAGDKKKKDPDEEAAKEDAARLAKEKGELTLGAFLASQPKKRGRHHTREMIEEEFERLWTAQKAYHPILHDAKFEARIRNLVFYQRPTFWRLNTLSKCQFCPDDLPEPKGTWLGQEFLLLEQLTKLRIAGANARPLSDAERGLLREHLHQHKSATWNGVRKVLRNHWRERGEPEDQRFNLEVSGAEDKLRGNAVEVELRKIFGKEWDQHPNRDEIRRNLYAYLWTADYLQVGNARVEIRRDEDARAQRRKARDEMQHRWSLSDKEADALAALNLPPEWLGWSHTAVAAMLPLMEQGHGVGELTRSPEWESWRAHTFPNRTRPTGQVLDRLPSHPRAMPELRNPTVQRALNELRKVTNNLLRLYGRPDVIRIELTRELKKSKQARSERLSRNEERKSERRRAITDLEAHGIANPSRDDIEKWLLWKESNERCPYTGDHIGFDALFREGKYQVEHIWPRSRSLDNTFANKTLCRTDINILKGKRTPYEVWGHDPHAWHALKQRLADCRLPEHKVRRFIKDMIVEAGTEEFADRQLADTGWAARAARDFLKRLWPDDGTLAPVETVNGRITAQLRHQWGLDSVLNPNGEGKTRADHRHHAIDALTAALTTRAFVKRLSDWYQVREIGVRPPKFERPWLSLLDDAKSKVEQIVVSHKTRRKASGPLHDEKVMGDTRMEEKSRGVVYRFFVKRKSLKDDLSQSEIKDIRDRAVREIVERGGDPKKAFPPYPRLPNARGDHGPEIRRVRIYVKKQPELMEPVGTGFAFAAANHHMAIYRMPDDTIDGRVVSLYEAARRLSRRQQIVQRERGDGARFVMSLCPGDTLEFPHESGSSRYRIVQSIWSNRQVVLIDHTDAAGESKNQPGIASIIRAGARKVSVDPIGRVRPARD

SEQ ID NO: 7464 - protein, 936 aa, unidentified
  REGION 1..936: note = Description of Unknown: Cas Enzyme sequence
INENEDGKKEIIGMGCRIIPLDKDESDEFSQGNKITKNQKRSTKRTQRKTYYRYTLRRTALTKELQKNGMFDPSLFNLPQLKLWELRSKAISEKISLKELGRVLYHLNQKRGYKSSRTEENKDKKETEYVSEIKNRWEKLKEENKTIGQKFYEELLKNPYYRIKQQVFPREAYIDEYNRIMNKQKEFYPDILTDNLIKHIRDEIIYYQRPLKSQKGLVSTCELEGFWIKNKDGKEIFVGPRVAHRSNPLFQVDKIWESINNISIKNKYNEIFEISLDKKLEIFNYLDKNEKITQKELFKILNIKNNSGWYGNKMLSKGIQGNIVKCLIKNAINNKELEEKWLRFELKINTLNKETYLVNKETGEIISSMNKEEVSADFENEPLYKLWHTIYSIQDIDECKKALIKKFGFDEKTAERLAKIDFSKFSYGNKSIKSIRKILPYLMKGYNYSDAASLAGYNHSFTITKEEITNKSLIDKLPILSKNSLRQPVVEKILNQMIHIVNDIIDDKRGWVTREERLNGQFEIRIELARELKQSREERNETFKNLSKIERENKEIEKRLIELGVRPTRKNIIKYRLFTEISEDKINATCIYTGKKFSLSDALNGNNIDVEHIIPRSLLYDDSQSNKTLTFSEVNQEKDNRTAYDYMKSKGEEAFNQYIERVNKLFQEKIISKSKRDKLLTPSNKIPKDMIERNIRETQFITKKAKEILSQVSKNVWTTTGEVTSILRKLWGYNDIIMNLQLNRIKELVPNPIEEGITEIVDIETNDGQIHKKEVIKNWTKRDDHRHHAIDALVIACTKQGFIQRINTLSAETTRNELYEEVSKQSKEFRDKLTLLEKYLILQRPFSTDEVSKKVSQILVSFKPGKKVATYGKQLIRKNKKTICLKKDVLVPRGPLSEESVYGKIKIIEKNKPIKYLFENPHLIFKPYIKELVEER

SEQ ID NO: 7465 - protein, 922 aa, unidentified
  REGION 1..922: note = Description of Unknown: Cas Enzyme sequence
PAGEVQAALKKLDLDLAKIYPPHPGVPYTLRAKALDAALTPFELGRALYHLAQRRGFLSNRRAPVKDDEEAGKVKSGIESLNGAIRAAGARTLGEYFSRVDPHQKRIRNQYTDRKMYLNEFDAICAAQSVHHAETLTPEFQKELKLAIFHQRPLKDQSHLIGACTLMPAEKRAPLYHLDFQRFRLLDKVNNLRLADSERHLTGEERQKLVAALTVQEALTYAKVRELLGLPKSAKFSIEAGGEKKILGNVTNARFAGALNLRWDQMARAEQDALVALWAAAPDDETFQARLEETGEYSAEEIGRLLTVRLPDDYGGFSLAAIRQLLPKLEEGLTTGEARKAVFPESFAATEPQDRLPPVLEALPELRNPAVTRTLTELRKAVNELVRRYGKPGVIQVELARDLKRNKKDRQALTEQNRDNEKKRDRARAELLQFGLTMPSRRDIEKYLLWEECGRMCPYSGRPISLHALYQEPQFDIEHIIPHSRSLDDSFQNKTLCLREYNHRKHNRTPWEAFGGNPEEWEPMIARVKKFGNKNKLKRFEMRETETAELLEQFSSNQLNDTRYMSKLAGKYLGLLYGGVSDATGTQRVFACAGGVTAVLRRMWGLDRILNPDAPGKSREDHRHHAVDAATVAVASRRMIQLLATAAGQAEAAGQRWVKSFEEPWPGFGGQLRSAILDSTTVSHKPERKLSGALHEETLYGRPKQDAAGKNWVHIRKPVHLLKEKDIDQIVDPTIRERVRLQVGLLGGDLKKLEREPATLETSDGRRIPIKKVRIRLVAQTRVIGQGARQRNVIPGDNHHMEVVAVQKKGKTAYMGHVVSRLEATRRHVAGEPVVRKEHGPDTEFLFTLSEADMVVWKGELWRVRSVDTNQQIFLSRASDARQKADIVKAGELAWPRVNPFCSTGGRKVRVTALGDIQECHD

SEQ ID NO: 7466 - protein, 1492 aa, unidentified
  REGION 1..1492: note = Description of Unknown: Cas Enzyme sequence
MSSKKILGLDLGTNSIGWALVDMDFENKTGRIEGLGSRIIPMGQDVLNKFGDGTSVSQTAERTWYRSVRRLRERYLLRRARLHRVLNILGFLPEHFAAAIDFENRLGQFINDSEPKLVYDNGKFIFHASFNEMLEEFRIHQPELLNRKNLNGQDAKIPYDWTLYYLRKKALTDRIEKQELAWLILNFNQKRGYYQARGEEDEKSDVREFVELLKVVAIERGEVDKKNNRRMWYTIGLSNGWSYSNTFTAEPKWLNQEKEFLITEELDQDGNVRIVKDKKSDTSGKEKRRIVPLPSSEEIEVMSKTEQDKIYKKIKVKTELSISTSGKTVGSYIYDTLLRKPNQKIRGKLVRTIERKFYREELTLILKKQQEFHPELRDEDVYASAVRELYRNNEGHQMMLEKRDLVYLLLDDIIFYQRPLRSQKSSIANCSFEFRRYREKDGSIRKEYLKAVHKSNPYYQEFRVWQWLKNLRIYEKLGDIDVTSNFISTQDDWVRFFDFLMTQNEVDHKDVMKYLLSEKGLKGNALKAEMGRYRWNYVYNSESDESKSYPCNKTGYEFRKRIEKAKAGHILSKEREYQLWHIVYSVTDKAEYEKALRSFARSNNIEPDSFYESFRNLTFENEYGSFSEKAIRKMLTLMRMGKYWEWESIDEATRSRIDKIRSGEYDEHIRNRVREKAFLLNDDSDFQGLPLWLASYIIYDRHAESGSATKWNTPDDLDAFLRGFKQHSLRNPIVEQVVTETLRVVRDIWNKFGNGEAGYFDKIHVELGREMKNTAEERKQLTSKISENENANIRIKHMLMEFLNHPDVENVRPHSPGQQQILRIYEEGVLNSGVEIPDFVSETLKKFRESDEKKRPTSSEITRYKLWLEQKYRSPYTGQAIPLSKLFTPAYEIEHIIPQSRYFDDSMSNKVICEAAVNKLKDNLIGLEFIKKHQGEKVDVGFGKTVEVFSEKEYIDFIQQHYARNRSKLNKLLLEEIPQKMIERQMNDTRYISKFISELLSNIVREDKDDDGVNSKNLLPGNGRITSELKHDWGLNEVWNSLILPRFERMNALTKTTDFTARNAEGHLIPVVPFELSKGFQKKRIDHRHHAMDALVIACATHDHVNLLNNQSARSETTRYDLQHKLRNTEKWTDKNGKERLKFTEFKKPWSTFHTDAADALGKVVVSFKQNLRVINKATNHYMKWGERDGRRKKVAVEQKGVNWAIRKPMHKETVSGKVELGRFKLPKGQIFTATRKALDSSFDLKAIESITDTGIQKILSNYLKQDKFKIIRAGGDVYYDPTLAFSPEGIDEMNKNIHLYNDGKPHQPIMKVRVFEKGSKFPVGQRGNKKTKYVEAAKGTNLFFAIYIDDSGKRSYDTIPLNEVIERQKQGLSPVPERNQKGHKLLFHLSPNDLVYVPFKDELESGVSVDFKILATFQSQRIYKMVSSTGSECHFVRADIASLIKTYDSKSKNGELGSLNKLETTIDIESTRIKEKCIKLVVDRLGNCSKV

SEQ ID NO: 7467 - protein, 1407 aa, unidentified
  REGION 1..1407: note = Description of Unknown: Cas Enzyme sequence
MKKILGLDLGTTSIGWALVNEAEGPNELSNILGIGVRVNPLTVDEQADFEKGKATSINADRTLKRGARRNLSRYKKRRANLLDALRKSGIITEDSVLTEIAKGSTHETYQLRSRAASEQISNEEFARVLLMINKKRGYKSSRKAKNEEEGHLIDGMGVAQKLYESNLTPGQYCYELLKKGSKRLPDFYRSDLNTELKRVWDFQYNEHPEFLTDELRKSIEGKGQRATAAIINSQFGISTAENSGKDKKIKAFEWRSLAITGKLTKEELAYVIVEINGNIHNSSGYLGEISDRSKELIFNKKTIGQYLFEGLSVNPHFQTKKKVFYRQDYMDEFETIWETQKLSNSKLTGELKVEIRDIIIFYQRRLKSQKGLISICELENRQIEILKEGKPKLINVGPKVAPRSSPIAQEFKIWQRINDLRFQHQKTKEIMEPELLQKEKLFDELWFKGNLPGDRILEILNMSSKEWKLNFKDLEGNRTNKDVNTAFLEILEFDGIDTTDLLDIKSSQDGIDLGKVKTEAAEIKKFIQSRFSELGINPDILEFNSDLCGQEFISQPSYQLWHLLYSYEGDNSASGNETLYKLLQEKFGFKREHATILSNIGMQEDYASLSAKAMKKMIPFLKAGHPYARKENGDGLAGASVLAGYNHSSSLNSEENEQRKLKDKLEILPKNSLRNPVVEKILNQMVNVVNAIIQDPNLGRPDEIRIELARELKKNAKERQELTEQINKANKEHEAIRELLMKEDSIANPTRNDIIRYKLYQELKNNGYKTLYSDTYIPREKLFSKEFDIEHILPKSRIFDDSFSNKTLESRFVNLKKGDQTAADFVMDSYGENGFDAYEKRVEMLYKEKEGGISKAKYLKLFKKSSEIGDGFIERDLRESQYIAKKAKEMLFEISRSVISTSGSITQRLREDWGLVNVMQELNISKYRNLGLTEFIEQKDGNRKERIIDWTKRNDHRHHAMDALTVAFTKHSHIQYLNHLNARKNEKDKLHASILGIENKETEQVVDDSGNKARKFKQPIPNFRVEAKKHLEAVLISFKAKNKVVTKNKNQIKTAKGVKTKIELTPRGQLHKETVYGSRKVPVFKTETVGAKFDAPKIRLVENKQFRSLLQSRLDAFGGDAKKAFTGKNSVDKNPIFISEDKTELMPSSVRLKWFEIEYTIRKDITPDNFKDYKNLEKVADEKVRQILMARLREFDGKSKEAFSNLDLNPIWLNREKGIQIKRTTITGVSSVEALHVKRDHLGKPILDKEGKEIPNDFVSTGNNHHVAIYRDANGDLQEKVVSFYEAVHRINQGLPIIDKNFNLDKDWQFLFTMKQNEYFVFPGEGFDPNEMDLLDISNFATISTKLFRVQKLATKDYFFRHHLETEVENNPKTKNITWKREGLKGINSIVKVRINHIGNIVHVGES

SEQ ID NO: 7468 - protein, 1107 aa, unidentified
  REGION 1..1107: note = Description of Unknown: Cas Enzyme sequence
MTSIRSTIAFDIGYASIGWCVLNSQNNNPDPEILGTGVVTFPTDDCLASERRDRRRTRRHIRSTRQRIERLKLWLSSCGALSRADLDKPGHPAPFLLAAAALQGHRKLNNHELWTVLRWYAHNRGYDGNSLWARDESNDDDTEKETNAKSLMAKYGTKTMCETVCACLELNPVDNATRISSALPYKTLNAAYPRQIVRAEVAELLRRQEGIKPETIRMLLKSEALTKEERTNLTTAGIKLPLRYHGGLLFGQLIPRFDNRIISRCPITWAKTYDEAIESGKTEKEARHLAEKFSKVPASKSAEFLEYRFARILANLRVNGEAISPDARLNLFDLAKQQGSLTPTDLKKCLTALYPKAKTNIADYFTLHPDSAKALVLDPVADAVRKASGKTSKLAPIWHLLDGDTQEKIKVRWSKNQGISLAEILQMSGNADALIKELELAYAKANKPKNGKTKFADINQYLLRTSIAPEFPTGRAPYARPVLKQVVAEVLAGSDPTKPAQKTSASEGENKPADGVLYQIQNPRSRANELRAERPIDQLTNNHLVRHRMLILDRLVADLAKEFTIPENPNIIVEVARELKEFSGKTAKKISAELNSKLKDFKATITYLEKHAPDLPLNGSLIRKARIAMDMDWQCPFTGDRYDAYDLTKLEREHIIPYATRNSNALHALVLTWPEVNRMKGKRSALQFINEEGGKRVSNKDNLSILPTKAYESLVDKLKVTGHDDDRRRQKARKALLLTTQLEEKDLGFTDGQLTQTSQLMKLAMRGLKKQFPAAQIDPIPGPVTAEIRKVWRLIGTLSLVCPEILDPEGKPKPKDEIRSLTHMHHALDAATLAFISHYFPLRQHGQDQTGKLWKAMLKRNKSSEEIDLLARTGIYRRAARPRLQPDGSIKEQADAQLRDLSPDIKNALAHSLAQARVMQHIPADRSGAKAELTTWGVVKKEGEGEDARFTLRQNSSVVEDGIRIRTAKERDERAGKLLGPNPKNDKGKLAEIKGAMIIGENYGLALDPTPTVIPFHNVTARLAELRKANGGKHVRVIRNGNLINVVNWPGKNGNWKVMSCKASMKLDLAQPHETKSSWREVAISSLLSRGVIILPQRYTGNPTSGL

SEQ ID NO: 7469 - protein, 1146 aa, unidentified
  REGION 1..1146: note = Description of Unknown: Cas Enzyme sequence
MNTPPPPEYVLGIDLGSNSLGWAMIGLEDGKPAKLLRAGVRVFEAATEGDRESGDEKSKNLKRRQMRLQRRQTSRRARRVKKVFRLLQEFGLLPPETPPPTGTRLEQESTVEGAFRRALADLHRLRPATTVEQRRQNFINALDQAILASDWFAGKKASGIYPEPEQTLPYILRAAALDERLEPYFLGRALYHLAQRRGFLSNRKAAAKKDEKLGEVKKGINNLLDAMKATGSRTLGEYFARHVSPSEERIRGPRRWTSRKEMYEPEFDQIWRAQAVHHPSILTAEREKELRKAIFFQRPTWFDPGTIGRCELEPEERRAPMYLLLAQRFRLLQTVNNLKVLEPGKLAYELTPNDRAKLIRELELKGDRTFDQIRKLLELPKEYKFNLEPPKRKKRKGQKGATENADDDENEKTGSAKLKGNRTNAAFYKVFGERWLKEMSDEDRDRAVQYAYAFEDAEKLREAAKVRWGLDEPAAQKLSEVSFDTGPAGLSRKAMQKLLPLLEAGKTYAEARREKYPEKFEARAPLRELPPVQFAADSEIFRKWLDKTKVLPAGANPPDPIEQIRNPAVMRSLTELRKVVNGIIRRHGKPAEIHIELLRELRNPKSARERIADANRENRAARDKAKKKIKEETGDEHPSDDDVRKVQLFDECKGHCVYCGDSIPRRNFYGDGSDVHIDHIIPRSLCPDNTFPNLVLCHSGCNAEKGDRTPYQAFTGERYTDIINRVKQFQGKTARRKLRRFLMNDDELRRFLDKFTERQLRDSAYASRVAAKYLGYLYGGVYDANGHQRIICTSGEATAELRKAWELFGVLGDGPTSKGGALKKKRHDHRHHAVDAVAVALTGQGSIQELTKAKWGLRHGSRVSSALLQGPWPNFVDSVRQEIEHIVVSHRVSKKVSGALHKDTIYSPKQDAQGFRHRRVMLTELSAKDVMNEDEPVIVDPVVRALAREKLVSLGGGDPARVFSDAKNLPCMPNRKGTVIPIRRVRIRERVKTIPLGGGRSARYAKPESNHHIEIYAEVDANGNDKKWGADLVAMHEAYARLKAGQPIVQRDHGPLVHFRFSLGPGDVLQCDDGKGGRRLLVVRSLSEEEKTGSIKVEMVRINDARQKKEIKAAREWITKSPNELRKWHARKVVVSPLGEVSEAHD

SEQ ID NO: 7470 - protein, 1109 aa, unidentified
  REGION 1..1109: note = Description of Unknown: Cas Enzyme sequence
MSEAKKIPYVLGIDLGANSIGWAVMDCEEKEGDQPEISDIRKIGVRVFEAGTEGDVESGKDESRAKKRRSARLIRRQMNRRAMRTFDLYQRLQAKELLPAINPQEDSLDAQRAARDPALAKLDREILKRWTEKLKKKGADEDAIRLLAKRLPYVLRARALDEKLPLHELGRALYHLGQRRGFQSNRKAGKKDDEESGKVKAGIKDLNEQITGARVRTLGELYARTNPEEKRIRQRWTSRDMYKHEFEEIWKAQQKHYPELLNDDFKKEIFDTIFSQRPLKSQAHLIGKCEHEPDHKRAPIASLPFQRFRILQNVNNLRITSEGITRGLTDSEKKKIIAALETEGDLTFGRIKSKELLGLQRRDKFTLEKGNQKGLIGDRTTLALRPIFKEKWDKLSEDEREALVEDILSMEDDDALMRRAMKAWGLNPEEAKELSELELEPDYCNLSKKAMKKLIPHMEKGEAYMTAVAKVYDPPPPEPEDNLIPVRKALKELRNPVVERSLTELRKVVNAVIREHGKPAMIRIELARDIRNPRQRRKELNDQNKKNQKAREKARDEILKEAKIGADVHRNDELKYLLAEECNWECPYTGKKINMYNLFREPKFDVEHIIPFSRCQDNSFMNKTLADSEEQRNVKGNKTPWEAYGGDEEKYHRIIERVKKFSGDAGHAKLRRFLMKDEELKDYLSNFSSRQLNDTRYASKLAVKYLSRLYGASGLYKGEDGKMTVVGVDEKGKRRVQVCAGGVTAHIRNELGLRTVWNSIIEEAYPKVEEEDEAVAVETDSLAKERIDHRHHAIDAIAIGLASPAMVKKLADAAKNATKEKRRLYAKMDPPWPSFLDDVRQQADNIIVSHRASKKVNGPIHQETYYGKPRKDENEKPYVHIREKLENLSAKDLENIVDPIIKETVKKKLNELGGDAKKFKETANHPFSKTKDGRKIPIHKVRIKKFVNTEKIGAGPKERNVIPGSNHHIEYFEIKDKKGKSKWDAVIVTTRDVMQRLQEKKPIIGKDNSNARKFLFSLSQGEVIELDETDANGNRLEIRGLYVVRSMSYVRQGGKLYPNIAFVRLNDARLGKDIKKAGDFKTGLPEPLRKLNLKKLSIDPIGQTRTAND

SEQ ID NO: 7471 - protein, 1333 aa, unidentified
  REGION 1..1333: note = Description of Unknown: Cas Enzyme sequence
MPVYLGLDIGSNSVGSAWVDTDAREIHLAASIFPAGVDEQEEKRGAPKNQARRQTRSQRRTIRRRASRKRRLTRFLIERRLLPGDPRELRQVLDRDPWQLRRRAIAEPLSPFDFGRVVLHLAQRRGAVGIVTDPEDPQEGQVKQGMGRLTEEFLNRYVAEDRRAQLRDDPRCFAAYRRENRFTVGRLLADLLDERRQENNGVRWNEPIRNRQYRMREDRMLFAGRELIREEFAQIVEVQRSFHGSPLAAMLTNELVQRLDDPELAYPPAVNIDNIDQEQRKRLLEQYRRTWRHGGLLFGQRRTYWHMGTLGRCVLEPTDRCVPVADRHAGYFRVVETANNIRITLPGEPKRALTPEERQRVVQYLRGDRVLRLNPLGLPVKPKMSTAPKEVKPKHLEEILGIDAKVLASHNYVADACKLQFASADPERNINTDWFHREIVHGAIGAETWSRWEEAERREANLPAAERSPEAQRPEAVNRAILRFDPDQPADEQRLRQIASSHWGLESEAAERLIDAWKRRPKLEKRLNLSRRAILNLLPFMERFDEENNRWPTQQEARKAYAKVLQSRFEQNGNEADQVAARRYATGALGLAAADRHYMRPEKHQIKQNGQIVRDAEGRPLAALPPAPMLSNPVVRKAIHEVRRHLLAYLRKFGRKPDRVVIEFARGVKDTARNCNLQLKANRQREAERKEIEKKLRDWQIPQSNWHKAVLRVRLCREQNGVCPFSLQGPNVNRTITERMAAEGQEVEIEHIVPEALSGKTMAFNNLVLCFREANRGKAMRTPADWLGPEGLQAMLQRLENAPIRQNRVKWDRLQAPTPDEDAFRNSQLTDTAYAARQVAAYLADALFDGQGLPERGGPRRIFTTKGEFTARLRADWGLHESTIDRAHGLELPPNAEALRDDPALEQASRRARKEPKDRSDHRHHALDALAIAMVGPELLAQLGRMARKDREYRERTGYWPRHEAIDPPSHWTKPPSFHQDVLAAFEKLIVSHRAVKRRLVGAFHEETHYGPVIAPLPRHRTEDAGSLFTNRIAVSRLTNNHLRVPEGWDELSRRLDDPTLPRHQKRAIRRELAAMKDPLPSKSGIVRDRALRDRLRKCLKENGVDPDGFTAKQLKDLLTQGKLTMASGVPIKSVVLLRTIADPVIIPRKNFDSTTSRMDRQIHPKRPQTTDSRSDRVYIGGNNHHVEIRQERGEDRGEVATEWTGRIVTSFEAAQRVRPAKRLAASSRDAVDRCDNEQGIFVMSLAEGEMIYARRKDRPCEPPNYYVVCKLDRAGSSCRIHFAPHWDARKASEQDRWNVTPADLKHCGPEPGKPPEKVRVDPLGNVVPLERD

SEQ ID NO: 7472 - protein, 991 aa, unidentified
  REGION 1..991: note = Description of Unknown: Cas Enzyme sequence
MSTILGLDVGPNSIGWAFIYPDNSEIVATGVRVFPEGVDNYGSLGQQESKNAKRRIARGMRRQNQRFKMRRDNLAWQLKQLNMYPEKKDELSAYFSLDPYSLRSKGLDKKLSLLEFGRVLYHLNERRGFKSNRKAGSSEDSKIFKSKNDLVGITDTEIAINTGGFRTLGEYLYSLDSHELRKRSRYTLRAMYEQEFEMLWGNQKTYYKDILTDEANEKLHHAIFFQRKLKSQKHTIAKCTFETQKRCAPISSPTFQYFRILEQLARLKVTDGDRKGDFLTQNERDILVNELNNKEKLPFKRVTKLLGLSSEAMYNLEHEKQLIGNRTNTKLARVFGKKEWDGKSPEEQYNIWNDFHFSDDLDWLKERGNIIWELNETQIEKIEKVSLEKGYGKLSQKALFKIIPYLEISETEDSDPMTFDKAAKAAGYHHSDVYEHSGKMGKLPIPDDIRNPIVQQALFEMRKLVNAIVDKYGNPETIKVELVRDLKLPRQRREQIFSENRKRREYHDEIRDILIDVGMNDPSMDDILKYKLWEECDKTCPYSGKKINSIAKLYSAEFEIEHILPYSRSLDNSYMNKTLCHRDFNNEKGNKTPYEAWGESTEYEKITERAKKLPYPKYRRFIQKELKEDEFINRQLTDTAYIAKEVRKYLSHICTDVRTVPGTATARLRNFWGLNGILSKDVDIKNREDHRHHAVDALVVANTERKYIKHLSTFHHYRRTPKGEHFPMPWESFWSDAENAVNSILVSHKVKNKLSGALHKESFYGLIMDDVGTPQKNDKGQFIYGKRKPVQNLNDSEVKKIADDDVKKSVKRWKSLPKDSRSEYPTLPSGQNIKRVRIHDVHTNVVELRPGVFVEPGSNHHIAIFENIETGKRKGKVVSLFEAVQRDKNGEPVIDKTAEEGWKFVMSLSINEMVLINNNLDEIDWGNKIQLSKDLYRVQIAPASLQISFRHHNVARLKTDDNRKPGLILKKPNTFKGIKVGIDYLGNIYKI

SEQ ID NO: 7473 - protein, 1002 aa, unidentified
  REGION 1..1002: note = Description of Unknown: Cas Enzyme sequence
MKRVLGLDLGTNSIGWAVIDVPEDGDGPGATGSVVAMGSRIFAEGAEADGKALSTKAKERRQARSMRRQVLRRAKRRRRIREELCNLGLLPADEGEFENLMAVDPAELQRRSGAGEVLSLREIGRVVYWFSSRRGFLSLRSGGGDLTDDDDDRAVRNRYRNDQVRSDTGEILERGQENLLVDFLRAQAAHHPGLLTDEIIFGARGRLSYPVRPIRRDNYLSGGSALEEFGIHGLVFFQRSVYWDEGTIGRCSIDPNDGGNRALRADRLAQKYRVWKTVIDLRVGGSKRTLGKDERTLDEDERQKLFDALMSQKTMAFSKLRKVLGLDPDCPINFERSEREALVGNETDAVLRSVVKDSWDGLSEPDRDRLASLLLGNADERQLSATLRAEFGLSSEQVEKALGARFPAGRAAFGRRTLRRLLEVIPSSNTELDAIKAAGFDAPEVVRAGRTVEVGDITNPLVRKTLGQLSKLLPALASTFGRDPEAPFDVVRIELTRDVRQNYRTRQETNKRQRGFEKANAAARAAIDEFAPGKKASRDRIRRHRLWKEQGEACLYCGQPISAVALFGSGFELDHILPRSRTLDDSLANLALVHADENLDKGDRTPVEWKGLDGAHEIAERAKGDLPKGVWLGKVRRILNEEVDADVPPAALLVETGYINNLARDFVRQVLDTTVQVSSGRLTAALRYRLGLEKDDDDHRRHAQDAAMVALCDLRTARALANHYRRERDHGIRRSERYGSFEPWVGLRTDLLDHYSRINVSHVAKGKVSGQLHKETHYGKVESPHLELDHGYAFRRPLSAINTPGRLAEVADPAVRATLVADLERRGLSAETGPFKFDAADPPKMPDGTVVNKARCHKNYPGNRIIRPDTQPKTAVAMENNYVGFVYENTRTGRWRVRVVQRFDAFKLRNVPLRELRTRFAQEDERFLFSATIGTTLQLTEGDTTGLFHVKNLDSDGRRFDLRPLNQTAGGSQNRYGASALQKANASKVVVLPSGEVRTARD

SEQ ID NO: 7474 - protein, 1012 aa, unidentified
  REGION 1..1012: note = Description of Unknown: Cas Enzyme sequence
VPNMRYRLALDLGSTSLGWAMVRLNPQNEPCAVIKAGVRIFSDGRNPKDGSSLAVSRREARAMRRRRDRLLKRKNRMMATLLRHGFFPQDDAARKALVNTDPFALRAKGLDQALVPEEFARALFHINQRRGFKSNRKTDKKENDSGALKTAISQLREAMEATGSRTVGEWLYARHQQGLSVRARYRENRITKDDGKTKIEKSYDLYIDRAMIEAEFDALWAKQSEFNPALFHETARAELKDCLLHQRPLRPVKPGRCTLMPEQERAPLALPSQQRFRIYQEVNNLRLLREGLSEEPLTLTQRDQLAHALETNNKRTFTQIQKLLGFSGQFNLQDEKRTELKGNSSSATLAKKEFFGSQWATFDEAKQDAIVMQLVTEENEARLIAWLLTETGVDDITAERIANAPLAEGYGSLSAKALEKILPALRAEVITYDKAVLAAGFDHHSHISHAATGEILPELPYYGQYLQRHVGFGTGKPEDPAEKRYGKIANPTVHIGLNQVRTVVNALIKRYGHPSEVIVELARDLKQSQEQRKEEQAQQAKNQRRNERMRDDIAKLLNTVPERVRAIDLQKMILWEELSFNVADRRCPYSGVQISTQMLFSEQVEIEHILPFSQTLDDSLNNKTVAMRQANRIKGNRTPAEAAADFAAQGWPLEDMLHRASLMPKGKRYRFATDGMAQWLKEDKGFLARALNDTRHLSRVAREYLSLICPQGTRVIPGRMTAMLRAKFGFNDILGPDGVKNRNDHRHHAVDACVIAVTDQGMLQRFAQASASAREKQINKLVETMPLPWGNYRDHVARAIHNIWVSHKPDHGHEGAMHNDTAYGLLGGGHVQVRKRVEGVRIRETAALKVIEFADRQAHPRHGLLPNGEPRPYKGYKGDSNYCMEIVRTEKGKWEGEVVSTFEAYQLVRQHGLARLRHPALSVSGRPLVMRLLRNDTLRLDHNGEQRTVRICKMTAEGVIALADTTESNVDARTRTKDLSYIFKTAGSLQKSKGRRVAISPSGEMKDPGFFD

SEQ ID NO: 7475 - protein, 1296 aa, unidentified
  REGION 1..1296: note = Description of Unknown: Cas Enzyme sequence
LECLIENNMCPLSLEDLNNWRHYKKGEGRKYPTNNNKFIEWLRFDFDGDGKPDFERLGFSKHESYYLFRALIVDENKKDIFMNEPHIIGRVLYQMVQRRGYNDSGDIDEKEKNELSKTILKGGGEAGAIGANEIEPYIEKYKTLGAALYYIQKENNVRIRKRYNLRSRVEAELKTICEVQNIPHLFKKIWTAIVWQRPLRSQKGLVGICTFEHNKSRCPISHPLYEEYRTWVFINNLKIRAIDDTKENLPILEILNNIVYPEFYKASADFKLSTIATKLKKVGFEIGSKFPEDTKLISFSFGYKMKNIFGEEWKNILGWNELLANKPKLVTYNLDDLWHLHFVKTTNKKTGITATDFLKQFAIDKLNLTEQHADEFAKIRLSQGYSSLSINAIKKLLPYLQKGFIYSEAVYLANLHKVLNTPILEPAIVNHFSEEINKIFKANKLEKKYLEVINGLINDQLNATHRFGMQENYQLDSDDVNDIDKKIIEVFGVESWYKLESQEKENLMQLVKQKYLNFLQKRVYAKNVFEKSERIHDKVFNWIKETYNIPDNRIKYLWHPSEQETYKEATEINGKKYLGSPEPISKGFKNPMALKTLHKLKQLINYLIDTNKIDEDTRIVIEIARELNDANKRKAIEKWQRDKEAENKKYTEQIIEINNECKTNFNPNDKNLIDKIRLWEEQKRMCLYTGKQINLCDILNGAKYDYEHSIPASMSFDNELKNLTIADKTYNQQIKGKKLPSECPNYDTEFKEYPPILDTIQLVFGKLIKEEIKTKSGIKTISKFQKIIDLEKTYQEWKDKNSDDKEIKNNIIIKRHYLKMELDYWRYKLNTFLITEYKAGWRNSQLRDTQTITKYALPYLKTIFKKVDVQKGSITADFRKIFKIQPRLDKKERTKHSHHAIDAAVLTLIPTASVRDIILSKYNQENENNLPYHELPRNWSSFQSNYILDIEQDLVINYLPEHRTLVPTEKIVRKRGRIQFVKQKLDDGKWRYKLDANGKKIPLVAKGDSIRGQLHKLSNFGAINNGEKIILVERYPIASFTSIADCRNIVDKTVRELVENALYERMQSGMSFDKAKQEPIPFHKGNEVIKKVRCKVAAGRGYLGTDKAIKIGKHNFESKHEYKRSVYVQNEENTYCLYYENTMDGITNRAFKIIGLYELAQLKIKDEKQLLKEPYYNTIIYGKGKKQLELPLVKILKVGTKCIFYSESIEELKDLTKPELLKRLFRIYKFNDIGVTKYIYLQNHLEASKNELLGNGDGQFEKTKYQSRLMLNPDKFICAIEGVHFEIKLDGEIKWF

SEQ ID NO: 7476 - protein, 1215 aa, unidentified
  REGION 1..1215: note = Description of Unknown: Cas Enzyme sequence
MKKILGLDLGSTSIGWAFIEEDDKASVIKRLGVRIIPYTGDEKDEFTKGQTISVNKGRTQKRTARKTNHRYKLRKKALTDMLTRHGMMPEEALLKRIDPVLLYGIRARAATDKITLPELGRVLYLLNQKRGYKSSRSSAAEEEGGKKMSDYLSELKERKELIERADLTIGQYFFREYEQDRWFRTRKKVFPRECYIAEFDRIWRTQQSFYPEVLTHELGNSLKQEIIYFQRRLKSQKHLVSECRFEKHHKVAPKSSPLFQLDKIWESVNAISFTNKANESLAISFEQKRTIFLHLEQNAKLSSTDLLKILGLKRIEGWRPNELIRKSGIPGNLTREKLKKAFKSAGLEDRADLLQFDVTITEEHTDMETGEITEKISIRKDFEKQPMYELWHLLYSVDDPNLLIPALMKRYGISQSQATTLSNIDFKKDGFGNKSARAIRKILPGLMKGMVYSDAATHVGYEHSDSLTREANEARELNDKLPLYSRNTLRQPVVEKILNQLVNLVNQILEDPALGRPDEIRVELARELRQSREERSDAYDRILKTDREHKDIVVRLSTEFPGLAVTRKVIEKYKLFVQQDGFCFYSGLPMTLSQVLRGEGVDVDHIIPQSKIFDDSFQNKVLALRTENAIKDKATAMDYMGSRSKDVLDGYLERVDRLFEDRKITRSKRDKLLMKEKDIPDDFINRQLNETRYVSRESMRLLKGICRDVFATSGSVTDFLRNQWGYNQVLKQLNWSSYEAAGKVSDGKIEGWSKRDDHRHHAIDALVVACTKQSFIQKLNRLNSTLTRQDFMEHVNEKSEKGWQARRSLLEQYVQTTRPFDTAQVKNAVSMVLISFKSGKKVATWSRNRVNGHVQKTLTPRGQLHMEQVYGKIRRYAAAKTALNGKFDKVDLIASPVERDLVRQRLESFGNKPKEAFKDLDKNPIWLDAAMTRALTEVTLWEEKFVYKYTLDQNFKESKIEAIIDVAVREKVRQRFMDRATQKDHPLKNLEQDPIWLNEEKRIPITRVRCFTTLKNVVPLHRSADGITTSQKCQAAKSKPTDYITTRNNHHIAIYEAPDGKLHETAVTLWEAVERKKNGIPVIAADPGQIWDLVLLKGIDDQKLLQNLPDVSWRMITSMQQYEMFVFRMTRDELDAAIRGDRFDLISPNLYRVQKISEGDYFFRHHLETKLEKDNAEAKEFLAIGKMIRISSLAAFKAQHPIKVHLDALGRLKNI

SEQ ID NO: 7477 - protein, 1097 aa, unidentified
  REGION 1..1097: note = Description of Unknown: Cas Enzyme sequence
MTGKKHIYWRLGADLGANSLGWAAIELDARGLPRAILAAGSRIFSDGRDPKSGASLAVDRRDARAMRRRRDRFQQRQRALLKYLVADGLFPEDEGERKALAALDPYALRARALDEALSLHELGRALFHLNQRRGFKSNRKADRKADDDAGKIAIGVDRAREAMAENGARTYGEWLHRRRASATDANAIPPVRTRLRPESGEDAKGDGYDFYPGRDLLEEEFAAIWEAQAAHHPDVLTDDVYERLFEIVFYQRPLKAPQIGMCTLIAGDRRLPKAHPLFQRRRLLEELNALMIVRPGEVAQRLTREERDTLFLKLKDRNKVSFESLRKTLKLDPDARFNKESENRTELKGDEVAAAMGSKTRFGNRWVHLSIEEQWAVIERLGDVESDAEDAAFRAWLAERYELTPEQTRAVTNAPLPQGYGRFGETATRKLIDALRDGEKDGRVLVYSEAVTAAGLGHHSDRRTGEVFEDEEGRPQLPYYGVALERHIMPGTGDPSDSDEMRVGRLTNPTVHIGLNQLRRIVNRLIRAYGPPAEIAIELARELKLTDEDKKRINKENNSNRLDAERRSEKLLAIGKPDTGANRALLKLWEELNPANVLDRRCIYSGVQISIDMLFSAAVEVDHILPFTATLDDSNGNKIVCTREANREKRKRSPYEAWGHSARWEEIAARAAQLPRNKRWRFEPDAMEKFKDDGGFQARHLIDTQYLARLSREYLATLYPDKGEGSGHIWVSPGRLTEMVRRKLGLNDLLPDHNFGGGADQAKNRLDHRHHAIDAVVVAIVDRGMLNRIARASGQEGAEGRERIIIPEPWEGFRDDLRTAVNAITVSHRTDHGTASKAGLPKGKDATAGRLHNDTAYGFTGESDAKGNSIVVRRVPLSSFKKLADIDRVRDPELKAALYQHLDGLEGKAFEKAIGEFGSREWHPYGGVRRVRVTEPLSVIPIRDRNGHIYKGYKGDSNYRYDVWELPGGKWVNEVVSMFDAHQPGWQSAIRAANPTARKVLSLHRDDVLAIERNGAERELVRVVKFSEKQFAVAPPNEGGALKARDADKGDPFKYSYPSPNTLKALRARQVRIDELGRVLDPGFPARTKQRKTRKPN

SEQ ID NO: 7478 - protein, 1387 aa, unidentified
  REGION 1..1387: note = Description of Unknown: Cas Enzyme sequence
MKKILGLDLGTASIGWALVNEAENDSEQSSIIKLGVRVNPLSTDEQTDFEKGRPLSVNADRTLKRGARRNLQRFKLRRTNLIEILKSNGFINYTTQLTEQGSESTHETCRLRALATSERIEKNEFARVLLAINKKRGYKSSRKAKNEEEGSLIDGMAIAKELYEQELTPGQFVYNLLKDGKKFIPDFYRSDLQAEFDAVWKFQQQFYPEILSDSLYKELHGKNKTQTWAICQKPFEIVGLKLSGNATDKRIERYQWRTVALNKKVDLEYLAIALQEINNNLNQSSGYLGAISDRSKALYFNNETIGQNLYQQLQDNFHTNLKNQVFYRQDYLDEFECIWEKQASYYPELTNDIKTEIRDVIIFYQRKLKSQKHLISSCEFEKHHKAIPKSSPLFQEFKIWQMLNNIELLCKETKKKHVLSLDDKQVLFAELNRRGNLKADEVLKVLDLDKKKWVLNYTEGIEGNRTNEALYGVYKDIAENEGYGFDWAKKSATDIKAELKAIFVDMGIKPEVLDFNSNIEGNAFDKQTSYQLWHVLYSAEDDDKISEADRLAYGDTNVALKKKLHSSFGFEPKYGNMLANVSFQPDYGRLSARAIKKILPFLKEGHEFSEACTFAKYNHSHSYTKDELASRSLNDSLDLLQKNSLRNPVVEKILNQMVNVVNQVIETYGKPDEVRIELARELKKSAKERASATTNINAAKTKHEGIRKLLQSEFGLKNPTRNDIIRYKLYQELSENGYRTLFTNQYISPDKLFSKQIDIEHIIPKAVLFDDSFSNKTLAYRDVNLAKADSTAFDFISNTYADDLENYKLRVESLYKADKISKGKQKKLLMPLSDLPDGFIERDLRNSQYIAKKAKQMLFDVVRTVNTSTGSITDKLRDDWGLINVMKELNLPKYRALGLTEMQERKEGKEVEQIIDWTKRNDHRHHAMDALTVAFTTYNHVQYLNNLNASRHNKDNNPLFAIRNKITETIKDKSGSKKRRFVVPLPNFRTEAKKHMEAILISFKAKNKVVTKNKNRIKKGADATYEKVQLTPRGQLHKETVYGLSKEQVVSEVKVNAKLDFASIARVTKPQYREALMRRLAEFGNDPKKAFAGKNSPAKNPIYIDEAKTIELPEKVKMLTIEDNYSIRKAVSADNFKDLKSLDKVLDEGIKRVLIERLKAHGGDTKKAFSDLAKNPIWMNEEQGIAIKRVRISGVRNAEALHDKKDQYGNLILSEEGKTQPVDFVSTGNNHHVAIYRDEKGKLQEQVVSFYEAVARVNADVSIVDYDYKKKEGWQFLFTMKQNEMFVFPADDFNIEEIDLMDANNSSTISEHLFRVQKIATKDYSFRYHLETTVEDVKGLKDIAYKRLGTTGIGNIVKVRLNHLGLIVAVGEEVITENINADLEYVV

SEQ ID NO: 7479 - protein, 1565 aa, unidentified
  REGION 1..1565: note = Description of Unknown: Cas Enzyme sequence
MKKILGLDLKEQKTILGLDLGTNSIGWALIKSDFEEKEGQILGMGSRIIPMSKDIMDKFGSGQSISQTADRTSYRGVRRLVERGLLRRERLHRVLNKLKFLPEHYANSIDFDKHLGQFKSGLEVKLNYCKNKDGKHEFLFMDSFQEMIKEFSARGQETKVPLDWTLYYLRKKALSEKISKEELAWLLLNFNQKRGYYQLRGEEEEVSDGKTKEFVSLEVKEVVDSGEVIKKTGDKLYNVVFENGWQYDRQITKTENWIGKTKEFIVTTSTTKNGDLKYTFKAVDSEKDWIAIKTKTEQDIYKSDKTVGEYLFDTLLENPSQKLRGKLIKTIERKFYKAELKAIISKQIAFHPELQDKELYKACVEELYPINESHRNGIIEKGFEYLLVEDILFYQRPLKSKKSSIANCPYEKKVFVKDRIRQEITLKCIPKSNPLFQEFRLWQFIKNLKIYQREATVGSKSEIDVDVTHEFIQNEEAWVELFDFLNNRKEIDQKAFLRKYKLNEKMYRWNNVEDRKYPCNETRAQFISRLKKVKDVIGEEFLTAQNEQELWHLIYSVKDKLEYAKALVTFANKKELDEFSFVESFIKFPPFDSDYGAYSEKAIKKLLPLMRRGSYWSEEVISDDVKNRISNIQERLESIDYDEEVFAKDKDKRLQTIVDDDIPKQLLKSFLNYPKSYQLKGLNTYQACYAIYQRHSEVGDILCWKTPQDIDLYLHEFKQHSLRNPIVEQVVTETLRVVRDIWQHHGGGQADYFGEIHVELGRDMKNSSDNRKSIAAKQTENENTNQRIKALLQELKDDSAVEGDVRPYSPSHQEILKIYEEGIFNQAEPDEDILKIRKNASPSKKDIERYKIWLEQGYISPYTGRPIPLSGLFSENYQIEHIIPQSRYFDNSLSNKVICESEVNEDKSNKTAYEYIKENEGKKLNGSITLFTLKAYEDHCNRCFKKSRIKLKYLLSEDVPDGFINRQLNDSRYISKMVKALLSNIVREEGEKEATAKRLVPVTGSITSKLKQDWGLNDKWNELITPRFKRLNEMTNSNDFGYWDKDKNMFRTQVPDDISKGFSKKRIDHRHHALDALIVACVTKDHTNYITSLNTERKNHSLVAKLRQTEKIQITDKLTKKPKTIEVAKAYHQPWPGFTSDAKNALEKILISFKQNTRVINKTNNKYLSYKDEEGKIRLGKDGKPKKELTKQVKGDSWAIRKAMHKDTVSGRVSIKRKKKGLVNLSDYIEQWQLIVDKSVRQKVRNLNDLFTNDTKAIKKHLKSHPITINDELVVKIEVYEIVEATATRGISTALSEKFTRKQLEAVSDSGIQLIFENHIKNYTEEDGKERFDLAFNTEGLEDLNKNIVSLNRGKFHQPIYKIRLYEVGNRFAVGETGNKKDKFVEAAKGTNLFFAIYWDEEKQKRVYDTVPLNEVITHQKQTAHIKAKDNTPIAVKAEKGQFLFTLSPNDLVYVPTDEELEDPSLVDSNNLSKEQLERVYKMVSTTQNKLQCQPVHYASFIIEKENGSGNKTERILKYFNSNDVLDQGGESVMIKERCWKLKLDRLGNVIEVKKHVSAISQAVY

SEQ ID NO: 7480 - protein, 1123 aa, unidentified
  REGION 1..1123: note = Description of Unknown: Cas Enzyme sequence
MARILGLDLGTNSIGWALIDDAQNKIIGVGSRIFPMGVENLGDGDGEISKNASRTGARGVRRQFFRRKLRKKILLKALAENQMCPMVANDFEDWKKTKEFPSEKLANWFALNPYELRQKALNEKLSLEEIGRIFYHLIQRRGFLSNSRKGGSDDGAIFKGNPKEGKIGITETQQNIQDKTLGSYLFEIYPKENQPFQNGLERIRNRYTTRKMYVDEFELIWNKQSQFHAQLTEELKTLFGGRKLDGYKEDGILFHQRPLRSQKHLVGNCSFEPTKTKCPISAIPFEQFRVWQWVNTVEYNGNKISQEEKEKIVEFLYANEKPEFKKIRKTIGKENAEFKFNYKDDDKIVGTHTISNLSNKKYFGKKWFEFSEKEQEDIWHVLYFFDSKSNLKEYAIKNWNFTEEQAESIAKFNLKDGYSSLSRKAISNILPFLKLGFTYDVAVVLGGIKNVFGFEWEKLSEEKRNYLIDNVEGIVRSKTKGGFIDIIKDILRNDYNISDNQLRKLYHHSATIDATELLEKLPVGKEADKEIQAIRNPIVITALFELRKLVNELIDEHGKIDEIKVEMARDLKISKSQRNKIRREQKRLERENDRVKARLLEEGQRITHDTILLYKLWEECKRTCPYTGKPISVTQLFSGEVQIEHIHPWSRSLNDSFSNKTLCYADENRKKGDKTPFEFYGNDEANWSAIKERALKLFSDTKEYPNAYQKFKRFVQQKFDDDFSSRQLNDTRYISKEAKNYLSRICKNVIISPGQATSNLRQKWGMNNILNDENEKTREDHRHHAIDALVMACTKVSYVQELSKWNRYNRNSELKNFPLPWETFRKDAEVAIDKILVSHKKVSNDITVRTHKCEKNGKTYTNVGVAARGQLHKETVYGKRTFNGEEAFHVRKPIELLTTEKQLEKVVDETIKLLIIKRIQELGGFVKGNIPANTFFVVDENGVKQPQIFLPNKNGAPVPVLKVRVKESIGRAEKLKENVNQWVNPRNNHHVLIYKDEKGNLKEDVVTFWTVVERKRTGQSVYQLPIHGNEVVTSIHTNDMFVVGLNEDEINWDSIDYNLLNRHLYRVQKTSKKEKSFEFNFRLAIASSLDNKNEEISIQSFKKWIELNPIKVKTSVSGKIEKL

SEQ ID NO: 7481 - protein, 1131 aa, unidentified
  REGION 1..1131: note = Description of Unknown: Cas Enzyme sequence
MNKEKVVLGLDIGVGSIGWGLIQIKEEEYSDKKSDGSIDKKHRIIDGEIIDTGVRAFQMPQDRQKKSLALQRGNARRSRKTTRRKAQRLKNLIKLAKEFNLIDDNFDRDAYFKPNKGDNEKNWDIWTIRKESLERKLTDIELFRVLYHIAKHRGFHFHTKSEFLSEEDEKKIQKGKKQGAEENEKEKEDKKVKQGLRRIEKLLKEGGYRTVGQMFYEKFKQTNPDKKRKRNTPDKYENSIQRSLLKKEIEIIFEEQQKMAHLMAKEELKQQYIDDILMKEEVIDEKKLKNMMRNCEFVPKEKCAPKESYIAERKVLFDRLNTLELVDTQNKDRHLQLDKDQRDKIVALAYKNVKVTFAQIRNELGMENDLDKRFNLCSYKEKDPEYNKKIDCEILNGKLKFSEKHKVPIVDIDTGEVKILDEEIKNIFESKKKLWPKAKKISVYYSDIRKQLNLPGDFRFANLKGYTKSAAELGSEAKYLKQFEDDTFVELKGYHKIKNAIEKDCGKEKWSELAEDEDNLDVIAEALVYHKSDETRSQYLKGKGIVDADIINTVLKINMKQLANHSKEALKALLKYMEKGDLFNEAKEKCGYGKIDYKKQAILQPYKGFFENNPAVARVVSQTRKLINAIVRKYNDQYPIDQIHIEVATELASGKKMRNNISQGQRRYLEEKKAAEERCREKGLDPEEGQNLLMFRLAEQQNYFCPYTNTKITLYPTGAVNEVYIKDCEIDHVIPMSRSFNDSLNNKILCTQKANQDKKDRIPFEWFEGMYDRDSKEWTEYENRVKKMYGVPYSKRKNLLRKSWTEKDKERFLSRNLNDTRYATRHIADYLRKYFDFSKSQRDDIKDVSRIQLRSGGITAFLRYMWGLNKDREENDLHHAVDALVTACSTNGHVYLVSNLSKEIERKGKSWYKHFGWVRDRFKPWNNIREDVQKAVENVFVSRMPRHTVTAAAHEETIISGEEQDKNRTLEVRGGFAKMGDMVRADVFMDEEGRNYVVPIYSVDIFSKKPPPDKYVPDDYSLSYERWPSVKDDNQKFKFSIFKDDLISLNGKMYYVSFFEASTVNVNVKNVDGSIFPDKKDALDPYTKKICYRPKRKGRKCLLKKYSVDILGNYKEIKQEKRIGNRFKDVV

SEQ ID NO: 7482 - protein, 1215 aa, unidentified
  REGION 1..1215: note = Description of Unknown: Cas Enzyme sequence
MKEKVLGIDLGTNSIGWAIVEREDEICELIDKGVVIFQEGVARDKGNEKPMVQTRTDARASRRHYFRRRLRKIELLRVLVSNNLCPNLSEQQLIDWKTKHSYPLDKEFIEWQRTDDNYDKNPYHDRYIALTRRLDLSDINQRYILGRALYHLCQRRGFLSNRKDSTKELDGAVKQAISDLSTKMEQAECKYLGEYFYKCYQSGEKIRGLYTSRNQHVRAEFDAICDKQNLSEELRNSIARAIFYQRPLKSQKGLVGKCTFEHNKARCPISHPSYEEFRMLQFVNNIKVKTLYDTEYRQLDESERAQIAPLFLRKSKLSFDFEDIAKKLAGKPICYSHLEEKPNAAYKFNFAMSTSLNNCPVTSCFAEIFGNDWRNELKSRYKRADNKSENEIINDVWHALFSFDDDDKLRQWAIDNLSLDEDQADTFIKCPIHQGYASLSLNAINKMLPYLRQGLRYDTAVFLANIEAVLPIQVKEDADQLDDIKSQVVDLMNEYESSSLLKKYTKVELINDMLLGIPGVEYNDIKKLYHPSQLQTYHEAQLNKNGELLLGSPRISSIRNPMAMRALFQLRHLINTLLKEHKIDRTAKINIEFARSLNDANMRKAIERYQRENEAKRKQYKDRLIKEYKDITGRDIIPSDDDILKYQLWEEQDHKCIYTNNQIDISEFLGGNPKYDIEHTVPRSRGGDDSLMNKTLCECRYNRAVKRAKLPSELADHENILAHVDALGWKDEIEDLRKKISRTKGRYFASKEQKDNNIQYRHYLELQLKYWQGKYSRFTMTEVPKGFSNRQGVDIGIIGRYAKEFLASVFHTPEHSLIYTVKGATTADFRKMWGLQEEYTAKERVNHCHHCIDAIVIACIGKAQYDKWAQYCNQKELSDWDCAEKPTFPKPWATFTQDVKNITSELLITHHTPDNTLKQSKKALRIRGKIQRTPDGKTIYQQGDTARTQLHLQTFYGAIKRNGELRYVIRKQVDALEPKDIKNIVDDTVKSIIEEQISAKGFAKAVSEPIWMNEAKRIPIKKVRIYAGGVTKPIHLKKQRDLSVKEYKQDYHVSNDGNYCLAIYEGYNAKGKIKRSYKLISNLNAVKADRSSNLVPLSDENEFPLKWTLKVGMMVLFYEKSPDEVYNATQKELVRRLYKITGLSSLPVGSGYGSIVLRYHQEARPAGEYKNKNGAWIIGEEIRPSIFVYHTQFNALVQGQDFEITDSGEIKFFKI

SEQ ID NO: 7483 - protein, 1424 aa, unidentified
  REGION 1..1424: note = Description of Unknown: Cas Enzyme sequence
MKKILGLDLGTNSVGWALVNEAENEKELSSIIKLGVRVNPLTVDEVSNFNKAKGETPNQERTSKRGARRRWQRYKLRRQHLIDIFIKQGWITSDALLTEDGNNSTFETYRLRAKAATEEISLMEFARVLLMINKKRGYKSNRKVKGEESGAFVDGMEVARFLQIHHMTPGQYGLQLMNEGKTKLPAFYHSDLYAELLRVWNVQRVYYPQLLTDELFKKIEGCNKSKTWSILSSSLTWNEMRNGESVPCRLEGLKRSVKGLDLKRQDYSWRSIALTERMELEELAVVLQNINADISASGSYLGRISDRSKELCTHHETVGQYLMRSLAENPNESLKNRVFYRQDYLDEFNTLWDKQAMYHPELTSALKQEISEECIFYQRHLKSKKGLVGRCELEAKSMEILKEGKSRTISIGPRVIPRSSPLFQQFKIWQTLNDVEVSLAVGRGLRRQKKSEIPTLFPPTSPEEHLSIEGHRRLTPDEMQRITQELSIKEKLTKDEILCLLSTDIPKESLDLNFKEVRGDTTGAVLYRAFLEVIEQSGHDVGDIKRPAAELRRRMHDFFGKKEWNDAVLDFDATKPLDEQSYFRLWHLLYSFESDHTPTGDGCLKERIRQLCGMKAPDVSVDALSAVHFDEDYGNLSAKAIRKLLPEMMNGKRYSEACEMVYGTHSATSLTKEQNAERELKERLDLISKNTLRNPVVEKVLNQMINVVNEVIATYGRPDEIRVELARELKSSAKERLERTEGIAKSTKESEKIREILKGEPFNLTQVSKNDIIRYRLYKELEPNEYKTLYSNQKIIREDLFSKRYDIEHIIPQARRFDDSYANKTLELRDINIEKGDRTAYDFVLEKYGEEKAQAYLRRCADFFGTHSAKYRNLKASEADIEDGFVDRDLRNTAYISRKALELLREVCRCVSATSGSVTARLREDWQLVDLMRELNWDKYKTAGLVTYTPTRDGKIIGHIQDWTKRNDHRHHAMDALTVAFTKPVYVQLFNNLNASMKESSQAYLIKRKYVHNRKVASPIPLSTFRSEAKKALEDILISVQTKNKVVTRNKNKTKRADGGESVRIQLTPRGRLHEETIYGSRQVYATHEEKVNASFDVAKINTVCKKVEREALLQRLSEYGGDAKKAFTGKNALSKCPVWIDEAQGLAVPEKVRTVVLQREGTVRKEIGKDIKIEKVIDKRVQQLLRERLKLYGGNAQKAFSNLEENPIWLNKEKGIRLKRVTIRVMDACVPIHQKRDKNGRLMLTAEGFSLPTDYVCTGNNHHVAIYQRPMVDKQGLLVLDEQGNPKMVLEERIVSFLEAVTRSGQGLPIVDRSYRHEEGWRLLFTMKQNEYFVFPDEDTLFYPSEIDLMNPENQARISPHLFRVQKFSSKYYVFRHHLETNVEDNSALQGKTWKRVQSLGGLEGAVKVRVNHIGQIVAVGEY

SEQ ID NO: 7484 - protein, 1521 aa, unidentified
  REGION 1..1521: note = Description of Unknown: Cas Enzyme sequence
MKKILGLDLGTNSIGWAVVNSQTTDDGKEVLTGIDSCGSRIIPMDAAVLGDFDKGNSKSQIAERRGYRSVRRIRERELLRRERINRVLDILGFLPEHYSRALDRFGKFASREEECKLAWRKDETGQHTFLFKSSFDEMIADFAKSQPALVADSKKVPYDWTIYYLRKKALTQKIEREELAWILLNFNQKRGYYQLRGMDEDEEDGDKKAKTRQYFDRQVITKVTDTGTLYKGLKILVVELADGSKGKVFRRDIPEWAGQEKDIIVTVDLDKDGNDRHEDDGSLSCRYNIPTDAEWDTKWALVKAKTQQDLDNQRKTVGAYIYDTLLQRPDQKITGKLVRVIERHYYKDELIQILESQLRFHDELRDKEMYAKCIEALYASNEAYRNSIAARDFVYLLVDDIIFYQRPLKSKKSLIDNCPYEENKYTDKDSVEHTVPLKCIAKSHPLFQEFRLWQFLSNLKIYQKERRNAVTNRIETDVDVTQRLLPDEESYVALFEWLNDKKEITMDGLLKYPPFGLKKDVANYRWNYVDDSNKKYPCNETGAQIAAFLSKAGIAPSFIKEDGNEESLWHILYSIEDKQELTKALTSFAGKHNLGEDFVTVFKKFPAFKKEYGAYSSKAIKKLLSVMRMGSHWSEQAIPADLRSRINKIIDGEADESIDIKTRERVASLTSVSDFSGLPVWLACYVVYGRHSEAKEIQQWKTPDDMNDFIRSFRQGSLRNPIVEQVITESLRTVRDIWRQVGAIDEIHVELGREMKNPADKRKKMTQQILDNENTNLRIKALLVEFMNPEFDIDDVRPYSPSQQDILRIYEEAALNGTEDVPDDIKEIIAKFNQTDIKKRPTHTEVMRYKLWLEQKYCSPYTGAPISLSKLFTSAYEIEHVIPQSRYFDDSLSNKVICESEVNKLKSNDLGYEFIKKHHGEIVTLSGGRTVKIFNEAEYEKFVSDNYSRNRAKKEKLLLEDIPEKFIERQMNDSRYISKVVKGLLSNIVREDNEPEATSKNLIVCTGGVTDRLKKDWGINDVWNSIIMPRFERLNDMEGSTRFTAVNGNGKLVPAMPLELQKGFNKKRIDHRHHAMDAIVIACAGRNIVNYLNNASASKNATTSRHDLQAILCTKTKIDDNGNYRWLLNKPWDSFTQDVKFALNHIVVSFKQNLRVINKTTNVYQHFDENGHKVMSKQTKGDAWAIRKPMHKETVFGEVNLRRTKTVQLSVAIKKPERIVDKILRERIMKLLRSKFNATRIKAYFEERKGEWGETNLAKIEVYYFTKETNERFFAVRKSIDTSFDEKKINESITDTGIQKIMLNHLKANGGKADIAFSPDGIEEMNRNIVSLNNGVAHKPIYKVRVYEQANKFAVGETGNKRSKFVESAKGTKLFFAIYKEEIVDSKTGCLTTKRSYATIPFNIVIERLKQGLRPAPDNEEGMTPQYILSPNDLVYLPTTEEIENRHISTPIDTSRIYKMVSSDVGTCFFIKHEVAIPIVNKVEFTTSNKMERAITGEMIKETCVPISIDRLGNIKIKEEL

SEQ ID NO: 7485 - protein, 1215 aa, unidentified
  REGION 1..1215: note = Description of Unknown: Cas Enzyme sequence
MAERVLGIDMGTNSLGWAVVEKDENNCKLLDKGVVIFQEGVARDQGNEKPAVQGRTDARALRRHYFRRRLLKIELLKVLVKYGLCPELSEQQLMDWKTKRSYPLDKDFIEWQRTDDNCDKNPYHDRYISLTQKLDLTQIQHRYILGRALYHLAQRRGFLSNRKDSTQEQDGTVKQAIGDLSTKIEQAGCKYLGEYFYKCYQSGEKIRGTYTSRNQHIRAEFDAICNKQELSGELRKALIRAIFYQRPLKSQKGSVGKCTFECNKSRCPISHPSFEEFRMLQFINNIKVKTADDNDYRQLNATEREAIKPLFLRKSKTSFTFEDIAKKLAGKAINYSHLDDNPNAAFKFNFDLSTSVSNSPVTSCLTEIFGTDWRNALRQRYKKAGHKTQTEVVNDVWHALFSFDDDEKLRQWGIDNLALTDEQAEAFVKCPIHQGYASLSLNAINKMLPYLRQGIRYDTAVFLANIEAVLPIAVKEDADQLDGIKQQVIDLLNEYDNNPILKNYTKVELINDMLLGIPGVEYRDIQKLYHPSQLQTYPEAQLNAKGELLLGSPRTSAIRNPMAMRALFQLRHLVNTLLREKKIDRTTKINIEFSRNLNDANMRKAISRYQRDNETARKKIVDRLITEYKSSTGQDIIPSDDDILKYQLWDEQKHRCIYTGKRIDISDFIGSNPTYDIEHTVPRSRGGDDSTMNKTLCECTFNRKIKRAKLPAELAQHDEILANIDALGWKEKIESFRKQINSTKGHYFATKEQKDANIQRRHYLELQLKYWQGKYSRFTITEVPKGFSNRQGVDIGIIGRYAREFLATVFRAPNRNLIYTVKGATTADFRKMWGLQDEYTSKERVNHSHHCIDAIVIACIGKAQYDQWAQYCQQRELASWDGAAKPSFPKPWETFTQDVKAITSELLITHHTPDNTLKQSKKALRIRGKIQKTSSGKIIYQQGDTARAQLHLQTYYGAIKRNGEIKYVIRKQVDSLEQKDIKKIVDDTVKAIIEKEIAAKGFANAIAGPIWMNKEKRIPIKKVRLYAPDVTKPIHLKKQRDLSIYNYKQDYHVDNLGNYCLAIYEGCDAKGKTKRSFKLINNLSAIKSHKSGEIIPLSDDNEYPLKWTLKVGRMVLLYEKSPKEVYEASLQELVRRLYKVTGLSINSTGPGYGSIELRYHQEARPKKEFKAKNGAWKTGEAIRPGIIMLNTQFNALIQGQDFEISDSGEITFLRQ

SEQ ID NO: 7486 - protein, 1078 aa, unidentified
  REGION 1..1078: note = Description of Unknown: Cas Enzyme sequence
MENNGNISFGIDLGIASIGWSVLDLDNNIIKDKGIYLFTEAEKAENRRILRGTRRRKKRKKHREERIYEILKRKNIYLKNTVDSNLLEVRLKSLKEKIEMQDIINIIFYFSRHRGYIPFKDEDERKSEIVDELRNENYLACEIQNEIYKNNKQYRGDEYLMQHSDYMKELHEMLEEQSKYYSEIDEEFIQDIEDIINSKRKFWEGPGGPRENQLNKYGRYRTLDDLIEYNKNKNYHKYLFEDLIGNCSVYANEKKASAWNFYAECFNFYNDIVNLRIDGQDLDETNKNFFEVVSNNVYKLKAESIQNLKDVVLNSKSVNYNNLFRKIFNIDFDKIYGYKKNSEGNAEICKFEKIRSIKNKLEDEDMISELLSDMDAYNKAIYLIQVSPDRQTRYEILKDNLSNIYSEKLLTFLSNCNLENKYHSFSEKALKKYLELMQVNNENSSYIERNFESDINSDVEEELIRNYIGENIEKGNLKYINSKYVEDIVASPATKKSLRKAISIINKLFSKYGYPNYICVENTRDLLTEKKQKEYEAKTLENQSKRTNAKKKLKEQGYEENDTNIDKYMLLDETNFKCAYCNKDITVANCEVEHILPRSITANDTFLNKTVSCSQCNGEKNNRTPYEYLMSIGMYSDYKERVIKNKKFVDEKKNNLLFEQNLNKYEKNFKNRNLNDTAYATNELANQLNIFKKAYLRNNYGEFLDFKVLKVPGQFTGIIRKKANLDKNRDLDYHHAVDATIVASIPKLKIGKLISMIQNEPDKYWKINNLNEYRESLYEDLYLNKDLKEDLLNADFSNTRAVREVTKKATGPLFDANISKVIIKDDQYYKIEQIDNIYNIMPADFEKEFNQNKYFLCKDNNPELYDRLFKIVELYSNKSKKVNPFVEYCKENNVKDGEKFDYLKHGIRQSNNPNSSVVVRLRFLQKVNNPYIISNKKLIKSNRENKKEILLMYDSLKSYCTRVYRDIENGKLYFMPIYKIFIDNNSGEIRTDSDYYKKVYNECVKQDIEKLEKYMDIYNNEYVRFENKKGEVAEGLVSYYDKSNNKIEIKKTSKNITANTVKIEKIKSDVLGLYNLNF

SEQ ID NO: 7487 - protein, 1208 aa, unidentified
  REGION 1..1208: note = Description of Unknown: Cas Enzyme sequence
MEKILGIDTGTNSLGWGIVQKEETGNYTLLEHGVNIFQEGVKIEKGIESSRAAERTGHRSIRVHYWRRKVRKIRLITVLSQAHLCPPVSFGMLREWRTKRIYPHDQDFLIWQRTDESQNINPYYYRYLCLTKKLDLSDLSQRYILGRALYHLNQRRGFLSNRKESTKESEGNVKQGISQLSEDIAAAGCRYLGEYFYTLYQKGEKIRSHYTARNEHYLAEFHAICAMQQLDADLVGRLEKVIFFQRPLKSQKQQVGKCTFEPKKARCSTSHPLYEEYRMYAFINNVKVKTPKDDDLRPLTTDEKELIIPLFMRKSKPSFTFDDIAKKIAAGKKNYAYAGDKGDKPYKFNYHMDTNVSGCPVTAGLREIFGESWVDAVCEVYTLAKGKFRLEIVNDIWHALFFYDDDDKLKGFAQDRLQLSEEDAEKFCKIRVAQDYAALSLKAIKKILPYLRDYGLIYSEAIFLANLCEVVPSYIWNTAEMRRAVIENVIEVMHSDESDTEGFTTEQRVKSYLKETYFVEDKDLKKLYHPSMIDVYPRQRRNDDGIYQLGSPRINSVRNPMAMHSLFRLRKVVNQLLAEGKIDEETVIHIEFARDLNDANRRKAIQDYQRFNEKDRETCKKKIQELFAEKNMTYEPTDTDVLKYQLWEEQGHICLYTGESIGLTDFLGSNPKYDIEHTIPRSVGGDSTKMNLTLCQNRFNREIKKAYMPSQLANHEDILQRIASWKETYEELDKRIRKLRGSSAATKEMKDSIIQRRHRLSLERDYWRGKYQRFTMTEVPEGFSRRQGTDISVISRYARLYLRSVFHKVFIVKGIATSDFRKIWGIQEEYEKKARVNHAHHCVDAITIACIGPNEYAKLAKYYHALEEFEKYGNERPSFEKPWPDFVNDMKHIQDDLLVAHYTQDNMMKSARRRILTPEGKKLAMGDVARGSLHLDTYYGAIERDGEVKYVVRKSLNSIEEKDVKNIVDDVVREKVEKAIAIHGGLKKAVEADDIWMNRDKGVRIAKVRLYAGSVTRPINMRQQRDESVHEYKRQYHVQNDRNYMMAIYVGKTDKGKEKREFELVNNLMAADFYRRSNERRKMNDTLFPLKSKKGYDLTYLLRIGGLVLLYEESPEEVWDLDASGLQRRLYKITGLSSMVISGNAYGTISLVHHQDARPGTDVKLKNGAYVQNEEFRAGIKELHTQFKALIEGVDFKLNELGEITRLI

SEQ ID NO: 7488 - protein, 1390 aa, unidentified
  REGION 1..1390: note = Description of Unknown: Cas Enzyme sequence
MKKWYLGLDIGTNSVGFCATDTYYNILKKNGKLQCGSRLFKNAKDASKRRLWRSSRRRSARRKFRIDLLQELFDEEISKKDESFFIRLNESYLHQEDRSANYNYPLFNDVDFTDKQYYKKFPTIYHLRQHLLNNDESDIRLLYLACHHLIKYRGHFLFSQFNTKQSKISYSDIIKTINDNLRLQEFDCVFEQINNEEIRKLLLDKSKTVKEQLDVISKILNPNADKRLKAIFKTINGDKISLKDIWKDLKEAEKEFDNLKDFKFSSENYDECLVRVESILSEDRLEMLKILKLFYDSICLDRVLDGSDYISESMVKRYKEHHEDLKILKCFIKEHIPDEYSNMFCQNINKEGKNGSYGNYIGSNLTHNKKVISHCKISVGDNKGKEPMTANHDTFLKYTKEIIEQVSPDAKLTEDYKYLIKRIDNKALCKIQNTQDNSYIPYQLLEKELSAILNRQKKNFPFIDSVFDKIKSLLTFRIPYYVGPLSEKDKGKFAWIEKKEGFEKQQVLPWNFDEIVDKAKSGENFILRMTSKCTYLRTEDVIPKQSLLYQKYMLLNDLNNLKINGNRISQELKEFLYNGICQTAQSLTKDKIKKYLIEQGKIDKNAIVGKENANDLAFNSSLSSYIKFKEILGDKFDEKMCENIIKWHTVFGDIKEPVLDKIKDFYGDRLTDEQIHKIGKLKFRGWARLSEKFLNGITTTYKKTGETALTIIQLLKDTTLNLMEILNNDNYIPKFLEIVDNSNAGNEDIKVDYDLISELYCSPTVKRSIWQSILVSKELAKINGCAPKKVFVEVTRAEDKSPKGKMEASRRKQIEKFLNEAAKTKDEKIKKDIITLKEKFKNKEANEFRADRLYLYFMQLGKCMYTGEPIDLDSLNNPTLYDIDHIYPKSKILDNSLDNRVLVKRIVNANKEDVYPISSEIQSKMSGFWNMLKEKNLISSKKYDRLICTKPLSDDIIGGFINRQLVSTNQAVKETIKVLKILFGNEIKIVYSKANNVSNFRQQYKLIKSRKVNNLHHAHDAYLNIVVGNVWSSHYSWYKDNYRKIELDKMFSKPMDGVWMPNYIEKIKTYVTDNKKYLDKFVVTTRPFEKKGEFYKQTIHPKGKGQYELHKGLDTKKYGGYKDGYTAYNCIIEYSDKNGKRIKGIFSVPVRYTYLEREKKYDELLKIITTENGIADKDPKVLISKILMFSVLEIDGVRYHMRSGVNPLQCSVTAEWYPDKEIIQIVHDISKFKENENKNLYSDQIEKWKKTMDDIVFYKREQNPKIKESKMISRVNNLKLYDAIIEQVKKPFYANYGFAKKVLEGKIEHQKFEALPTYEQMTILISLLNVITTNGTAATASDASKIGGSKNETNKYLFRGCNDITTHNIYLITQSVTGLFENRIEINKVC

SEQ ID NO: 7489 - protein, 1062 aa, unidentified
  REGION 1..1062: note = Description of Unknown: Cas Enzyme sequence
MKYIVTFDIGVASVGWAVIDKENAIVIEAGSNIFPEASATDNQMRRGMRQSRRMKRRERTRLNDFNKLWENNTFVIPKTREIDIVSLKVKALYENISMDELYMVLYNYLKHRGISYLEDAVDDSVSGGSAYADGLKLNTKEMEEKFPCEIQKERLEKFGKYRGQTQIIDSDGDKLYLSNVFTIGAYRKEIERVFETQKKFHAELSDEFCDEYLVIFNRKRKYYEGPGNEKSRTDYGKYTTRLNEEGAYITEENIFEKLIGKCSVYEEELRAATASYTAQEFNLLNDLNNLTINGRKLQENEKRAIVERVKTSNSINMRKIITDVMGEKIEEFYGARIDKSDKEIFHKFEVYNKMRKALADINVDITDFTREELDEIGYILTINTDKEALIEAFDKSALGITEEIRACFIILRKENGSLFGKWHSFSLKIMNELIPEMYEQPKEQMTLLTELGIMKGKTNKFAGVKYIPVDAASEEIFNPVVRRAVRISFKILNEIMKKYGILDEVVIEMPRDRNSEEEKQRIKKGQEISEKEMSYIKEKLASVYDIRLSTADFSAQKQLALKLKLWNEQDGRCLYSGKSIDPRDLIEHPDLFEIDHIIPRSISFDDSRSNKVLVYGGENQEKGNQTPYYYLHHSIGNWSFEQYKATVISLSKKKDYGISRTKVKNLLFSDDITKIDVQKGFINRNINDTRYASRVVLNTIQSYFASKELDTKVKVIRGSYTHQMRVNLKLDKNRKESYAHHAVDAMLIGFSQLGYESYRKLQGSFIDFETGEILNKEMWDKKMSDEVYAEYLYGMKWSNIRHEITRAEKEVKYWYYVDRKSNRGLCNQTIRGTREYSGKTYKINKLDIRSKEGIAIFKKLAFSKKESDREKLLVYKNDRRTFDDLVQIMNEYADSPNPFVQYEKETGDYVRKYAKKHNGSRIDKLKYTDGEVGSCIDISHKYGHENGSRKVVLENLVPYRMDVYYKESESAYYLVGVKQSDIKYDNGAYVIDEDAYALILVNEKLIKPGQMRTDLAELGYEFQMSFYRNDIIEYEKDGKIFRERFRSRTKNNRNYIETKPIN

SEQ ID NO: 7490 - protein, 1319 aa, unidentified
  REGION 1..1319: note = Description of Unknown: Cas Enzyme sequence
MKDYFVGFDMGTDSIGWAVTDENYNIPKFNGNAMWGVRLLDSGETAQERRNFRGSRRRNERNKFRQSCLEILFNEEISKIDVSFFQRLKDSALYDGDKKVEGKYSIFNDADYNDKNYHKAYPTIYHLRKELIESQEPHDIRLVYLAVSHIIKNRGHFLFDSDELGNGNNSSFEKMWTELDNYIKDNEYYDEYSKGLLNCNDFITIENILKNSALTSTKKKDLLIKELSFNKKENVFEIAVITLLSGGTIKAKDLFNTDEYEDSEAKSITFKSGYDDKVLIYESTFAEKFELIEKIKAVYDWAILADILNGENYISFAKVDTYEKHKDDLKLLKKYVKDYVPEKYNAIFNDNDNKKANYLAYSGYSKKNSVAKKCSQEDFCEFLKKQLPKDVLDEKYQNMYNEIASNSFMPKAVTKDNSVIPMQLNRNELKAILKNAEKYLPFLIDKDSTGKTVSDKIIDIFNFRIPYYVGPLNTHTDKAWVVRSNEKIYPWNFNDVVDIDKSAEKFIENLTSKCTYLPREDVIPKCSLLYSAYMVLNELNNLKIDGDPISVELKQDIYNNLFLKRNKVTNAALKKYLLLVGYGKDIQITGVDGDFKANLKSFRDLEFVDLPYSDKEEIIKAITIFGDDKKLLKRRLKNKYGNKLSNENIAKISKLKYTGWSKLSKKFLTGIEAMLKNGTAEVTNIIRALWETNDNLMQLLSDNYDFRKKIDEENRNIESTSLKQEIDNLYVSPKIKRPIYQTMQILDEIVKIQGNEPKKIFIEVARGEEKKERKVSRKQRLLDLYKYCKNDEKELYQQLINTDESEFKRDALYLYYTQFGRCMYTNQKIDISEIYNKNLYDIDHIYPRSKIKDDSLDNRVLVTKKSNEDKGNIYPINQTVRDRMIPYWKMLFSKELISKQKYERLVRNSMLTDEELSSFVARQLVETRQSTKAVATLLKKRYPNTNIEYIKAGLASDFRRDFDMLKCRDVNDYHHAKDAYLNIVVGNVYTTKARQSYFIGNLQSGKWSINRMFDYTTNGAWEVENNKSLNIVKSTMAKNNIRFTRYAFKQKGGLFDQNPVKKGSGQVPIKKGMDISKYGGYNRPSSTYFAFVEYVDSKGKTYRSFEPIDLYIEKEYLNNPKEFISNRLGVDDVKIIIPCVKYNALISIDGFRMHLSSKSGGGVTLVCKPAIQLVVSQKQEKYIKKISNYLIKCNELKKEKEVTKYDELSAEENLDLFDTLINKMSKTIFAVKFGKLGNTLTDKRDEFESLSLYSQCYTLMQIINILHANVLSGDLTALGEAKKSGITTISNKLQSSYKSAKIINQSITGLFEQEIDLLK

SEQ ID NO: 7491 - protein, 1380 aa, unidentified
  REGION 1..1380: note = Description of Unknown: Cas Enzyme sequence
MKKILGLDLGTNSIGWAVVQEAETETEASSIVKVGVRIIPLSNDETQYFEKRKGETLNAQRTQKRGMRRNLQRYKLRRTALIDKLKDEHWITDETLLSEHGPRTTFETYRLRARAAYAEISLSEFARVLLMLNKKRGYKSNRKATKSDTDNDGTFVSGLDVARVLYDRGLTPAEYVLPLLQQGKNFIPDFYPSDLQQEFQRIWTFQQTFYPELLTDAVLAEVTGKNRTQTWAILAKHWQTEMKDASGNISLRPLQGIKRVVKGRDLKVENYAWRVQALRRQMPLEELAIVLQEINGAISGSSGYLGAISDRSKELYFNHRTVGQYLWHLIETAPGISLKNRVFYRQDYVDEFERIWTCQAQYHPELTETLKGQLRGNIFDQRRLKSQKNRIAYCEFERQQKTVDVDGKTKTITIGSRAIPKSSPLFQEFKVWQGLNNLRVSKAGDARELTLEEKRRLAIELSIKEKLSKTEVLKFLFGKSAGWDLNFKTVEGNTTGARLYQAFNTLVEYSGHTPFDPKAPAAETREGIASIFRALGWNTAVLTFDATLPLDSQPYYQLWHLLYSYESDKSATGDEALLRKIADLCGIEPAYAPALSRVTFTADYGSLSAKAIRKILPFMQEGTPYDVACLYAGYRHSASSLTREENETRELKDRLDLLRPNELRNPIVEKILNQMVQVVNAIIQTYGHPDEIRVELARDLKKSAAERQEASDGIAAATKVNEDVGKILETEFHLTHVSRHDILLYRLYQELKNNGYKTLYSDQYIPVEKLFTNQITIEHIVPRALLFDDSFSNKTLEYNDVNIEKGKRTAFDFVQERYGEAAVERYRRVCELCVKKGSTKYRKLMMTQADIPTDFIDRDLRNTQYISRKALSMLSDVCRSVVATTGSITDRLREDWGLVDVLKELDWDKYNTLGLTETYRTRDGHEVRKIKDWTKRNDQRHHAMDALTVAFTRAAFVQYFNNMNSGEDSSSSIYAIKQKYVQKTHVLPPIPAPQFRAEAMQHLDNVLISFKRKNKAVTYRTRLDQDGTSHKFSTPRGALHEETIYGRNLEYKTSDVKVNASMDERMILTVCDHRYREALLFRLHDYHDDPKKAFTGRNSLDKNPLWLDAAHTSAVPLVVKVVHLEAYYTVRKAIDKGLKIEQVVDARVQAILRQRLEEYGGDATRAFADLEHHPIWLNASKGISIKRVTLRASVKGCIPLHDLKDKDGHYLLSAEGLRQQTDFVKPGANHHCALYRRPVVDKEGRISYVIEEVMVSFFEAVARALNGDSIIDKNFMAHEGWQFLYTLQQNDYFIFPSDTFNPVDVDLLDPANLAVISPHLFRVQKLSSKDYNFRHHLDTTTDAAPQLRDITWKRITNLQTMSTVIKVQVDRLGRIIRIGE

SEQ ID NO: 7492 - protein, 1302 aa, unidentified
  REGION 1..1302: note = Description of Unknown: Cas Enzyme sequence
MDYYIGLDMGTNSVGWAVTDPQYHLIHKKGKDMWGIREFDSAEAAAERRTHRVSRRANQRSQVRIGLLTQIFEEALKKEDANFLARLDNSFYKAEDKEETLTTLDAIFADDGYRDKDYYREYPTIFHLKYDLIMDKVPDDGRYARKVYLALLNYFKRRGHFLNESLSGNDEGNKDVWAAYQELCNAVYEELEIAMKQDSTLSEHFRAVFCDTSISRSRKREMLVELLGIFKKDDVQQYLIVNAICGLKTDLLKLFSIESEQKADIDFSSAGFEDKLPEVYAVIGESYANLIDAMKQVYDAGVLAGIMSGNDADGNPIKWLSQARVNSYEKHKKDLKILKECIRTYCDTAEYDALFREEADGSYSAYIGSVNSGKKARRGEKLYASKSGERYANLKKRIKKDLESYTNDANVSYILNELDTETFLPKQLTFANGVIPNQLHEREVRRILDNAEKYLPFLKETDESGLTNSEKIIRLFTFRVPYFVGPVSQNYRGNGWAVRKPGMEQKTVYPWNIEDVIDYDDTREEFITRMVRECSYIAGEKVLPKESMEYQAFMVLNTINSIKIRNEKIPCALKQDIYHDLFEKNGKVTKKKILTYLKQRGVDVEENELDGIDTVIGCQLSTFRRFYGVFGEDLSKDSVRRMVEDIVFKGTVYGDSQKMLKQLISEKYGDSLNPDQLKRILGFKYRDWGNLSKQFLELEGCNKQTGEVVSLIRALWEDEDNLNLMELLHSDKYTFEENLKEKHQKSLKPISEFSFEDLEGMYFSAPVKRMIWQTLLIIREVTELLGCPPKKIFVEMTRSEEEIKGDAGRKDSREKELLDLYKSIREDRSWDAEIREAGVSGKLRSKKMYLYYKQMGRDMYTGLPIDLTELFDDNKYDIDHIYPRHYVKDDSIHNNLVLVDKRKNSRKSDNYPIDESIRNNEKISSFWRMLHEKKLMNDEKYRRLTGSRPFTEEQEADFIARQLVETSQATKGVNDLLKEILPEETILVYAKARNVSDFRKQFDFFKSRTINDFHHAHDAYLNIVVGNVYYTKFTLNPMNFIKKEKKEYHLGRMFERDVERNGYIAWKSPVFDKTTKKVAEPGESLATVQRMLAKNTPLLTRLSTTQHGAIADATIYSASRAKEEGYLPVKSLSNPKLMDVAKYGGYNSIKNAYFFLVEHEVEGKGKKKGKMVKIRTLECLPVHKRDYVENHEDGLYQYCLEIGLKNPSVRVKKIKPQSLIKVDGFPLYITGKTGNRFVVRNACNMILEPYWNCYIHAIDKYNKSGRLSEIITPEDNIRLYDELQKKHTSGIYAKRPNPIGDV

SEQ ID NO: 7493 - protein, 1126 aa, unidentified
  REGION 1..1126: note = Description of Unknown: Cas Enzyme sequence
MKKLYRVGFDIGIGSVGWSVLENDPITEEPVKIINLGVRTFSPNEVEKTGESTAKQRREKRGLHRRTRRKSFRMFRAKNLLKQQLNVDADSQLLGLSNQDVYMLRAKALDEKLTNEQLAKVVLNIFKKRGFKSNRKEQTSSKEEGMLLLAINENSKFIKEKGYRTVGEAIFKDERFKTQNCGKQIYSVRNHGGDYKNCFLRDDLKNELNLILLAQQKFNPQITDEFIAKIVNIFEQQRNFDEGPGAPSPYNAKFEIGNCTFMPEEKRAPKASYTFELFTALSKINNLKIDDEPLTNEQKQVLIEAVKEKESLKFEQLRKLLSVPQEKGFNLCKYISQSKNNSEELTVEEIIAQSEKATFVSLKNSYSIRKKLGVASSYQNSEIIDEIALILSVCKSDATIDSYIKDSEILKSLTDEQIVAIKGLNFDKFGSLSIKAMKKIMPYLMAGERYDKACQSAGFNHSSFEHEKMKYLKGKDVEEQMKDITSNVVKRAVNQTLRVLNEIIKKYGSPQFVNIELARDISKNSADRKKQTKYQEQNLEKNEQAKESLKNEFKLENPTAFDVLKRKLYEEQNGKCMYSGKPIDITRLFEPNYVQVDHIIPFSRSMNDSYNNKVLVLCDENQNKGDKTPFEYFGGNAEKWNNFVQRVNLIPNREKRKLLLKEKYGEDEQKEFISRNLNDTRYMSKFLLNMFDKYLEMTPSHNYKKVVSSVNGAVTSYLRKCLGINKIREDGDIHHAIDATVIAIVTQGQIQKIAKFNQLKEKFIYNEKQDVYISKSTGEVLTKQQKEEYEQAGIDTLSKKLPAPYPEFVKELELRSKIKYDNLKFSDSEKMELVQLGYDGEDAEITKPVFVSRMKTVKSTGAIHKETMMSAREYSQTKMLIKSVPVQSLKLDESTPEKTPLKDDKYPNVSIKDYYRPQDDRLLYLKLKNYLVENGKIPENIPIHKPKKDGSDGPVVRTVKKYEKSSSCVITRNGAASNDKMYRVDVFKKDGKYYLCPIYMNDVYAKKLPNKVIAIGKDWIDIDDTFEFQFSLYQNDLIKVKSKKNIVMSKNFNNPKSKKANSIENTEFLGYYCSTNISDATIKLISHDNCYYAGSLGVKTLLSIEKYYVDIMGNVYKAPVEKREGF

SEQ ID NO: 7494 - protein, 1353 aa, unidentified
  REGION 1..1353: note = Description of Unknown: Cas Enzyme sequence
MAKNYNIGLDIGTSSVGWAVVEEDTQKIIRKGKNKTPLWGVRLFEKAETAEERRNYRSTRRRYDRRRERIRLLQEEFKEEINIVDSNFYNKLKESKYNKKDLVNKTIIIEKEEQKLIKEYNNKYPTIYHLRNKLINSNEKEDIRLVYLAIHHIIKYRGHFNYPGEHFSVESLDLKEKLFSLFNNLIELVPELEINESYNEIITNEIIEESFLNVSKNDMKVKTKELLTQLTTNNKFISEYIKLLSGAKFSVKKLFNIEVESEEDLSITFRNSDYDDNYEKLEKLLSDKIEILSQMKELYDTIFLKKLFSGSNSTNLSGLMVERYNQHKEDLRFLKKLFDNERKDYNKLFRDGKDKCIYNKYITNEITNEEFIKEIQKYLPDVLESYDKELINKYNTDIKFRMDNGTFMPRITETENGKYPYQLNEDELVKIIEKQGKYYNFLLEKIDGKYKIVKLLEFKIPYYVGPLNKNSQFAWLKKNSDEKITPYNFDKIIDKENTAEEFIKRMISHCTYLNDKVDENGNIIEVNYALPNCSILYSKFKVMNELKQIKINGDSITVENQNKIFNELFLKTPGTITEKKFKDYLKVCPDYYALEGEFNITGYSADGKFANNMQSYIDFFGEDGIFNNTNYNENDAEQIIEWITIFEDNDILKSKVVKNYNQLSDNSIKKVLNKRYSGWGNLSRKLLCGIVTKDKKSGVGKTIMDYMHDTKENFMQIINNDEYKFQELIAEYNKLNNGVKFNYGLVENLATSPATKRGIYQALKIVDEITKYIGYNPKNIMIEMAREEQNTGRKDDRKTYLEKLYKENASKIEKYNTLISELDNQEKINTEKLYLYFIQEGKCLYTGTPINIDELNNDKYEVDHIIPRTLIKDDSIDNKALVLRTCNQTKKDSFVLPQTYRNSMRNWWEHLKTIKLISAKKFNSLTRTKYSDEDIQGFINRQLVETRQITKHVADILGGLYPKTKIVYLKANLSHNYRERYELFKFREINDYHHAHDAYLAAVLGEYKEKYMKKKIDFEAVKELNKKFYENGDYNKLKYGFVINCLDENEFDIVNKITKNFINEETGEALFDVSRFNKIVENTLYRNDILISKKTEIRTGQYYDQTKKKKCNDGIKLKDNMPIEMYGAYTSVNPSYAVMIEYEYKNEIKQRMVGMPIFVKDDNDKINYLKNKLNIKDNQELKIMSKPIPFYAYLNWNNQLCYLVGASDKVEVVNAKQFNYDKEFYKKHKYTLLKIFNNRNYKINEIQYDKELSEIIKYIVDKIDKEYELYKNLIPELKIITKYNENFDFSIENKEKIIVQLTNLLNCKSVNANFKFLDSKYSSAFGKKNGRIIEKCNVINTSTTAIKQVENEL

SEQ ID NO: 7495 - protein, 1138 aa, unidentified
  REGION 1..1138: note = Description of Unknown: Cas Enzyme sequence
MNGKNLKDYYVGLDVGTDSCGWAVTDDQYNLVKAGGHDFWGSFMFDDAQTAEERRMARTSRRRTARAHERLMILQQLFAEEISKVDPLFFIRLNNSQLFLDDKDKSLSSANILFDDKQYTDKDYFHDYKTIYHLRSELIDKPVTDIRYLYLAVHHIIKNRGHFLYDGQTFDVNDRQNVLSMFENVNSFLSDNDMPTLELANINEVLDCLKDKNLGKKAKFAKLKELFGVKSDKQQLAILNALSACKFSIKDLYAADEEFDSDKLSFDDSGYDEKYLAVENEVGADDCVLIRDLKAIYDWAILSNIIGDHKFISQAKVQTYRDHENDLAELKAYIRNNCDGETYRKVFRYSKGVANYAAYIGMDKHKSYSKCNKEDFYSFLKKTVNINDEHILKKIDDGTFLPKQVSSANGVIPYQLNYAELEAILNNAQQYFPFLNNEQDGLSVSQKILSIMRFKIPYYVGPLNDKDKKFTWVKKFDGMQNVRVTPWNFDKIVDRDASEEAFISRMTNKCTYIPTEDVLPANSLLYSTFTFLNELNNLKINGVKDMRARDLIFEYAKSHKKVTLKACLNLLEKNAIIPKDSKQEIFSGIDGDFKCSLAPFVDLKFLGEKIYTMPEMCEEIIVWITCNSDKERLVKRIKEKYGKYLTDEQIKAFKGLNYSKWGRLSKKLLCEIKSPRCADENGECLSIIQAMFATGENLMQLLSDKYGFADSIKEYNESISQSTAVTYKTVKELYCSPSVKRAIWRSLAIVKEIEKVMGKPPKKIFIEMAREVDDNSKKGKRTVSRKDELKFLYKSIKDEKRDWQDEIEDTADSKFNSDKLVLYYRQMGVCMYTGKQISLQDVFNTNICDIDHIYPQSKIKDDSLDNRVLVLKTANSAKTDIYPINEEIRHKMGGYWKMLLDKKFISERKYARLIRNTPLTIEECTDFINRQLVETRQSTKCLAQILREYFGDECEIVYSKAGNVDRFKQENKIIKIRELNDLHHAKDAYLNIVVGNVYNTKFNHDARVYFRNNVINSYNLTKLYDKDIDGAWVVADRHRIIDTVNKNTCRVVRMTESGKGALFNATIKTAGANDNLIPLKGKGAIANTARYGGYDSATTGYFMLVKSVGKKGNAIISLETMPLYVSKLIGDDLVKKIN

SEQ ID NO: 7496 - protein, 977 aa, unidentified
  REGION 1..977: note = Description of Unknown: Cas Enzyme sequence
VEEKNFKDYYVGLDVGTDSCGWAVTDDKYNLIKAGGHELWGSYMFENAQTAEERRMARTSRRRVARAHDRLMLLQQLFIDEISKVDPLFFIRLNNSQLFLDDKDKSLKSANILFDDKQYADKDYFKEYKTIYHLRAHLIDKPIDDIRLLYLAVHHIIKNRGHFLFEGQTFDVNDSKNVLCKFEEVNNYLSDNDMPTLELANINDVLNCLKDKNLGKNAKANKLKELFGVTKDKQQLDIINSLCGRKFTINNLYCTDEEYEIDKITFDDSSYDDKYLKIENQVGTDDCVLIQNLKAIYDWAILSNIVGDSKFISQAKVKIYEEHKADLAYLKSYIKSNCDADTYKKVFRYSKGVANYAAYIGMDKQKGYSKCNRDDFYAFLKNTIKVKDELILKKIDDGTFLPKQVSSANGVIPYQLNYAELSAILNNAQKYFPFLGEEQDGFTVSQKILMLMKFKIPYFVGPLNDKHKKYAWVKKFEGTQDIKVTPWNFNKIVDLDGSEDGFIRKMTSKCTYIPTEDVLPASSLLYSQFTFLNELNNLKINGVKDMRARDLIFEYAKTHKKVTLKACLNLLEKNGIIPNGCTTEIFSGTDGDFKNSLAPFVDLKFLGDKIDTMPEMCEEIILWATLISDKDRLFKRIKEKYGKYLSDEEIKRLKGLNYSKWGRLSKKLLCEIKSPRCTDENGECLNIIQAMYSTGENFMQILSEKYGFADSIKEYNQSCNQTTTVTYKTVKDLYCSPSVKRAIWRSLDIVKEIEKIMGKPPKKIFIEMAREPEDKSRKGKRTISRKEQIKYLYKDIKDNERDWKEEIEETADSKFNSDKLVLYYMQKGICMYTGKPISLRDVFNTNICDIDHIYPQSKIKDDSLDNRVLVYKEVNQHVKKDIYPINEDIRHKMSGYWKVLFDEKFISEKKYARLIRNTPLTVEECTDFINRQLVETRQSTKCLAQILRQYFGDKCEVVYSKAGNVDRFKNGVKDDNK

SEQ ID NO: 7497 - protein, 1215 aa, unidentified
  REGION 1..1215: note = Description of Unknown: Cas Enzyme sequence
MKEKVLGIDLGTNSIGWAIVEKEDENCKLLDKGVVIFQEGVARDKGNEKPMVQTRTDARASRRHYFRRRLRKIELLRVLISNNLCPNLSEQQLIDWKTKHSYPLDKEFIEWQRTDDNCDRNPYHDRYIALTKKLDLSDVNQRYILGRALYHLCQRRGFLSNRKDSTKELDGTVKQAISDLSTKMEQAGCKYLGEYFYKCYQSGEKIRGLYTSRNQHIRAEFDAICDKQDLPDELRNAIARAIFYQRPLKSQKGLVGKCTFEHDKSRCPISHPSYEEFRMLQFVNNIKVKTLYDTEYRQLDESERAQIAPLFFRKSKLSFDFEDIAKKLAGKPMYYSHLEEKPNAAYKFNFAMSTSINNCPVISCFVEIFGNDWRNELKSRYKKAGNKSENEIINDVWHALFSFDDDDKLRQWAIDNLSLDEDQADTFIKCPIHQGYASLSLNAINKMLPYLRQGLRYDTAVFLANIEAVLPIQVKEDADQLDGIKSQVVDLINDYESNPILQKYTKAELINDMLLGIPGVEYNDIQKLYHPSQLQTYPEAQLNKNGELLLGSPRTSSIRNPMAMRALFQLRHLINTLLREHKIDRTAKINIEFARSLNDANMRKAIERYQRENEAKRKQYKDRLIKEYKGITGRDIFPSDDDILKYQLWEEQDHKCIYTNTQIDISEFLGANPKYDIEHTVPRSRGGDDSMMNKTLCECRYNRAEKRAKLPAELADHEIILAHVDALGWKDKIEDLRKQINRTKGRYFASKEQKDNNTQYRHYLELQLKYWQGKYSRFTMTEIPKGFSNRQGVDIGIIGRYAKEYLASVFHTPDHNLIYTVKGATTADFRKMWGLQEEYTSKERINHCHHCIDAIVIACIGKAQYDQWAHYCNQKELASWDCTEKPTFPKPWDTFTQDVKNIASELLVTHHTADNTLKQSKKALRIRGKIQRTPDGKTIYQQGDTARAQLHLQTFYGAIKRDGELKYVIRKQVDALEPKDIKNIVDDTVKSIIEEQISAKGFAKAIAEPIWMNEAKQIPIKKVRLYAANVTKPIHLKKQRDLSVKDYKQDYHVSNDGNYCLAIYEGYNAKGKVKRSYKLINNLSAVRSRKNSSLIPLSDDNEYPLKWTLKVGMMVLLYEKSPDEVYNAPQNELVRRLYKVTGLSTLPVGPGYGSIVLRYHQEARPAGEYKNKNGAWVIGEEIRPSIFVYHTQFNALVQGQDFEITDSGEIKFFKI

SEQ ID NO: 7498 - protein, 1345 aa, unidentified
  REGION 1..1345: note = Description of Unknown: Cas Enzyme sequence
WSRVQKKSCRKKLHVKIDNMKEMAKIICGYRAVGENYNSLWDSKYHFEDRCEDNKQPYTLFNDTDYTDKDYYKQYPTVFHLRKELLDSTDKHDVRLIFLALLNMYKHRGNFLSDSIDADASSSIEEAYFALVTEAEKFEIIFDASINTKKLLELLGDKNKSRTQIKEEILKFMDIEKPKKDDAPAIARYELINLICGISGKIVNIFGKDSVSEDDSKLSISFRDSNYEEKEADVRDVIGDDNFELIAAAKVIHDIGYLENIKKGETYLTCARVKSYKEHKNDLMLLKSVLKKYDMDAYNTMFREMNPGNYSAYVGSVNSDKIKQRRSGGNGSRDELYKNIKKLLTDGKKFPQDDSDIQKILERIANETFLPKQLTFANGVIPNQIYVSEMKQILSNAENYCPFLLEKNEYGLTVSEQIVEVFSFRIPYYVGPIGQEYLDKKGYNVWARRKEAGRVYPWNFEDKIDTKEAAEKFIQRMVRRCSYLSDETCLPKCSLMYEKFMVLNELNNLKVNDTKISEETKQDIYNTLLKKGKRVTINHLKNYFINSGLVEKDATDFLSGVDLQGFKSSLSSLGKFLGVFGQDALRDDYMKMEEKIIFWATVYGNDKKFLKEKITEEYGSVINEKQLKRILGFKFDGWGNLSREFLELEGGSRKDGCKRSIIQTLWETNDNLMQILSSDYTYAEVIQEQINLVNKSLSEWTIDDLDGMYLSAPVKRMVWQTLKIMKEIETVKGKAPDRIFIEMAREDGEKGVRTISRKKKLDNLYTAMKAEGKVWKEEIEKYSEAEFRQKKLYLYYLQQGKCMYTGQPIDLDELMKKNSKYDIDHIYPQHYVKDDSLENNNVLVLKEENGRKSDDYPLDANIQKKMYGIWKHLADSGLMTQEKFRRLTRTTKFTDEELSAFINRQLVETRQGTKAITQIIQQAYPDSEVVFSKAGVVSDFRHQFDLPKVRCINDLHHAQDAYLNIVVGNTYYVKFTKNPLNYIKAAKKDTKEEYAYHMGKIFLYDVKRNGEVAWIAPEGKDKDEKLKSNTGTIKTVKNMMSKNTPLITKRSFLAHGGITRKDTVRNKLEAKPYVYLPMNTSDSKLSDVTKYGGRSDVTPQCFCLVSYQKITKMKTRDKIEDILSIESIPIYLGNIAELSNEKLFIYLQKYIENENPKNQIRNLEIKLKCIKIKSLIKIDGFYYFLAAKSDKRILLEKAEPLFLSDYWYSYIKKLEKAYTKDYYDEKDSSGKTILTSSNNVALYDTIIEKLTNTTYKNMKISIVNILQEKRNLFEIRKIQEQVYILIQIIMWLNLNYSGVDLRLLDASATSGIMRISKKLNNCKEAKLYITSPAGLYRKEIDLLSL

SEQ ID NO: 7499 - protein, 914 aa, unidentified
  REGION 1..914: note = Description of Unknown: Cas Enzyme sequence
PFLKELDSFCGLTVSEKIIRLFSFQIPYYVGPLTAKSARDGGNGWVVRKEEGKVYPWNIEQKIDMHRTQEEFIKRLIRECTYLAGEKVLPKASLLYEKFAVLNEINKIKISGEEISVEIKQEIYQELFCKANRVTRKKIEKLLVNMGLMTESSQLTGIDVNVNSSLSSYGKFYGIFGEKLKEDRYLSIAERIVELATIYGDSKKTLKVCLKEEMGDILDDGQIKKILGFRFNGWGKLSRELLQLSGCDKTTGEVRSIVQTMWETNYNFMEIINDERFTYKEELEKKKKKLNKSLSEFKIEDLDEYYFSAPVKRMINQTMRILQEIIKVMGNEPTRVFVEMTRSEGIKGDRGRKASRSRELLELYRNIKGETRNWEKEITDAGESGQIKSKKLYLYYRQMGRCMYTGHPIDLNELFTTKYDIDHIYPRQFVKDDNINNNLVLVEKESNAYKSNRYPLDRMDSSVYALWETLHGYKLMNDEKYHRLKSREPFTEEQQAGFIARQLVETSQGTKGVTELLTQLLPNTRVVYVKGNNVSDFRHDYGFLKSRLVNDFHHAKDAYLNIVVGNVYDTKFTRNPLQFIRNEYGKDAKKNHYNLGTMFKWDVVRNKETAWIGHDEDKQGGTLETVRKVMKKNTPLMTRMSYINEGAFAKETLYSAKKSKAGLYFPQKTSDERLKDVTKYGGYSDIATGYFCVVDHKKKGKIVRTVEVVPSYLVAAIRKDENELLRYCEKGLGLEEPHIVWKKIPIKSLVSRDGYRMYMSGKANGGERIVLWNAVNLCLNQDNVNYIKKIEKYNEKGELSEELTKEKNVELYQTLLQKHTEGIYARKPGGVGESLKTGLDSFVDAEIEEQCYTLYQILTLSAIGTVKIDLSKIGGKKNAGATNVGKTITESNHLYLIHQSVTGIYEEVIDLLTV

SEQ ID NO: 7500 - protein, 1168 aa, unidentified
  REGION 1..1168: note = Description of Unknown: Cas Enzyme sequence
DRTMSRSARSEKMEELCHAEKKDKTKLFLIKLVCGLKVDGKKLFDIETEEDISFSFEDFSYEEKEEELVSILGEEYYGVVEIARQLHDAGALAEILHGSISTYLSFARVETYEKHHRDLKNLKSVYHQNQMTEEYDRMFRSDEPGSYGAYVKSVNSSCYQDSPSRRGSKADERSRENLYKQIEKDLSGLDDVKVEQIRNDIKNGIFLPKQLTSDNGVIPCQIHARELRKILDNAQQYLPFLCEVDPSCGLTAGEKIIRLFSFQIPYYVGPLTEKSAADNGNGWVVRKEPGKVYPWNLAEKVDMDKTQEKFIKHLVRDCTYLSGEKVLPKASLLYEKYTVLNEINNLRISGEKISVEAKQTIYQELFCRKTRVTRKHIAQLLMNMGLMQESSQLTGIDANVNNQLSSYGKFVAIFGDKLKEDRYFCAAERIIELATIYGDAKKTLRKRLQEEFGEILDDAQIKRILGFRFTGWGRLSRALLELSGCDRTTGEIRSLIQVMWDTNDNFMEIINNDQYTYKEELEKKKKKINKSLFEFQPEDLDEYYFSAPVRRMINQSILLLKEIVRVMGCEPAKIFVEMTRKDGVKGNLGRKDSRGKELLDLYRNIKEETDDWVREIAGEKNWSSEIAASGESGQLKSKKLYLYYRQMGRCMYTGHPIELSELLDSRSNRYDIDHIYPRQFVKDDNINNNLVLVEKESNAYKSNHYPLGKMDANVYELWQALHKNGFINDEKYKRLMSKEELTEEKKAGFIARQLVETGQATKGITDLLRQLMPDTTRVIYVKGSNVSEFRHEFGFLKSRLANDFHHAKDAYLNIVVGNVYDTKFTANPLNFIKNEYALDTEKNHYNLDKMFVWDVKRKGKIAWIGLTDRENKCGGTIETVRKVMSRNTPFMTRMSYVNTGAFAKETLYGAKESKAGLYAPQKTSDERLRDVTKYGGYSDIATGYFFVAEHLMKGKKVRTVEVVPSYMVAKIGEDERELLIYCETVLGLAEPKIVWKKIAIKSLVSRDGYRMYASGKANGGDRIVCWNAVNLCLNQSNINYIREIEKYIENGIVTEKITKERNAELYKTLLHKHTVEIYARKPGSIGKVLQDGHETFNRISVEEQCYTLHQILTITSIGKAEIDLRAIGGRKKVGATNVGKTLSEKNHLYLINQSVTGIYEQVIDLLTV

SEQ ID NO: 7501 - protein, 1083 aa, unidentified
  REGION 1..1083: note = Description of Unknown: Cas Enzyme sequence
MGWPYGIGLDIGIASVGWAVVVLDENAQPCGIIKMGSRVFDKAEQPKTGESLAAPRRTARGMRRRLRRKALRREDVYALLAGQGIADRETLARLFEAGHLEDIYALRTRALDQRVSGEEFARILLHLAQRRGFKSNRRGAGKEDGKLLQAVQENRRRMEQSGYRTAGEMLYKDPFFAAHKRNKAEEYLSTLGRDMVAAEARMLFERQRALGAAWATPECEAEYLSILLRQRSFEEGPSEPSPYAGNQVEKKIGRCTLEPDQPRAPKNAASFEYFTLLQKVNHIRLIEQGETRPLTDAQRKAVVQLAYRSPKVDYARIRKELNLPEQVRFNGVRYSGSVADLAKCEAQEKLPLRKGYFDLCGALGKETVDAWSVEQRDAVALLLCTYKNEELLRQKLCEQGLDAAQAEALLDVSFAGFGHLSAKACRALIPYLEQGMTYDQACTAAGYDFRAHAGQEKSRLLPAVKPEMEDITSPVVRRAVAQTIKVINAIIREQGQSPVWLHIELARELRKSFEERTQMDKSMKENASNNEKLMQEIRDTFHLISPTGQDLVKYKLWKEQDGRCAYSGSPIRAERLFESGYAEVDHIVPYSISFDDTYSNKVLVLSAENRQKGNRLPLQYLQGQRRDDFVVWTNRTVKNYRKRQNLLKARLTDEEQQGFRQRNLQDTQYMARFLLNYIRDYLEFAAHPAMTGKSQRVTALSGAITAHLRKRWGLTKVRENGDLHHAVDAVVIACATQGMVQQISSYYGHIESQYVQDEDGSGSTHSRTKERFPAPWPHFREELEIRLSEQPQEGLLRLNPRFYGAFDVASIRPVFVSRMPRHKVEGAAHKETIKGAKALADGIVTVRRPLTDLKLDKEGEIANYYMPQSDRLLYEALRARLQAAGGDGAKAFAEPFYKPKSDGTPGPLVRKVKLYEKTSLTVPVRNGAGVADNDSMVRIDVFCVPGDGYYWVPIYVADTLKAQLPNRAVVAFKPYSEWKEMKDEDFLFSLYPNDLIEVEHKQALKFVLANAKSTLPKTVNVKKALVYYVKGDISVGTITVETPENAYMIKGLGVKTLQSIKKYQVDVLGNYYEVKKETRQTFR

SEQ ID NO: 7502 - protein, 1105 aa, unidentified
  REGION 1..1105: note = Description of Unknown: Cas Enzyme sequence
YQEDKRNKNYYNLFNGTYTDQQFFAEYPTMYHLRQALLKSDEKMDIRFIYLAFHHMIKYRGNFLHAGDVFNNSDDSEVLVTFDAINDALDLLDEEHREDEDYNEDYFAKLKIEDDEKFLLSLREILINKYSLNDRKNKMKDLFGTPKKSIYTELIIPLIAGSSVSVQSAVSFVKPYKYEECKISLDTDDINALGEGCKTKIPELSPIFDLLEQIKGVSDHFFVVKLLNNETYLSDALVKKYNEHQIDLKRLKVLLKKYRGSEEDKSDDLYYQMFRKIDEKTNNYVHYVGMNSTGGNMTRFSHCTRDEFYKYLDKILQLVDKEEDQEEKKYFLDKKANNDLFLRQNSNQNGTLPKQLNQKEIRDIIKKQGIYYPFLMKKCDDGEYVIEKIFNYKIPYYIGPLNTNSKFAWVKKNSNEKVTPFNFDKVINFDDSAKEFIQRMQNKCTYLKGDDDYCLPKNSLLFSEYNCLSYLNKIKINGSYIPYDIKMGIFNEVFLKIKKPSKKDILEYLKVNYGLEEKYNCPISEAVTTAKKELPDVNCDMASYIFFKNLFNDEFEARKDDIERIILDATIFEDKDQLAKRLQDIYHLDDEKIKKIKSLSYKKYGRLSRRLLDGITCGENHLTVIQIMRKTSLNLQEILFSKEYKLNDEIDKYNKEFLNDEDESLEDFIDENISVSPILKRPLIQSYRIIEEVEKITHHKIDKFFVECTRTNKADKKKTKSRYEIVKELYDECKKISSELNNVDLKHLSSLLEENKDALRSDAIYLYFMQLGKSMYTLENIDFSLLSKEYDIDHIYPQSLIKDDSITNRVLVEKTFNNAKSDKFLFEISDNLNPHRYGFYRKLLDLKMISNEKYNRLTEKEVSSEKLEGFVNRQLVITNQAVKGLIQVLKLYKGGVNDTDVIYSKAENVTSFRQLYDLTKSRTANNFHHAHDAYLNVIVGDILNKYYTDRGVYYFKDYERMKNDGKSINPEKILKLNYVNAFGKCVWNKEIDLKNIYYDLYDRHDVHETIRTYNSNTMYTATTILPASNGNLVPAKMNSCLRDTSKYGGITSNSYCKYVIVENIGKKKNKEYILEAIPKRYENNIDEYLSSRGYTHFCILHNNIQ

SEQ ID NO: 7503 - protein, 1166 aa, unidentified
  REGION 1..1166: note = Description of Unknown: Cas Enzyme sequence
RREKLMELLGLSKKDNPKEFIVVGAICGLKTDLIKLFAIESEQKADVDFSSAGYEDRLPEIYAVIGESLSGILELMKRVYDAGVLAGIMSGTDYEGKTIKWLSQSRVNSYEKHKRDLKLLKSCIRKYCGDAEYDFLFREDEDGSYSAYVHSVNSGDKVRRGENLHKSKSGERYDNLKKRIKKDLEGYSADENVTYILKELETDAFLPKQLTFANGVIPNQLHEREVRKILDNASKYLPFLNDKDESGLTNAEKIVSLFTFRLPYFIGPVSQNYKGNGWAVRRKGSEETAVYPWNIEKVIDYDSTRKEFITRMVRECSYIAGEKVLPKESMEYQAFMVLNTINNIKVKGEKISCALKQDIYHDLFEKNSKITKNKIAKYLNEQRGIDVTENEVEGIDTVIGCQLSTYRRFYGVFGDELSKDSVRHMVEDIVFNGTVYGDSKVMFGELVKEKYSDRLSEEQLKRILGFKYRDWGNLSKEFLELEGVNKATGEITSLIRALWEDEDNLNLMELLHSDKYDFEENLKDMHKESLKTISDFTFEDLDEMYFSAPVKRMVWQTLLIIREVTEIMGSSPKKIFVEMTRSEDEKKGDAGRKDSREKELIDLYKSINDDRSWDKEIQEAGASGRLRSKKMYLYYKQMGRDMYTGLPIDLNELFDDNKYDIDHIYPRHYVKDDSIHNNLVLVDKRKNSRKSDNYPIDRDIRENPKIAGYWKMLHEKKFINDEKYRRLTGSREFSEEQKADFIARQLVETSQATKGVNDLLREIMPQETLLVYSKAGNVSDFRRDYGFYKSRTINDFHHAHDAYFNIVVGNVYHTKFTANPMNFVKKEKKEYNLGRMFERDVVRNGYTAWVAPIYDKQTHELKEMGESLSTVKKMMAKNTPLLTRLSTTQHGAVSDATICSAAKATSEGYLPVKNKKNPKLADVTKYGGFNSIKIAYYFLVEHEIEGKGKDKGKMVKIRTIECLPVYKRDYVESHDDGLYQYCLELGLKNPSVRVKKIKPQSLVKVNGFPLYITGKTGNQFVVRNACNLVLDYYWIWYIHAIDKCNSSGKISGEIIAEDNVKLYDELMDKHKNGIYSKRPNPVGDMLEKGREKFVNIDVDRQIYVLTQILNLSLICNSASADLREIGGSSKSGVTLISKKIMSYSEFKLINCSPTGLYTKEVDLLTV

SEQ ID NO: 7504 - protein, 1264 aa, unidentified
  REGION 1..1264: note = Description of Unknown: Cas Enzyme sequence
MKDWYLGLDIGTNSVGFCATDTSYRILKKNGKLQCGSRLFEDAKDASERRLWRSNRRRSARRKFRIDLLQKLFNEEIAKKDQSFFIRLNESFLHQEDRSEKYKYPLFNDVDFTDKQYYKKFPTIYHLRQHLLTNDVSDIRLLYLACHHLIKYRGHFLFSQFNTTHSNISYSDIISSINDNLILQEFDCVFEQINNEEIRKLILDKSKTVREQLDEISKMLNPNMDKRLKAIFKTINGNKISLKDIWEDLKEAEKEFEKDALKDFKFSSENYDECLALVESILSDERLELLKLLKVFYDSICLDRVLDGSAYISESMVKRYREHHEDLKILKRFIKEHIPNEYSNMFRQNIKGDGSYANYVGSNLTHNKKVISHNSMCVKKGEESMTVSYDDFLKYTNAMLEKVSPEAKLTDDYKYLTKKIEDKTLCKIQNTQDNSYIPYQLHEKELSAILDRQKKNFPFIEREFDKIVSLLTFRIPYYVGPLSEKDKGKFAWIEKKEGFEHQQVLPWNFNEVVDKAKSGENFILRMTAKCTYLKTEDVIPKQSLLYQKYMLLNDLNNLKINGNRISQELKEFLYKGICQTEQSLTKNKIKNYLIDQGKIDKKAVVGKENANDVAFNSSLSSYIKFKQILGDKFDERMCENIIKWHTVFGDEKEPVTDKIKDFYGDKLTDEQINKIEKLKFSGWARLSEMFLNGITTTDRTTNESALTIIQLLEDTTLNLMEILNSDNYIPKFIEMVERCNAGNEEVKVDYNLISDLYCSPTVKRSIWQSVLVSNELAKINGCAPKKVFVEVTRGEDLNKKGKMESSRKKQIEKLLESAAKIGRDITTLKEEFNHRKENEFRADKLYLYFMQLGKCMYTGESIDIDSLNNKTLYDIDHIYPQSKILDNSLDNRVLVKRIANADKTDVYPISPEIQSKMSDFWHTLKEKNFISSKKYERLTCTQPLTDDIIGGFVNRQLVSTNQAVKETIKVLKMLFGDDTKAVYSKARNVSDFRAKKGLVKCREVNNLHHAHDAYLNIVVGNVWDSYHSWWKDSYRNINLDEMFTKTKTGVWDLKYINRIRSYLFDDNKKYLDKFVVTTRPFEKKGEFYKQTIHPKGKGQYELHKGLDTNKYGGYKGGYAAYNCIIEYSDKSGKRVKGMFSVPVRYTYLEREKRYDELLKIIATENGLADKDPKFLIPKILMFSVLEIDGIRYHMRSGADKKNPLQCSVTVEWYPNKYIIQIVHDISKFKMIESKNVYSKEIMEEWKKTMDDIVFSKIEQNVNVQ

SEQ ID NO: 7505 - protein, 1266 aa, unidentified
  REGION 1..1266: note = Description of Unknown: Cas Enzyme sequence
MKKILGLDLGTNSIGWAVVNQPDTLSDSDSTEGQQASIACAGSRIIPMDAATLGDFDKGNSCSQTHDRTKYRSVRRLYERHHLRRDRLHRVLDIMGFLPEHYALALDRYGHFRDHAEPKLAWVPQPDGHPQFLFHDSFDEMLADFYRNCPDMANSERKIPYDWTLYYLRKKALTAPIGKYELAWLLLNFNQKRGYSQSRNEENDATDEAKPATTRQYFDKQVISEIIDTGQVYRTNKVLIVVLADGTRGKIFKKEIPDWVGKEKNIIATVDVDKQGHDKYEDDGQLKCRFRIPTEAEWDSEWALVKLKTERDLENSHKTVGTYIYDALLHDPSQKIKGKLVRVIERKYYREELRQILHTQLAFHPELTDRALYADCIRELYPSNNAYRDSIAGKDFIYLLVDDILFYQRPLKSKKSLIADCPYEQRHCLVKTPEGTVASRPVAIKCIAASHPLYQEFRLWQFVGNLRIFRREQVDSVTGRTQLDVDVTARFLPDEAARADLFDWLNDRTEITQKGLLCYPEFQLGKSYSDYRWNYMDDEQKSYPCNTTRGDMLTALKKAKLPATLLTATLEEELWQVLYAINDPEELRRALRTFAEKRSLPADAFVQAFGKFKPFAKDYGAYSAKALKRLLPLMRMGHHWSLDAIDDATRTRIEHILTGEYDEDIKERVREKALHLTELSQFRALPLWLACYIVYNRHSESQDAARWTSPDDIDTYLRNFRQHAMRNPIVEQVVLETLRTVRDIWRQEGHIDEIHIELGREIKKTAKERARMTEQITANENTNLRIKALLTEFFNPEYGIENVRPYSPSQQEILRVYEEGVLNDPTIEQPDYVQEILSKFGQREAAKRPTASDVKRYKLWLEQNYRSPYTGKAIPLAKLFTSAYEIEHIIPQARYFDDSMSNKVICESEVNKLKDKSLGYEFIQNHHGEKVYLSAEGKYVEILSVAGYEDFVKQHYSSNRGKMKRLLMEDIPDEFIARQMNDSRYISRMVMTLLSNIVREEGESEAVSKHLIPCTGSITDRLKKDWGIGDVWNRIILPRFERMNAVTKTEVYTTVNTEGHTIPCMPLDQQRGFNKKRIDHRHHAMDAIVIACASRNIVNFLNNESARAGARISRYDLQSLLCDKGRIVRAPWPTFAADVYTILSHIIVSFKQNLRVINKTSNHYEHFDPETGRKRLVAQTKGEQWSMRKPLHKETAYGLVNLRLIKEVSLREALNTPQNIVEQDLKRQVLKLQQSGYDTKKILTYFQENAEIWHETNMKKVKVYYY

SEQ ID NO: 7506 - protein, 1100 aa, unidentified
  REGION 1..1100: note = Description of Unknown: Cas Enzyme sequence
MKQIPYVLGLDIGITSVGWAVIQNDIHGEPIKIERLGVRIFDGAEQPKTGASLALPRRQARGARRIVRRRRHRKERIKKLICDSGILSSEEMELLFECGKFGEDVYSLRVSALDRLLTKEELVRLLIHFAQRRGYKSNSRSEEAKEEKETGKVKQAISANKQRMLEHGYRTVGEMLWKDELFHRVNPDGSVILAVHNTQEEYKTTVERSMLEEELRLIFSKQREFGSVWTTEAFEKQYIAIWGSQRNFDEGPGGNSKYGGAQIEKMLGECTFEEGELRAPKASYTAEYFRLMQTVNNMKIVGHGMPAEFLSEEQRKIFVQAAMASPSLTYTQLRKKLGIAEDYFFNGLFYGDKTAVQVEKKELKLMPFYHELRKALNKVEKNAIAQLSQEQMDEIARIITLYKSDDNRVTKLKESGIPEKFYPALLELSASKASHLSLKAMRKLLPYLEQGETYDKACKAVYGSHDGRCGDTQRKQRLSVMDAGEINNPVVLRAVSQSVKVINAIVREYGAPEIVRVELAREMGKNLDMRNQMKKRQTKNAERNEALRKQIEEIKHDTPTGQDIVKLKLFQEQNGVCLYSGKNLDVSRLFEAGYVDVDHIIPYSISFDDSYNNKVLVLASENRQKGNRIPYEYMGQDAQKWHQFETLVGTQIRSYKKRKNLLARSIPNQDDFKRRNLVDTQYISRVVYNLINDHLEFSETGNYKKKTQTVNGAITAQIRKRLGIDKIRENGDLHHAADAAVIACVSPGMVQKITNYSKRCECAFTRAGYVDYETGEVMTKEAYDEKYAPKFPAPWTMFRKELEARLSDNPRAEIDLLKLATYENDEEIKPVFVSRMPNHKVTGAAHLETIRSGKKQGGTVTKTALSKLKLDKKTGEIVGYYNRESDELLYQALKAQLEKFGGDGEKAFTQPFYKPKHDGTPGPLVKKVKIFEKATLTVPTNQKKGVAANGSMIRVDVFHVEKDGYYFVPVYVSDTVAKELPNRAVVANKPYEQWKPMKESDFLFSLCAGDLIRICNNKPIKLKQAEGGTGNPELLKKEGLYYYNGLNISSGALHIQLHDRSYSQSSLGGKRLGLIEKYEVDILGNYRPVKLPEQRQRFKR

SEQ ID NO: 7507 - protein, 1219 aa, unidentified
  REGION 1..1219: note = Description of Unknown: Cas Enzyme sequence
MTEKVLGIDLGTNSIGWAIVEKDDSSCKLLDKGVVIFQEGVAREKGSEQPMVQTRTMARASRRHYFRRRLRKIELLKVLIANDFCPYLSEQQLSAWKSRQSYPVDSEFIEWQRTNDNCDKNPYHDRYIALTQRLDLSQASQRHLLGRAFYHLCQRRGFLSNRKESTEEQDGIVKQAIGELSDKMEQAGCSYLGEYFYQCYQKGVKIRGLYTARNQHIRAEFDAICNRQNLSADLRKELSRAIFFQRPLKSQKGSVGKCTFEHSKSRCPISHPAYEEYRMLQFVNNIKVKTQSLYDDGNYRQLNSEERNLIYPLFLRKSKATFEFEDIAKKLAGKSIYYGYLEENPNALYKFSIAMSTTVNNSPVIACLTELFGDNWRRELQLRYKKAAHKTQNEVVNDVWHALFSFDDDDKLRQWAIENLALDSEQADVFVKCPIHQGYASLSLNVINKILPYLRQGLRYDTSVFLANIEAVLPIEVKEDAEQLDHIKEQILGLIYDFESDPYPKCYTKAELIRDFLLSIPGVECSDLQKLYHPSQTEKYPAALPNKHDEILLGSPRISAIRNPMAMRALYQLRHLINTLLREKKIDRTDKINIEFSRNLNDANMRKAIERDQRDREAKRRQYRERLIKEYKDKTGREIIPSDNDILKYQLWEEQEHRCIYTNKQIDISEFLGDNPKYDIEHTVPRSRGGDDSAMNKTLCDCTFNRTVKRAKLPSELADHERILAQVEALGWKDKIDYLIKQINRTKGRYFATKEQKDDNTQRRHFLELQLKYWRGKYERFVMTEVPQGFSNRQGVDIGIITRYAKAYLASVFHATDRNLIYAVKGETTSDFRKMWGLQEEYTAKERVNHCHHCIDAIVIACIGKAQYDQWAHYCNQRELAAWDCGEKPTFPKPWDTFTQDVKNVTSELLVTHHTPDNTLKQSKKALRVRGKVQKTADGKIIYQQGDTARAQLHLQTFYGAIKHEGEIRYVIRKQVDSLEPKDIKNIVDDTVRSIIEKQIAAKGFAKAISEPIWMNEAKQIPIKKVRLFAGNITKPIHLKPQRDLSVKDYKRDYHVANDGNYCLAIYEGSNAKGKLKRSYKLINNLAAAKSIHSDSRLVPLSDDNDYPLKWTLKIGMLVLFYEKSPEEVYQAPQRELVRRLYKVTGLSINPSPPGYGRIVLRYHQEARPSSEYKTQNGAWVEGEELRSGIMVYYTQFNALVQGQDFEMSDSGEIKFFRH

SEQ ID NO: 7508 - protein, 947 aa, unidentified
  REGION 1..947: note = Description of Unknown: Cas Enzyme sequence
MENYFVGLDIGTDSVGWAVTDEEYNIPKFKGNAMWGVRLLDSGETAQERRTFRGTRRRISRNKYRQNCLEMLFNEEISKKDIAFFQRLKDSALYDGDKTVAGKYSIFNDSDYNDVNYHNDYYTIYHLRKDLIKNSKPHDIRLVYLAVSHIIKNRGHFLFDSEEMGGTNNSDFEKIWIELDSYIKDNEYYDEESKGLLNSSNISVIEETLKNRALTSTKKKDILISELNLVKKENTFEIAVITLLSGGTVKAKDIFNTDEYDDTEAKSITFKSGYDEKVSIYESAFVEKFELIEKIKAVYDWAILADILNGESYISFAKVDTYEKHKGDLKLLKEYVKTFVPEKYNLIFNENNDKISNYLAYSGYSKKDPVAKKCSQELFCEFLRKQLPKEPLSEKYNKMYDEIASDSFMPKAVTKDNSVIPMQLNRNELKAILSNAEKYLPFLTEKDSDGKTVSEKIIDIFNFRIPYYVGPFNSHTDKAWLVRSNEKIYPWNFEKVVDVDKSAENFIENLTSKCTYLPLEDVIPKCSLLYCAYMVLNELNNLKVDGEPISVELKQNIYNDLFTKRNKVTNSALKKYLISLGFDKNIEITGIDGDFKANLKSFKDLEFIDLPYSDKEEIIKAITIFGDDKKLLKKRLTNKYGNKLTADDIVRISKLKYSGWSKLSKKFLTQIEAMIDNGTGEVTNIIRALWETNNNLMQLLSDKYDFRKQIDEENKNIESTSLKKEIDNLYVSPKIKRPIYQTMLILDELVKIQGNDPKKIFIEVARGEQAKKRTVSRKQRLLDLYKYCKKDEKELYEQLVNTNEIEFKRDALYLYYTQFGKCMYTGESISIGDIYNRNIYDIDHIFPQSKIKDDSLDNRVLVLKTANEKKGNIYPISQEIRTKMTPYWRMLLSKELISKKKFDRLTRNSMLTDEELSSFVSRQLVETRQSTKAVATLLKKRYPNTNI

SEQ ID NO: 7509 - protein, 1025 aa, unidentified
  REGION 1..1025: note = Description of Unknown: Cas Enzyme sequence
AQIRGDHTYISQAKVAQYEKNRSDLRRLKRYVRRTIPEKYKLIFSERKDKLNNYAAYSQYRLRSGEYHCDQEAFCKFLLGKEIELPKPEDSDAEMNAIYTKIKDNTFLPRLKSSDNGVIPYQLNRQELVQILKNASAYLPFLSRVDEDGLSVQEKIVKTFEFRVPYYVGPVNDHAGHHWAVRFPGKEQEKVNPWNFEQVIDTESSAAAFMENLIGRCTYTGEPVLPKDSLLYSEFALLNELNPIQMNGKPLPIGVKQQMVQDLFYRTNRKATKKSICNYLKSRGLMGDSDEISGVDDKIKTTLRSYHDFKDILERTGDVDMVEEIIRSILVFGDDKKMLRRWLGKNTHDLTVDDVKHICSLKYQDWGRLSRTFLTEIYSPDENGEAKTVMDYLRGTNNNLMQLLSDKFQFAENAKLHFNELFGNNQTLSQWLDNLYIAPAVRRSIRQTLRIVDEIVDIEKGTPKKIFIEMARGNAKDMRKERTESRKDKLIALYKDCKETSNELFEKLQNEDENRLRSDKLYLYYTQFGKCMYSGEPIDLESLLRGELYDIDHIFPQSKVKDNSLDNRVLVKNTLNREKTNEYPIKSEIRQKMQPFWHSLRQKDMISQKKYDRLLRGTELTNEELSSFVARQLVETQQSTKALATLLKEIYGDKIKIVYSKAGNVSDFRQEFGFVKCRDVNDLHHAKDAYLNIVVGNVYDTKFTEHFFANIRRENYSLKKVFDFNTPGAWDTAESIKTVKKYMAKNNVQVTRMPHEAKGALYDLQVVSAGKGQLPKKKGMAIERYGGYNKLTGAYFCVVEHTEKKKRVRTIEPVFLYQKALYERNPIEYCETTLGLKEPIIIAPKVRIDSMLELNGNRLMISSRTGDQIVYKHSYQLLVGTAWERYIKNLSKYDERCKAKKTELPITKFDELSVEENAALYSLIAQKCKKKPYSAIASAFLIMGGEMESCKGKFAEMSMWEQTQLLLEALKAFQCNAVYANFKELSGKGTRGFIRINKNISVLHSASLINQSVTGLYEHKIDLLK

SEQ ID NO: 7510 - protein, 1108 aa, unidentified
  REGION 1..1108: note = Description of Unknown: Cas Enzyme sequence
MRYILALDIGVASVGWAVIDKDNEKVLEAGSNLFPEGTANNNKKRRSMRGTRRLIRRRKNRINDFARLWTDNGFQIPKGNNTNIVGLKIKALKEKISLDELYFVLYSYMKHRGISYLEDAGDESVTGSSAYAIGLQINASELSTKFPSEIQNERLQKYGKYRGQIETKNKDGEKVDLNNVFTINAYRKEIQQILTTQEAFHEELTSEFGDEYLTIFNRKRKYYEGPGNENSRTDYGKYTTKIGDDGKYITEDNIFEKLIGHCSVYPEELRASTASYTAQEFNLLNDLNNLKVNGRKLEENEKRAIVDKVKNSNRVNMRKIIADAIGEKIETLDGARIDKSKKEIFHKFEAYNKMRKALEEIDADITFFSREELDEIGYILTINTDKEALIEAFNKSSVDLKEDIRESLINLRKRNGILFKKWHSFSLKIMNELIPEMYAQPKEQMTLLTEMGVFKNKQKDLFTGLKKIPVDAASEDIFNPVVKRSVRISFKILNAILDKYGAPEKVVIEMPRDKNSDEEKDRINKAKKNNEEELSFIENKLLSEHAITLTTADYSKQKQFKLKLKLWNEQDGQCLYSDRPIEIKDLIYHPELFQIDHIIPRSISFDDSRSNKVLVYATENWNKGQQTPYYYFTYSDKAKITFERFRALVMNLRKKKDYGLSPIKVRNLLFTEDITRIDVQKGFINRNLNDTRYASRVILNIVQSFFGAHELDTKVKVIRGSYTHQMRVNMKLDKNRDESFSHHAVDAMLIGFSQMGYEAYRKLQGTFIDFETGEILDKNLWNTNMTDDVYKDYLYRMKWSNIRNEITEGEKKVKYWHFVDHKANRGLCNQTIYGTREYDGKTYKINKLDIRTKKGFKLFKQYVTSKNIKDREKLLVYKNDRKTYDDLVQIMKEYEDADNPFVQYERETGDYVRKYAKNHKGPRIDKLKYVDGAVGSCIDISHKYGHEKGSQKVILESSKPYRMDVYLKKFENAYYFVGVKQSGIKYDKGVLMIDEEAYAATLVKEKMIKNGQTRDDLEDLGFEFQMSFYKNDIIEYELNGKMYTERFLSRTMPARRNYIETKPITKFEFDERHPVGLRTTQVVKKYRMDILGNYYLNEQEKFAKIVKN

SEQ ID NO: 7511 - protein, 1414 aa, unidentified
  REGION 1..1414: note = Description of Unknown: Cas Enzyme sequence
MKKVLGLDLGTNSIGWAVVNEAESDDEKSSIVKMGVRINPLTVDEVKRFETMKGNTLNELRTQKRGMRRNLQRYKLRRAELIKRLIEAGWITNDTVLSEDGPRTTFETYHLRARAVSEEISLEQLARVLLMINKKRGYKSSRKVKKEEDGSLIDGMDIARTLYDNGMTPGEYCYNILCKGKRHLPDFYRSDLQDELDRVWNTQKNFYPEILTSSVKEEIAGRNKSQTWAILAKYFVWTSNVDGESKTFNIEGKGRKTKGDEQKRETYRWRVDALTKKMQLEELAVVLQEINGDINSSSGYLGAISDRSKELFFNNQTVGQYLTKIIDHTPNVSLKNKVFYRQDYLDEFEKIWTCQSLYHPELTPKLKHDIRDIIIFYQRRLKSQKALIGYCEFEQQQITVVKDGKEKTITIGNKVIPRTSPLFQEFKIWQMLNDIQVSLISGKKRRKELTNDLFAPTTPDDELYMNGYRQLTAEEKNRLAHELFIKEKIEKKDVLSILFKNPKDLDLNFKVLHGNTTGAALYNTLSRIIEMSGHTAIDFKQPADKIEEKVCAILSSLGWNTDFLHFDSSQPLDSQPFFRLWHLLYSYETDNTPTGDGKLKQHIMQICNCDKEYASVISAINYDSDYGNLSAKAIRNILPHLKNGLSYDKACAEAGYRHSKSSLTKEEIENKELKDRLELLPKNSLRNPVVEKVLNQLANVVNGIIDTYGRPDEIRVELARELKKSAKERAELTDSIADATKQQLEIKSILETKFGIAHVTRNDILRYRLYQELAKNRYNTLYSNTHIVEEEIFSKKFDIEHIIPQARLFDDSFSNKTLELRSINIEKGNKTAYDFVAEKYGEKGLEDYLNRCSALFDKKSAKLRKLKMSESDIPSDFIERDLRNTQYISRRALSMLGEVCRRVVATTGSITESLRKDWQLVDVMKEINWKKYEAAGLVEYYEDHDGRIIRQIKDWTKRNDHRHHAMDALTVAFTKPVFVQYFNNKNASEKPNSNEHAIKMKYVKEGKIIAPMPLGEFRREARKQLESILISLQTKNKVMTRNVNHTKSSTGGNKKVQLSPRGQLHEETIYGVHKEYVTTEKKVDASFSRDVIMTVCKAEHREALLNRLELFGGDAKKAFSGKNALDKNPIWINQEEGIAVPMKVKTVTLEPVCTIRKPINDKLPIDKVVDAKIRKILTDRIAEYGTAKAAFSNLDENPIWIDKEKGICLKRVKIRTGKSTQALHDKLDKDGYLMHDENGRRIPNDFVATGNNHHVAIYRCPSLDKKGQPLLDEDGNAKYQLEEVVVSFMEAVARKNQGLPVVDKNYRSEDGGKLLFTLKQNEYFVFPNDETGFNPKEIDLLNPDNFAIISPNLFRVQKFSSKDYYFRHHLETNVQDNNKLKDITWKRITSLPIMERIVKVRVNGIGQIVSVGEY

SEQ ID NO: 7512 - protein, 1524 aa, unidentified
  REGION 1..1524: note = Description of Unknown: Cas Enzyme sequence
MKKILGLDLGTNSIGWAVVNEPDEPQEPGSTASPHPSIAAAGSRIIPMDAATLGDFDKGNTVSQTKERTGYRSVRRLYERHHLRRDRLHRVLDVMGYLPEHYAAALDRYGHFLDHGEPKLPWVPQPDGHPQFLFRDSFDEMLADFYHHCPDLAASGQKIPYDWTLYYLRKKALTAPIDKYELAWLLLNFNQKRGYSQSRDEAVEEDAEDKPATTRQYFDKQVVTDIIDTGQVYKNNKVLIVVLADGSRGKIFKKEIPNWVGQEKNIIATVDIDKQGRDKHDDDGQLKCRFRIPTESEWDSEWALVKLKTERDLEASHQTVGAYIYDALLHNPAQKIKGKLVRVIERKYYKEELRQILNTQQKYHPELTDRALYADCIRELYPTNDAYRESIAGRDFIYLLVDDILFYQRPLKSKKFLIADCPYEQHRRRVKTPEGTEEYRTVAIKCIAVSHPLYQEFRLWQFVGNLRIFRREQVDESTGRTRFDVDVTSRFLPDEESRAALFDWLNDRTEVTQKELLGYPAFNLGKTTSAYRWNYVDDDKKAYPCNTTRGDMLAALKKAKLPATLLTAELEEALWQVLYAINNPDELKKALRTCAEKHGLAPEAIVQSFGKFKPFAKDYGAYSAKAIKRLLALMRMGHHWSAEAIDSATLIRIDHILTGEYDEDIKNRVREKAIHLTALSQFRALPLWLACYIVYNRHSEAQDAARWTTPDDIDTYLRNFRQHSMRNPIVELVVLETLRTVRDIWRQEGHFDEIHIELGREIKKTAKERARMTEQITENENTNLRIKALLTEFFNPEYGIEDVRPYSPSQQELLRIYEDGVLSDPTIEQPDFVKEILAKFGQREASKRPTSTDIMRYKLWLEQKYRSPYTGQFISLSKLFTSAYEIEHIIPQARYFDDSMSNKVICESEVNKLKDKSLGYEFIQNHHSEKVYLAAEGRSVEIFSVAAYDAFVKEHYSANRGKLKRLLMEDIPDDFIARQMNDSRYISRMVMTLLSNIVREEGESEAVSKHLIPCNGNITDRLKKDWGVGDVWNRIILSRFERMNDVTKTHLYTAQNTEGHTIPCMPLDQQRGFNKKRIDHRHHAMDAIVIACTTRNMVNYLNNESARAGARISRYDLQAQLCDKGRILRAPWPTFAADVYNTLSHIVVSFKQNLRVINKTSNHYEHFDPETGRKRMVAQTSSTKGVMFSVRKPLHKATYYGLVNLRLMKTVPLKEALARPQDIVEKDFRIQLLQLQRNGYNEEQIVGYFNEHNDIWHEIDLEKIKVYYYTQSESDGLYTAVRVPLETSFKREKIETITDTGIQKILLRHLDSYRGVAEEAFSPEGIESLNANIQTLNDGKPHKPIYSVRLYKKEARIPVGTRSCKGAQYVKVAEGTNLFFAIYEQEQVNKKTGLRKRIYATIPLRDSVERMKRGLPVAPPKDSLPARYVLAPGDLVYLPTKDEIKKKQLTFPLDVDRIYKMISASSNRCTFIKAIVATPIVDKVEYLAHNNVECLDSGESIKEICIPIRTDRLGNILPLEDFNL

SEQ ID NO: 7513 - protein, 1359 aa, unidentified
  REGION 1..1359: note = Description of Unknown: Cas Enzyme sequence
MKKEYYLGLDMGTNSVGWAVTDKEYNLLKAKGKDFWGIREFDSADVAVERRTKRISRRRRQRETARIGELKLLFADAVLVEDSHFFIRLENSKYYEDDKNEELKSKNGIFDDDDYKDADYYKEFPTIFHLRKRLIEDTVSHDSRYARLVYLAVLNMFKHRGHFLSAGLDGETSTVKSVYPEFVRCCKEVLDIEFPEGIAEDIEKILSDRTKSRSQKAESIAQISSTEKSDKKKQLLIKMVCGLKTDGKKLFDDMETEENLTIDFSAYEYDEKADELEAILGKEYYELVEAAKQVHDAGLLAEILHGCEYLSFARVKDYEKHKKDLELLKALYHKYKTKDEYDKMFRSEEAGSYSAYVNSVNSDGYIEKPSRRGADSDKRGRDDLYKSIKKDFSGNDDEDIQKMFSDIDKGIFLPKQRTAGNGIIPYQVHQKELTAILHNAEKYLPFLRSVDETYGLTVSEKIIRLFSFQVPYYVGPLTEKSAENGGNGWVVRKEDGKVYPWNIEEKVDMHLTQERFIKNLIRECTYLSGEKVLPKSSLLYEKFTVLNEINNIKISGEKISVETKQTMYKELFCRGKRVTRKQVEKWLNNMGLLQESSQLTGIDININNSLSSYGKFLSVFGERINEDKYFNAAERIIELATIYGDAKKTLKECLREQFGHLLDDAQIKKILGFKFTGWGRISRELVELSGCDKSTGEVKSLLQMMWDSNDNFMEIINNDLYSYKDEIESRRKKLNKTLSEFRAEDLDEYYFSAPVKRMINQTMLLIKEIVKIMGCEPECIFVEMTRSDEAVKGDKGRKDERSKNLIERYKVLKGETREWEKEIADAGESGRLKSKKLYLYYQQMGRCMYTGHPIELEELFTTRYDIDHIYPRQFVKDDNISNNLVLVEKESNAYKSNKYPLQKFDKNVYELWEALHTNKLINDEKYARLTCSEPFTEEQKAGFIARQLVETGQGTKGVTQLLTQLMPNSKVVYVKGSNVSEFRHEYNFLKSRLVNDFHHAKDAYLNIVVGNSYYTKFTSNPFNFIKKEYAADEKKNHYNLGSMFKWNIERNGYTAWYAPDDDKNGGTIETVRKMMRKNTPLMTRMSYVNYGAFTKETLHSAKESKQRLYFPQKTSDERLSDVTRYGGYSDISTGYFCVVEHMRKGKKTRTIEVVPTYMLDKIKKDENELLKYCENVLELVEPRIVVKKIPMKSLVSRGDFRMYMSGKANGGDKIVMWNAVNLCLNQENSDYVRLIEKYKNSGEIDDNITSEKNIEMYDILTEKHDRAIFSKKPNAIGEKLVEGKERFELLDIKEQLYTLHQILLISTIANVTIDLSEIGSNKSVGATSVGKVISEKNHLYLINQSITGVYEEVVDLLTV

SEQ ID NO: 7514 - protein, 958 aa, unidentified
  REGION 1..958: note = Description of Unknown: Cas Enzyme sequence
VKSKENYHGANITKVASLDIDYAVALDIGTGSVGWSVTDEADGNLLQKGGKNAWGSRLFETAETAAGTRTARTTRRRLDRRKQRICNLREIIAPDMEQVDKDFFAKFNQTQLVEADRITDDAHILFNEETYNELFLEDTSREHTSKKYPSIYHLRKRLVEDSSKEDIRLVYLALHHLIKYRGHFLIEGELTAQSADGQAAFVSLKETLVNYCEMHDIVFIDESFDSDAMNNVLTKSSAKRSERQEELAILLQSCFERTEKDFVKAITKAIFGYQISWENVFEIEASSENKFALNNDQKVEDGILPEDDTELFEVIKMLYNAYLLAGILKGASGSTLSASMVVLYEQHHRDLAWLKSVVKRYSAVNSETKRNDDYNKMFRGPKYADGTYMKKPAKGYTGYILGNVSLEDLYKQVKALVSSYSLSTEDAQYWGSAQNRIEDGTFLRKLRASDNGAIPHQLHLEELRIIVKNQGQYYPSIKENAKHIEQILTFRIPYYVGPLGKEKNPNREKPFGWTKRRQGFENVQIKPWNFEEVIDIDQAANDFITNLTGTCSYYYGMPVIPKYSLLYSEFCVRQELNKCKVARDGENFTLMDVETVEGVYQNVFKRHSRVKVDQVREYLKSIGFINTAFKGTQKDNEFASSLRSYCDFRKILERDFDSFEDYEMVEQLILWVTVYEDKKILKRQINEIYGPQGNGVLTKEQIEKIARLRYTGWSNLSREFLCELKVNYNGRKLSIIGALRDSGQLYPMNLMEILASEKFGFKKLLAEKNEEYLSAHEGFALEEIPGSPAIKRGIMQAIRIVDEITKIAGKAPKRIVVEMAREEVGQGKGKRTTPRDKQLKELYSKLQDDILLEDSEHLASQLTDKSAQLDNDKLFLYFLQRGKCMYCGKTFDVESLADYHVDHIVPQSMIKDDSLHNRVLVCRHCNELKLDEYPLPTSIRNFANMKRWKALKEAGLIS

SEQ ID NO: 7515 - protein, 1060 aa, unidentified
  REGION 1..1060: note = Description of Unknown: Cas Enzyme sequence
MYDNKYIIGLDIGISSVGWGLLQLDEENNPYRIIDAGSRIFTPGEVEKTGDSRAKERREKRSARRIIRRKEFRIDRVRNLLYEKHLLTGNINCNIISEKNEELTKIYNKMINNYYKGKNTNPYQLKVEALDRKLSNEELCIILVHYAKKRGYKSNREDTSDNETGKVLSAINDNINLMKEKNYRTVSEMYIKDDKFKNKIKNSPGNYKVSITNELYFEEINKVLDNQIKYNVIDEQFKKEYIEIWSSRRHYSEGPGYYYVYDKNGNRIKKRSPYGGNLIEKMTGKCNFDNNPRAPKKAFSSELFVALTKLLNLRYKTDESKGYINLTNDEIKELIEKSLSKNKLTYNDVVKTINKTNIKFKDLTLSKKSYIKVIDSLKKKLNISKDTKLDINNLSIDEKNLYNNMYEKELFSNTIIELKGYHELRQVFEKTFNKEYWNKYKNDILLLDELALLCTNYKLNEEIKNHILTSDIIPNEFADDNFISALPNFKDHLMLSTNIIMQLIPLMLNGKRYDEAMTELNYQFSNLNNPKDKRDLLIPINIDENITNQRVIRSLTQTRKVLNAIIKKYGKPYAINIETARELAKTRKERNEIEKRQKDNYEKNLKIKNHLVELGLFKSVDKINSNDLLKYKLWEEQQGICSYSFKKIKIEDLYTNNIVQIDHILPYSRTFNDNYLNKTLVFAKENQDKKDKTPYEWFGNTEKWNEYTKFINSLMISQTKKDNYLLKDLTPDMSREMREQNLNDTKYISKEFASLIKAYLNVDNINVYQGAITAKLRARWGFNRLTHSYIAQNYILPKDMKENINKDRDNHLHHAIDALVIAATTKSLQQKITLYEKASKYIDGLTKEKLSHMSIEDLIKDEYIQINEKTGEVDDSNLKEYLMKNIRYGKHDIAKLKFPLPYDNFADEAKIRVYERNLDVLKYDMTNLKTYTKKDLDSLKILIPSIAKNKVSGKMHEETYYGIKKIGDSTYKTIRKPLEKLKKKDLESIPDKSGGSKDIYNTLIEWFGDCETGIDALKLHNNEYPINPNDKEHKSIKKLKIYENYNNTGHIINGSNVEKG

SEQ ID NO: 7516 - protein, 1066 aa, unidentified
  REGION 1..1066: note = Description of Unknown: Cas Enzyme sequence
RIPTEAEWDSEWALVKLKTERDLENSHKTVGTYIYDALLHDPSQKIKGKLVRVIERKYYREELRQILHTQLAFHPELTDRALYADCIRELYPSNNAYRDSIAGKDFIYLLVDDILFYQRPLKSKKSLIADCPYEQRHCLVKTPEGTVASRPVAIKCIAASHPLYQEFRLWQFVGNLRIFRREQVDSVTGRTQLDVDVTARFLPDEAARADLFDWLNDRTEITQKGLLCYPEFQLGKSYSDYRWNYMDDEQKSYPCNTTRGDMLTALKKAKLPATLLTATLEEELWQVLYAINDPEELRRALRTFAEKRGLPADAFVQAFGKFKPFAKDYGAYSAKALKRLLPLMRMGHHWSLDAIDDATRTRIEHILTGEYDEDIKERVREKALHLTELSQFRALPLWLACYIVYNRHSESQDAARWTSPDDIDTYLRNFRQHAMRNPIVEQVVLETLRTVRDIWRQEGHIDEIHIELGREIKKTAKERARMTEQITANENTNLRIKALLTEFFNPEYGIENVRPYSPSQQEILRVYEEGVLNDPTIEQPDYVQEILSKFGQREAAKRPTASDVKRYKLWLEQNYRSPYTGKAIPLAKLFTSAYEIEHIIPQARYFDDSMSNKVICESEVNKLKDKSLGYEFIQNHHGEKVYLSAEGKYVEILSVAGYEDFVKQHYSSNRGKMKRLLMEDIPDEFIARQMNDSRYISRMVMTLLSNIVREEGESEAVSKHLIPCTGSITDRLKKDWGIGDVWNRIILPRFERMNAVTKTEVYTTVNTEGHTIPCMPLDQQRGFNKKRIDHRHHAMDAIVIACASRNIVNFLNNESARAGARISRYDLQSLLCDKGRIVRAPWPTFAADVYTVLSHIIVSFKQNLRVINKTSNHYEHFDPETGRKRLVAQTKGEQWSMRKPLHKETVYGLVNLRLIKEVSLREALNTPQNIVEQDLKRQVLKLQQSGYDTKKILTYFQENAEIWHETNMKKVKVYYYTAEETQQPQYYATRKAVDTDLAVDKVTDSGIRQILSRHLQQCGGDSKVAFSPEGVEQMNLNIQELNGGRPHLPIYKVRVYEQGAKYAVGQ

SEQ ID NO: 7517 - protein, 1057 aa, unidentified
  REGION 1..1057: note = Description of Unknown: Cas Enzyme sequence
HPLFQEFRLWQWVGNLRILQREYRNPVNGRIEMDVDVTDRFLPTEEARVALFEWLNDRAKISQKEFLKYPAFQLKKEAVRYRWNYMDDDKKSYPCNETRGAFIAAFDRAHLPAERLTPECVEALWHLLYSVDDPVQLESGLNKFATRWGFPSTLVDAFKKFKPFEKDYGAYSAKAIKRLLSLMRMGKYWSADAIDPLTRQRIEALISDREEAGIDPRVREHTSGMSSVEQFRGLPLWKACYVVYNRHSEASETERWSSPSDIDRYLRAFKHHSLRNPIVEQVVLETLRTVRDLWQQEGHIDEIHIELGRELKKTAEERQRASERNSENENTNLRIKRLLMEFFNPQFEIEGVRHYSPQQQELLRIYEEGVLNDPAYTMPDEVQKIFDKFKQREAAKQPTPAEVLRYKLWLEQKYRSPYTGEAIPLARLFTDDYQIEHVIPQARYFDDSLNNKVICEAAVNQQKGAMLGLEYIKSDKPKVVKCAGNRDVRIFSPTEYEQFVQEHYANNKKKMRNLLLEDIPEDFNARQLNDSRYISRLMMMLLSKIVREEGESEATSKNVIASNGNITDRLKKDWGVNDQWNKLILPRFVRMNDLTATHDFTTTNTQGHRIPCMPLELQRGFNKKRIDHRHHAMDAIVIACTTRDIVNYLNNEAAKSEVTRYDLKQKLCAGGKVIRLPWATFPADLYTSLSAIVVSIMKKLRVLTRTQNHYQHINAESGKKEFVLQSKGDMRAVRKPLHEATFYGLVNLRKVKEVPLKTALQAPQRIVERDLKHAVIKLLASGMNEKQIAQYFAEHQDTWYETDFKKVKVYYFTEEVPNQAGYYATREALDSSYTKEKILNHVTDTGVQKILLRHLERCNDQADVAFSAEGIEQMNASIQALNDGVPHRPIYKVRFCEQANKYAVGAVGNKGTKYVEAAKGTNLYFVVYEQECIDKQSGEIRRERSYATIPLRIVVDRLSHGLSPIPESEEGIAPKFWLSPNDLVYVPTTEEIENKKLNFPLDTERIYKMVSSDEKQCFFGSGARVRGQSLTKYGRYPIHKEGKIRYSAQHRAKAFDF

SEQ ID NO: 7518 - protein, 1380 aa, unidentified
  REGION 1..1380: note = Description of Unknown: Cas Enzyme sequence
MDYYIGLDMGTNSVGWAVTDPQYNLIRKKGKDMWGIREFDEAEPAAERRTHRVSRRANQRSQVRIGLLKGIFSEALLKEDANFLVRLDNSFYKAEDKDEALATLDAIFADADYRDADYYRDYPTIFHLKYDLITDKVPNDDRYARKVYLALLHYFKRRGHFLNESLSGNDEGGKDVWSAYLELCGVVYEELDIAMKRDDTQAEEFRAAFCDASFSRSRKRDLLVELFGISKKDNAQQYMMLSAICGLKTDLLKLFVIESEQKAELDFSSAGFEDRLPEIYAVIGESYAGIIDAMKQVYDAGVLAGIMSGTDEEENQIKWLSQARVSSYEKHKKDLKLLKECIRKYCDEAEYDYLFREESDGSYSAYIGSVNAGKKARRGEKLYASKSGERYANLKKRVKKDLESHADDENVAYILTELDAETFLPKQLTFANGVIPNQVHEREMRRILENASKYLPFLQEKDESGLTNSEKIIRLFTFRVPYFIGPVSQNYKGNGWAVRKPGMETETIYPWNIEDVIDYNDTREAFIKNMVRECSYIAGEKVLPKESLEYQAFMVLNTINNIRVKGEKIPCALKQDIYHDIFEKNGKVTKKKILTYLNQRGIEVEENELDGIDTVIGCQLSTYRRFYGVLGDDLNKDSVRHMVEDIVFKGTVYGDSKKMFESLITEKYGNSLTPEQIKQIMGFKYRDWGNLSKEFLELEGCNKQTGEVVSLIRALWEDEDNRNLMELLHSDKYTFEESLKEKHRKSLKTISEFSFEDLEEMYFSAPVKRMIWQTLQIIREVMEILDCPPKKVFIEMTRSEEEKKGDAGRKDSREKELLELYKQIKDDRSWDEEIQEAGASGKLRSKKLYLYYKQMGKDMYTGLPIDLKELFDDNKYDIDHIYPRHFVKDDSIHNNLVLVDKRKNSRKSDNYPIDSDIRNNMAGYWKMLHEKKLLNDEKYRRLTGSRPFTEEQKADFIARQLVETSQATKGVNDLLKELLPDETTLVYSKARNVSDFRNQFGFYKSRTMNDFHHAHDAYLNIVVGNVYYAKFTSNPMNFIKKEKKEYNLGRMFERDVERNGYTAWKAPVIDKGTNTIAEQGESLATVQRMLAKNTPILTRLSTTQHGAISDATIYSASKAKAEGFLPVKGNNPKLVDVTKYGGFNSIKVAYYFLVEHEVEGKGKDKGKMVKVRTLECLPVYKRAYVESHEDGLYQYCLELGLKNPSVRVKKIKTQSLIKVDGFPLYITGKTGNQFVVRNACNLVLEPHWTHYIHTIDKCNLSGRMPDEISAEENVRLYDELQKKHKLGIYAKRPNPIGDVLGNGREKFVDLSTERQVYVLTQILNLSLICNSSLADLKEIGGSSKTGVARINKKISEYKEFKLINQSITGMYEKEVDLLTV

SEQ ID NO: 7519 - protein, 1324 aa, unidentified
  REGION 1..1324: note = Description of Unknown: Cas Enzyme sequence
WETFQYIGLEVGPDAVGWAVTDEQYQIKKFKGNAMWGVRLFESAENALERRTARIKRRRLARKRQRLMLLELLFAEEIAKVDPNFYLRMHESERWVDEKQNGSPYTLFYDAAFTDREYHKRYPTVYHLRSELLQSEQPHDVRLVYLALHHIMKTRGHFLYETSGDTDEIMTTSHALEELQRYLQLNYDFSFEPKSRDEFLDVLQSNIGISAKKQRLKAAYGKPEECQGLNVSVLLDLLADAAVKPEALFEDESLKDSELGSIKLGNMDDNIDAYVDALGDQLELLERTQALADTAKLSRLRGDHTYISQAKVAQYEQNRADLRSLKRYVRQTIPEKYKLIFSEKRDKLDNYSAYSQYKIRSGDYHCDQQAFCKFLLGKEVGLPQPEQSDAEMSAIYAKIKEGTFLPRLRSRENWFISYQLNQQELVQILKLASGYLPFLNQTDEDGLSVKEKIIRTFEFRIPYYVGPISDRSGNHWAVRFAGKEREKVYPWNFETVIDTDSSAALFIKNSTGRCEYTGEPVLPKDSLLYSEFLLLNELNTIRVKDQPLSRDMKAQIVRDLFHSPDRRKQVTKRDLCNYLQAQGMDITYNDFKGIGINFKTALRSYHDFKDILDRTGDADMVEAIIQSVLVFRTDKKMLRRWLKRNTHGLTEGDIKMICGLQYQEWGTLSQTFLTEIYSPDENGEAKTIMDGLRDTDCDLTQLLSEDFQFAEQAQAHLDALFGCGQALDQQFIERRIPAALRRSIRQTLRIVDEIADMEKSAPKKIFLEVDNGNGLATKTRRTVNRKDELIALYKGCHETDSELYEQLVSEDEDSLRSNKLYLYYDQFGKCMYSGESIDREVLMQGGTYDIDHIIPQSKLRDHTMYNLVLVKSQLNREKADNYPIKAEIRQKMRRFWSRLRTQNMISKEKYDRLIRGTDLLRSELTRFVARQLNQNRNCVNMLTSLLEEAYGVTEIVYSKADNVADFRHRFGFVRCPNVNDLYHAKDAYLNIVVGNVYHCKFAPQFFANIENETYSLNRVFDFDTPGAWKTEESIQIVKRTMAKNNVRTTRMPHETTGALYKLQVLPAGKGQLEKKQGLDIQRYGGYDKLTGAYFFLVEHTSVRKGRIRTIESVYLCQKTAYEQDPIAYCTDVLHLKDPVIIAPKILVDAVLELNGARFNIAWRTSDDIVFRHTCQLIVDRETQQYINDLVKYNDHCNARGEKLPVTAFDGISAEKNLAFYELLTQKCGENAYRSCFSAFSIMGSEMGSSKQVFAAMSVRKQVAMLLEVLNAFRCNTTNANFKELSGKTARGLVFVRKNMSNMSSAYLVHQSVTGLYEYKTDLLK

SEQ ID NO: 7520 - protein, 1423 aa, unidentified
  REGION 1..1423: note = Description of Unknown: Cas Enzyme sequence
MNKVKFETALAVNLGAVNTGLFMLSHKAGETPTADDAVGINFLTPGSANIVFSQAARTEARKHRRCVQRKQLARRLLHSCVDAILKEKGISLSREKLNALYNALSGLLKRRGYTHIRHKNDLSVLERVDPAIFASFPVISGYFNKTDSVADQWEAMSNNIEECVSFSEEVIDRKAYKGFLKANFPDLEKSEITACSEAVGAIRQECIDLEQMTRTGAKHRTEYLENIKAEIHKDTRLKPLIKALESEDKLYRLVGNISNLQLRANRWYFNAPMFMKEVPVEQERLKKTLITAFKFFHPRDEDRDRIQSVINTFQFCSTGLEGLCAIDPVLTLPAPEDQNQRNPPVDQTLLLNPKKLQNDYGDDWRLWATSMLSADPVLGEGLDEILRLADRESRRAIADKDTTEYRMSYILQRGLDRSFSKDIYALRAVCNELKGQAATKGRENIKKIFGIKGDKFIEFAKRYYDEVSKARVGLWFLAEDPILERSNLHPKAKNKVTDLLAGNLMCGNAKDGTRLVKVWNETISGKSTMLSLCRGIEATVKDYGRLFDFLYANAQRKKADIDPADKKEMEAVAKKVRQIRTFLLEKDFTETEVNRLCNPYSLAGLYCIFETERSGFCRNSTAVMLENTWRSADEAGHTGAHCTALPADTVRPFDGMLARWLDRIAYEIALVYNQELRTKKIKNSSVRLNLLLQENRFDFDASLGELKGIPAKKLADKRRKAALPCREWQSKKERIKEASCGICPYTGKPIENNGVMDYILTPSKTKRERDEVFNSEANLIWVSEEGDRIKGDKSYILSNLHPKYLEAVFGSANVPKIEKIIENRIGELVSSDKLKSYSALSDNDKICFRHALFLPQANYARRQVEDALRSSVRTAINGTQAYFTQILCKKILEITKDWRQRFHNRIEFDVNRIDAYDTFLVRDALSDADPNLAKGGANLASRIADAMACYGYACGVKRISRRMDADSALANFKKAQNLAALFPKSVHNKKIVSKSSLEKSKPESKKLFKDSILAAEYLPISVCNNSISVGFRILPKDANITAADASLPVAGKNPAKLLKLLQPVLQEPYDPDRKYTQPTTFRVDSVKAHDWFRNAKKHAGTEFEATADILRTLRFNSVRVPVESRLFDEQTQKMNTARDILTSRAMEFKVKYGKKTDAFAVQGVVRMPFAREWEKIIFCPDIKPILGGVLPEDFNLAFWLKKYRFGDRLDSDMSVRSGRPHGKTRVTVSLPILNNGLSTLSLKRRDCNGEPIVQELVIEGTKFAGFVADKKGKSDFKTLVLAPQYCTKNLVDPSGKTVSAKDAPNCVSVFDWKTIFRDKIFKVDMRPATATRPRLRVEMPFEKFSELALTETTKSPERVRPSEVISKEAMEVFTIRYPQLAGILVVGKTDKDYEIKTVGSRVIFEYTAGHFVVSLKDAYNKAK

SEQ ID NO: 7521 - protein, 1394 aa, unidentified
  REGION 1..1394: note = Description of Unknown: Cas Enzyme sequence
VSKGHKNLNITKVVENGIDYDIGLDIGTGSVGWAVVSEHGVLLKRLGKNAWGSRLFESAETAADTRSKRTLRRRYDRRKQRIYNLRELIAADVAQVDPHFFAKFNQTPLIEADRGLSDRHILFNDIDYQQLFLVDPEHNIHEKKYPTIYHLRKRLVEDPCKEDIRLVYLALHHLVKYRGNFLIEGDLTAENANALQALEAFKEALIPFCEALEISFDETLFDVAALNQVFTDGSKTRRERQEAVNEFLLPCFEKESKDRVKNLSLAMFGYQTTWDKIFPFESETAQKFSLDKEDKVTAFVDEVLPEDFADVFTALEGLYNAYLLAGILKGSQGGTLSSSMVGLYQQHKTDLHMLRNIVKKYSTIEEETGRRIEFNNMFRGPRYADGMYVKNAAKGYTGYMMNKVSQEDFYKEVKNLLSGFTLTSEEAKWWEEAQKRIDDLTFLRKLRNRDNGAIPHQLHLEEMRAILKNQGQYYPTLAQNASYIEQILSFRIPYFVGPLGKEKNPQREKAFGWAKRRPGFESTEIKPWNIEEVVDFDQAAEDFITNLTGECTYYYGKSVIPKASLLYSEFCVRQELNKCKVAADGEKETLMDIETIEGIYQNVFKRYSKVKVDTVREYLKSTGFINTGFKGTQKEGEFASSMKSYCDFRRILGRDFDSYEDYEMVEQLILWVTVFENKKILKRKINQTYGPEGLQVLTADQVNKISKLRYTGWSNLSREFLTELKVDYNGRKLSIMGALRGGTGRPLNLMEVLKKDYLGFDELLEEVNAEYLKAHKGFMLDEIPGSPAIKRGINQALGIVDEIIKLAGKPPRRIVVEMAREEVGQGKGKRTNSRLKQLEELYKNLQNDILLQDSKELKGELKEYGDRLDDDRLFLYFLQRGKCMYCGESLKVENLSSYDIDHIVPQSMIKDDSLNNRVLVHSECNRHKADIYPLPADLRSKNASRWKLLKEGGLVTTKKYNNLMQINDTRQLNAMAKGFINRQLVETRQITKHVVTLLQSLHEDTTVETVKAELTHRLREAYDLPKVREVNDWHHAHDAYLACQVSRFIHERFTGMAEDLDYDSFSRYAYVVKGAQQSNSGLVVGSFGRARLGEYEDAWNGPAEVERIQQALNFKDCFVSKKLERLKGEFWNQTVYSPRTHSDKALPLKQGKDPDTYGYYMSPNSAYYALVEYSDTSKKKPKTKREMVGVPIDISYRIDNGHDLLTLQAYVEAIFGGEVQILRAPIYKYQKIEWNGGFYYLVSNSEMINARQLWLPHVYVDYLALAQAALSPAARYADKRDFEEWPEKDELSEEIFNYLSEQINNYYPRYGGLYDKLTSEKAVSAFESKSPEDKCKALIEILNMLHCNARTGLASLGLSGGAGRMNMLNLSDPTIVFIDTSITGMYESSASYEA

SEQ ID NO: 7522 - protein, 1127 aa, unidentified
  REGION 1..1127: note = Description of Unknown: Cas Enzyme sequence
FVYLFVDDIIFYQRPLKSKKSLIADCPYESVKYIKDGKETQVPLKCIAKSHPLFQEFRLWQFLSNLKIYQKEKHDIFSGGFKTDVDVTNEFITCESDYVKLFDWLNDKNNIEQKNFLAYTGFKLKKDNISKYRWNYVEDKSYPCNETRAQMLASLNKAGVDSSFLTKEKEEALWHILYSIDDKTELRKALAKFAEKNSLCERFVEVFQKTKPFEKEYGAYSAKAIKKLLSLMRRGYYWKQEAIDNNTAERIEKIITGEADDAIRERAREKAKDLKDIIDFKGLPLWLACYVVYDIHSESKDSYKWETPEDIDTYLKSFKQHSLRNPIVEKVVMETLRTVRDIWKEYGKIDEIHIEMGRNMKQTAAQRKADTIRNLENENTNLRIKTLLMELANPRYDVENVRPFSPSQQDLLRIYEEGVFDYVSDVPDDIKEIKSKLSQTDKTKKPSSSDVMRYKCWLEQKYQSPYTGSIIPLSKLFTPAYEIEHVIPRSRYFDDSFNNKVICESEVNKLKDNMLGLEFIKNNQGRIVQLSLGKTVKIFSALEYEEFVKEHYSKNQRKMKNLLLEDIPDEFIGRQLNDSRYISKFVRTLLSNIVKEEGEQEAISKNIVTCTGGITDRLKKDWGINDVWNKIILPRFERMNKITESEMYTSLTTNGHIVPAMPLELQKGFNKKRIDHRHHAMDAIVIACADRNMINYLNNESASKNAKISRVDLRNMLCSKKVTDTDGNYAWIINKPWNTFTQDCYEALTNTIVSFKQNLRVINKTTNHYQRFGKDGKKIYVSQEKGDSWAIRKSMHKETFYGEVNLRKTKAVSLNEAIKNPKRIVERDLKKKIVAMLALGYDAKKIKTYFEEHKDTWNDINLSKIEVYYFTKETNDRYFAVRKMIDTSFDDKFIKEKVTDTGVRKIMLAHLVAHGGNPKEAFSPEGIENMNANIKALNGGKSHQPIYKVRTYEKADKFSVGENGNKESKFVEAAKGTNLFFAIYENEVFDKKTGETIIRRTYDTIPLNIVIERQKAGLSSAPDKDGISPKYVISPNDLVYLPTAEEIKLGKLSIPLDKERIYKMVSASTSQCFFIKSDVASSIVDKIEFSSLNKMERSITSEMIKETCIPIKVDRLGKVIQIGNEKI

SEQ ID NO: 7523 - protein, 1265 aa, unidentified
  REGION 1..1265: note = Description of Unknown: Cas Enzyme sequence
MSPKGEKPIAIFLVDFFSPTVVGVKKLHKNPKCKTNYRKKMEKVKFETALAVNLGAVNTGLYMISHKVGDTPTASDAVGVNFLTPGSANIVFSQADRTAMRHHRRCIQRKQMARRLLHSCMLAVFAEKKVSLADKQLRELRGAMTGLLKRRGYSRVERENDLSVLESVDPAVFASFPVLGEYFNKTDSIADQWEAMSNRIEDCIKFSEEVIDRKAYKGFLKENFPDLEKSEITACSEAVGAIRQECISLEQMTRSGARHRSEYLESLKAEIHQDTRLKPLVDALGGEDVLYRLVGNVSNLQLRANRWYFNDPVFAKEIPLKQERLKKTLIRAYKFFHPKDEDRARIQSVIAAFESCKTGLEALCSVDPVLTIPVYEDQNQRNPPVDQTLLLNPKKLQNDYGDDWRLWATSMLSADPALGEGLDEILKLADRTSRRAICDNRDTTEYRLSYILQRGLDRSSKEDIYALRAVCNDMKGQAATKGRDNIKRIFGRKGDAFIEFAKRYYDEVNEAKVGLWFLVEDPILERSNLHPKAKNKVTDLLAGNLMCGNAEDGKRLIAVWKETISGQSTMLSLCRGIEATVKAYGRSFDYLYTSAQHKKAEIDAADRKEMDAVAKKVRQIKTFLLENGFTDTEVSRLCNPYSLSALFSILETERSGFCKNSTAVMLENTWRTADETGGSGAHCTRLAADTVRPFDGLLARWLDRIAYEIAQVYDRELRTKNIKNSSVRLNLLLQENRFDFDASLGELKSIPAKKLADKRKKAALPYKEWQSKKDRIKEASRGICPYTGKPIEDNGVMDYILTPSKTKRERDEVFNSEANLIWVSEEGDRIKGDKVYGLSDLHPKYLEAVFGSASVPKIEKVIEDRIADLVNSDKLKSYSSLSDNDKICFRHALFLPQANYARRQVEDVLRTSVRTMINGTQAYFTQILCKKILEITKDWRQRFHNRIEFDVNRIDAYDTFLVRDALSDADPNLAKGGANLASRIADALACYGYACGVRRISRKMDADAALANFKKAQNLVALFPRSMINTKIMSKSSLEKDKPQTKKPFKDSVLAAEYLPIYIYRDLVSVGFRSLPRNAKENTDNASADASLIVGGKNPKKLLELLNPVLEVRYNPDREYCKPTTFRVDKRKAHDWFRNEEKRKGTEYEKTAELLRNLRYNTLRTSVEGRLYDAMAKKMNKAEDILSSRAMELKVKFGKKTEDFMVNGVVRMPFAAKWEEIVFHPDIKPLLGGELPEDFNLALWLKKHRFGDRLESDMTVKNGRP

SEQ ID NO: 7524 - protein, 980 aa, unidentified
  REGION 1..980: note = Description of Unknown: Cas Enzyme sequence
MNSDSSNSSGNVPNKANAVSYWQKHPFFAPDTVVLGIDIGIEGIGICIRKGKKILYDKTYLSPLPKARALADRRTLRASRHSRKNRKVRMHRLRALFEKHNLPWLSDDVMNRSDPFVMRHRAVKSGSKLASKEALTVCIRNLVRHRGYDYYAMESKEIDNCGASNKPDTYPWGDSTSLVDVKNWLRNSVINQEVVDIIDKSRDDFIFKGRQVDDETWETFKALVDERQKLSINKVCKEYAKKKQRKDFERRARGMNFPRSGVANHLQEILEKHSDLIENYDDFIDALFRPCLTKEDKGKSIFYYNRKTPDEAKKHYEKKVKKCPFSEWLEVPEDERKCCQKKDPWYRRWNLADFLSGRTFYLSQKVGKKEIAPLSVHRLLPESVVRDIIQLAVPESGKRVKWAEVKKKMTASLAREGWELSKEHEDWNEDQKAALQDLCDPDPTYLKDRANMSSYACEKLFNLVTDNGRSFDPESMEVRKKESGLYEQRQKLTLSGGIFPQVSSLLGTLGKKKKGSGQEEEQKTFGLLHRLFNKELASQLGGKTVPDYVVIECIRDVAKNQEQKKERSDEIEKRRQKKKALKKAYGVEGEAFPRSMYFRIALWEQQGGTPNSPARCPFTGKLFQTLDPLDPNLELAHLYPASREGYYIMDNLVLTTYHTNKAMRDDTPVEAARRGAFGQSVEQMIEVSKSFKWGKTKRELFAWDKKGFPDCFNNLTRVSQLASQLRRHVAFWLGILEDPKALKERIGYPHGELTAAMRRSLLPDDPEFKKDRDTYTHHRVDAALLSCIPPTGMDLTDRNRIFFNKKTEANWQRFALTIKDGMPYPDIAKFLREDKDVPVIKKPASHKYKPLGDRTFWSVDKDGNVRQREPLDPTEYDSIEAVRNGLVDIGIYDEVFPSDRAIDEWLMECTKEFKRDQDSAYPVLFLKNEQGKKIPVKSVCKKSGKKGGKGGLVNSPLGWSGVQNEKGTLTHVRKLNEVYD

SEQ ID NO: 7525 - protein, 1233 aa, unidentified
  REGION 1..1233: note = Description of Unknown: Cas Enzyme sequence
MPSSYTCAVGLDLGAKCTGVFIAAYDTKTLPQAKDCEALTIVNGDKITYAMKDRTAVRHHVRGGKRFLMARRMLQAVISQKLKEEGVELTADEARSVLDAVFGLLKRRGYSRLETEVDLTVLEDLDSSFFAAYPGLENFFNVEGNLAEDWENNSVTVQKVREVSKALPNLADFKKFLKNNFKVELPDTKAKKPYEDALKTIRSDADSILNLSSMGHQHRSKYLSAIRSDMGKDTRLAKVAAAFGGEDRFANLVGNIANLQLRALRWYFNDVTFAAGDKFEGGRLKNVIVRAFKYFHPDPENSKPHHALIQKLEASDDIVETLCTLDPNETIPPYEDQNNRRPPVDQTLLLNPKSLQKRFGDAWHIWAQKLETTYPALAENLDKITAETDRKSRICVNKKDVLPSKFYRGAYLLQRVLDRNKKFDPFALRLLASGEENQRSKVARQKLTEVLGSQHTVNFILFAQAYYDEVELAKNGLWIGDENSLLECSGIHPPAKKKILPTLVGGVLQVSKEKAEDFIQNIWKLRYAGSASVLSKCRGIEQLRKAYGGEFNLRYKRALYLNEKGRVLSKEDKELVGVKKSVDAVAKFLKGRLGLTEAEADRFANPYSLSQLYTLIETERDGFTNTCLAVHAENAWRMTTTLFDGDLIAQCSRLPADCVRPFDGVVRRTLDRQAWELTKVLGARIKSSVKFTGGVVQVPFLAEANKFSFTASLYELKKQTAKLKKCEDAAKRKRKQWQEKDERIMRASKGLCPYTGIRLDKDGEIDHIIPRSLTNDTEATVFDSEANLIYVSPRGNQLKGDKHYSLSNLNAAYLSKIFGTSDTKAVEEKIEKEVKKLSDENRLKFFELLTEEQQAYVRHALFLDAGSEAREIVIDSLRNKRRTLVNGTQAWFLRRVIAKLQESLEPWKKKTGNRLAFRAWPSDAGLVHNLREALGKLDPILVKPDVQPVVSHTIDAMCSFAGACAVRSARTFMNGNIDFANPEKAELLAALHPRNCRVIRIDSLPIDKKTSVESRALFKDGIFAEEFLPIVLENKVLYAGFDSACNGSKTNRVEVKTKNVLGFLQLLAPFFDRDIDETLQARATYRINKQKAFAFLNRIQHSQPADSEMLQADVLESLLYHTVRKNLASALVSQNGKNLLAEDEVINLKKFTIKVELKTKEWKAAGVVLLPALDDWKALLKTPELQSRLGGEIGEFDLTAFLAGIRGTDRKSRMQHKKCRRTFSLPMVEDPSG

SEQ ID NO: 7526 - protein, 1799 aa, unidentified
  REGION 1..1799: note = Description of Unknown: Cas Enzyme sequence
MKKTFVISVGLDLGAKCTGVFIAPYAEGAEPARENCEALTFVNGENITYEMKERTAARHRVRGGKRFDLARRLLILIISQRLRQAGFEFTQSEQKAAFEAVFGLLKNRGFSRIETAVDLTVLEDLDSGVFAAYTNLDSFFAEDCSLAEQWENNKTSVLQVQKISAVLPKLASFKNFLKVNFKDELPDAKARKPYEEALKAIRSDAASILNMVVMGHKHRSKYFSAIRSDMKKDTRLSKVLKAFGGEERFANLVGNIANLQWRALHWYFNQPKFISGDALEEDRLHEVLVRAFEFFHPDPENSKKHQALMQKIRGTEDIIEMLCSLDPNETIPPYEDQNNRRPPVDQTLLLDPGKLQKKYGDKWKIWEEKLEKAFPELKGELDHITEQTDRKSRICINNKEVLPKELYRKTYFLQRVLDRSKTLNNFSLRRLADGEVNGGGTDDKAELTRVLGSQHVLDFVLFAQSYYDEFERAQNGLWLEDPDSLLEKSGLHPPAKQKILPILVRNVLRISENKVDEFLQNVWMARYAGKSTVLSACRNIEKIRKCYGGEFNQRYKRAVYLSNKGEKINSEEKELLKVKNCVEAVSRFLQGKLTLTDEEVSRFANPYSLAQLYTLIETERHGFSNTCLPVHEENAWRSMTTALIDGERVAQCTRLPADSVRPFDGVVRRTLDRQAWELTKILGDKIISSVTFTNGVVKVPFLAEANKFSFTASLYELKQKTEKIKKCEASAKRRRQQWADKDERIRRASKGLCPYTGIKLDKDGEVDHIISRSVSSDKDATVFDSEPNLFFVSPRGNQLKGEKRYFLSNLNSVYLKKIFGTADIKTIETRIETEIPKIQQENNLRYFELLSEEQQAYVRHALFLDWNSDARKIVIECLKNKRRALVNGTQAWFLRNVMEKLQVYLSDWKDQTGNQLMFRAWSCNVNVVHSLRDAVGKADPVLAKPDIQPVASHTVDAMCSFLSAGAMRRARNWMGGKVGWADPEQAAGLALLHPKKCRVIRIDALPIDKKQDIGSRAIFKEGIYGEEFLPIIVIKGVLYIGFDGRENNRILVTADDASGFLNCLLPFLDGIDADDKAALNEKLDAALKDRATFRINKQKAFNFLNEVQHREPTPQEETKAALLESLLYHTVHKNVVSVLTLQNGKTLKTEAAVIQDILNPKTYPIPVELKAAQWEADGTVYLPSVNLRDARLPLSKHEGASAVPLEFFKGGEFKGEFLPLLWNKGKLYIGFDGKDENRVAVTSKDAFGLLTFVSQFFVRTSKESFEKDAQNASEACREYRINKIRAERFLNEARRKNLSKQEAAQVSFLNTLLYFIVRKNRSDVSDSDIEFSASSEQLRTLSVKVENDGKFAKSWQANGSVSIPAAGSDCEILLVSELKDRVGSSLVFFEEGTLDDDFLSLIWNRGRISVGFDLSGQGKNSVLDIGIQSGEDPEEDKDEKKAREQRISLDLLKLTWNLLDERDKKNFDVNSEDVNKVKATFRFDKSRVLQFLNDSQNRMVTEQEQLLVSVMESLHYYLIRKDLASESASHSEFIKEFSGSEKFAVKVNLNVGSWSAKGILMLPAVDAWMSLLRNPKLTGCLGGTLDDFDLTACLAGIRGTDRKRDIQHARCRRIFSLPMVEAPSGGVRILRRSILGEKVFQTNSANAKFIGYRANGKKVQWKAPVLHPTFTTKNLTVLKEKYRASEDGFISLSQWRRVSDSFGVQIDMAPGSDGRRYIRVRINWPTFVDWVNVKKLKTPMDLKESIKADFTDKVPAELKDILGKPRSAFFIEEVGEIVQFRYIVVNSNDEMNRAYNAGS

SEQ ID NO: 7527 - protein, 942 aa, unidentified
  REGION 1..942: note = Description of Unknown: Cas Enzyme sequence
PPVDQTLLLNPKKLQNDYGDDWRLWATSMLSADPALGEGLDEILKLADRTSRRAICDNRDTTEYRLSYILQRGLDRSSKEDIYALRAVCNDMKGQAATKGRDNIKRIFGRKGDAFIEFAKRYYDEVNEAKVGLWFLVEDPILERSNLHPKAKNKVTDLLAGNLMCGNAEDGKRLIAVWKETISGQSTMLSLCRGIEATVKAYGRSFDYLYTSAQHKKAEIDAADRKEMDAVAKKVRQIKTFLLENGFTDTEVSRLCNPYSLSALFSILETERSGFCKNSTAVMLENTWRTADETGGSGAHCTRLAADTVRPFDGLLARWLDRIAYEIAQVYDRELRTKNIKNSSVRLNLLLQENRFDFDASLGELKSIPAKKLADKRKKAALPYKEWQSKKDRIKEASRGICPYTGKPIEDNGVMDYILTPSKTKRERDEVFNSEANLIWVSEEGDRIKGDKVYGLSDLHPKYLEAVFGSASVPKIEKVIEDRIADLVNSDKLKSYSSLSDNDKICFRHALFLPQANYARRQVEDVLRTSVRTMINGTQAYFTQILCKKILEITKDWRQRFHNRIEFDVNRIDAYDTFLVRDALSDADPNLAKGGANLASRIADALACYGYACGVRRISRKMDADAALANFKKAQNLVALFPRSMINTKIMSKSSLEKDKPQTKKPFKDSVLAAEYLPIYIYRDLVSVGFRSLPRNAKENTDNASADASLIVGGKNPKKLLELLNPVLEVRYNPDREYCKPTTFRVDKRKAHDWFRNEEKRKGTEYEKTAELLRNLRYNTLRTSVEGRLYDAMAKKMNKAEDILSSRAMELKVKFGKKTEDFMVNGVVRMPFAAKWEEIVFHPDIKPLLGGELPEDFNLALWLKKHRFGDRLESDMTVKNGRPRGRTRVTVSLPVVNNGLSTLSLKRKNYFGEPLVQEIVVEGTKFAGFAADKDGKTDFATL

SEQ ID NO: 7528 - protein, 1336 aa, unidentified
  REGION 1..1336: note = Description of Unknown: Cas Enzyme sequence
MERKNNDINYSIGLDIGTNSVGWAVVNDNYQLLKKGNKNLWGSRLFDSANTAASTRMNRSSRRRYNRRRKRILLLQEIMNDMIMSVDNTFFIRLKNTTFLDEEDKQSVLNDNYKDNYNLFIDKDFNDKDFYDKFPTIYHLRNYLIESKEKEDPRFIYLALHHIVKYRGNFLYENQEFSLDVENISEQFDELIMQFLNYNEIDTNIDLNIQDNLISILKEKKSRRLKLDECMELINFDKENKNQFQEFFKALTGQKFNLKKMLSDSELTVDDKDISLNFSSEKYDEEFEEYESFIEEYHQFIDNLKSIYGWIELQGILNNTNKSKISLSKAMIDRYDKHHNDLILLKSIIKKYIPEQYNEIFRKQDDKIHNYVHYIHNTSNTKRDDFYKYLTKILEQCPQESKDVKYCLDEINKENFLLKQNDVSNSNIPYQLNEDELIKIIQNQSQYYSDLKENADHIRRILTFRIPYYVGPLNNESRFAWVVRREEYKNEQIKPWNLEEIIDTDKTAENFIRRMTNFCTYLPGEAVMPKNSLTANMYEVLSELNKIRVDGKYLCTSVKKDIIKELFMKKKKVTDKSLRDWFKKNLIYLNNDNLEITGYQKEKAFSSSLSSWIDFSKLFDDVESYYDLIENIINDMTIFEDKSILKKRLKNRYNLSSKDVKYLMKKRYKGWSRLSRKLIDGLCTDNRYGSNCTILDVMKESNMTLMEIINNDELGYKKLIEERSFQNKDEKFKYDEVNELAGSPAIKRGIWQSLKIVEEITKYMKHKPTHIYIEFAREEGEKKRTSSQIKVLKNIYDNLSKEKKLAEEHDEKVYQYLKKEDVLSHISNERLYLYYTQMGKCMYSQKELDIDKLHLYEVDHIVPRSLIKDDSIDNKVLVIKDENQRKSNDPSLSSRIIDKQSSFWKFLLDNKLITPKKYFNLMRREYDEKTTEKFINRQIVETRQIIKNVAQIISEHYSTTKVVTVRANLTHQFREKYHIYKNRNVNDYHHAHDAYIACIIGDYIQKCYPKLESKYIYGEYLIVYKKDKKKQFNDGFILNGMRNDRFDLDTGERVWDASQIPNIIKCFDYKDCFITKKLEDNDSALFKVTIVPGNKNSNKGKTEASIPVNKYRSNIEKYGGYTGIEYEILAIEGMKKKKKIRKLVGLPLAYRSYSKDEQVKYIENNEKLTNVKIIKTIKKNQLIEYNGGLFFITSYQELVNAKQLILSHHDMGTIYMINKAITSNDYSSLNQSDVVSVYEIWLNKLEKLYPLYNSIVDLLKSLKDNFEKLTLEQQCAIIMELLKITQANPASNNKIKFDKFTMPERKSRLNGKTINLDGITFINQSVTGIYEKKVKL

SEQ ID NO: 7529 - protein, 1165 aa, unidentified
  REGION 1..1165: note = Description of Unknown: Cas Enzyme sequence
MSTNYCDFSKEESYKKQSVEYWNQHPFFAPDTVVLGIDIGIEGIGICVRKGTEILYDKSLLVDLPEAAPLEKRRTFRSTRHSHKNKKVRMRRLRSLFEQHNLPWVSNEVMRRTDPFILRYRALKSDCKLDSPEDLTVCIRNLVRNRGYDYYAMESKEIDKRTTSNELDTYPWGDSTSLVDVKKWLRNSIIDQKVVDIIDATRDEFIFREKQVDEKTWVDFRAFVDERKKVSDEYNIYKICECYAKKKKNKDFNRRARGMNFPRSEVARHLKEILEKHSDFIENYDDFIAALFRPCLTKEDKGKSIFYYNRKTPDEAKKHYEKKVKKCPFSKWLEIPEDERTRCLKKDPWYRRWNLVDFLSVRKFYLSQKVGKKEIAPLSVYRQLPESVVREIIQVAVPESDKRSNWLEVKKKMTASLAQEGWELSKEHKVWNDDQAAALKDLCAPNPKYMNGRAKMSSYACEKLFNIVTDKGSSFDPESMEVRKNESGLYEQRQKLTLDGGIFPQVASLLGTLGKKKKGSGQEDEQKTLGLLHSLFNKELASQLGGKTVPDYVVIECIRDVAKNQDQKKERAKEIEKRRQKKDDLKKAYGVDVKTCSYTDYLRLVLWEQQGGTPNSPARCPFKGLPLPTSDPLDPNLELAHLFPDSKGGYYIMDNLVLTTHKVNKIMGNYTPVEAARRGLFGQSAEQMIEASKFFRWGKTKRELFSWDKESFPDCFNNLTRVSQLASQLRKHVAFWLGILEDPQALRERIGTPHGEQTAAMRRSLLPDDPRFQKKRDTYTHHRVDAALLSCIPPTTGTNSIGYKGIFFNRDVGYVDSRDQKTKSHPQLFALTLGDGMPYPDIPQFLDEDTSVPVVRQRSSSKYKSLGDSTFWHVDSEGHTWQRVPLNPDKMKTSGAVLKALRDSRVPENFIPSIHVIEAWLDQCTEAMKGDLDEKSIPLLRLKNEKGEEKKGPPVKSYWKKESKGGLCSTPLGWSGTVNESGKISQLRSLKPVNDRVELWLGWNPKTKKGCWEYQSRVCPTVNAWRGLQRMGLLTKQLDKLPDFIRKVIEKAGDKSLKKTRKSNVRSLKDVILKKLYPHSILIKTIKRGDVAKVIFDFKSKDGDKKESREEWGEVTAILSNGQVQFDCLTEKNIESYSPSSPSVLARIFGLKSAAEEAQSRGLKP

SEQ ID NO: 7530 - protein, 1232 aa, unidentified
  REGION 1..1232: note = Description of Unknown: Cas Enzyme sequence
MKKICVCPTNSITLSRNLNKFNTMEKILGIDTGTNSLGWGIVLKDEEGNYTLLDHGVNIFQEGVKIEKGIESSKAADRTAHRQVRVHYWRRKVRKIRLITVLSQACLCPPVTMGMLREWRTQRVYPTDDAFLAWQRTDDVHQVNPYYYRYLCLTKKLDLSDLSQRYILGRALYHLNQRRGFLSNRKDADKESEDGKVKEGISQLSEDIAAVGCRYMGEYFYQLYQKGEKIRAHYTARNEHYLAEFRAICAMQQLDAELVRKLEKVIFFQRPLKSQKQQVGKCTFEPKKARCSSSHPLYEEFRMYAFINNIKVKTPMDDDLRPLTPGEKAFIRPLFLRKSKPTFTFEDIAKKIAAGKKNYAYAGDKGDKPYKFNYPLDTTVSGCPLTAGLCEIFGDKWVDAVCEVYTLAGDKSRLEIVNDIWHALFFYDDNAKLKGFAQERLQLSEEDAEKFCRIKVSHEYASLSLKAIKKILPYLRDYGLKYSEAVFMGNLCEVVPSYIWNVAEMRQSVIDDVIEAMHVEEEEAGGLNVEQRLKIPLKEKYFVEDKDLKKLYHPSMIELYPRQRRNDKGIYQLGSPRINSVRNPMAMHSLFRLRKVVNQLLAEGKVDEETVIHIEFSRDLNDANRRKAIQDYQRENEKNRAAYRKEIQELLDENGITREPSDTDVLKYQLWVEQGERCLYTGKQIGVVDFLGDNPKFDIEHTVPRSVGGDSTRMNLTLCDNVFNREVKKAYMPSQLANHEDILLRIEGWKEKYEELDRRVRKLRGSVASTKEAKDAIIRRRHLLSLERDYWRGKYQRFTMTEVPEGFSRRQGTDASVISRYARMYLRSVFHKVYIVKGIATSDFRKAWEIQEEYVKKERINHAHHCVDAITIACIGLSDYARLAQYYHGLELHEKYGEKHPQFKKPWPDFVQDMKRLPDDLLVAHYTPDNMKKSARRRIVTPEGRKLAKGDVARGSLHLDTYYGAIERDGKIRYVVRKSLNTMDEKDVKSIVDDVVRERVEAAISEYGSLKKAVEADGVWMNKEKGVRIVKVRLYANSVTRPIHMRQQRDASPHEYKRSYHVQNDRNYLMAIYVGATGKGREKREFELVNNMASAAYYKRSGDRKATGDTLVPVKSRSGYDLAYSLKIGGLVLLYEESPEEVWELDKEGMQRRLYKITGLSSMVISDNAYGTISLVHHQDARPSTDVKLKNGAYVQNEEFRAGIKELHTQFKGLIEGVDFKMNELGEIIRLI

SEQ ID NO: 7531 - protein, 959 aa, unidentified
  REGION 1..959: note = Description of Unknown: Cas Enzyme sequence
MDYYIGLDMGTNSVGWAVTDPQYNLIRKKGKDMWGIREFDEAEPAAERRTHRVSRRANQRSQVRIGLLKKIFSEALLKEDANFLVRLDNSFYRSEDKDEALATLDAVFADADYRDADYYRDYPTIFHLKYDLIEDRVPNDERYARKVYLALLHYFKRRGHFLNESLSGNDEGGKDVWSGYLELCDVVYGELDIAMKHDDTLAEEFRAVFSDASFSRSKKRELLMEILGISKKDDAQQYMILGAICGLKTDLLKLFVIESEQKAELDFSSAGFEDKLPEIYAVIGESYAGIIDAMKQVYDAGVLAGIMSGTDEEGNPVKWLSQARVSSYEKHKKDLKLLKECIRKYCDKAEYDYLFREESDGSYSAYIGSVNSGKKARRGEKLYASKFGKRYENLKKRVKKDLETHADDENVAYVLAELNEETFLPKQLTFANGVIPNQLHEREMRRILENASKYLPFLQEKDESGLTNSEKIIRLFTFRVPYFVGPVSQNYKGNGWAVRKPGMEKQTVYPWNIEDVIDYNDTREAFIKNMVRECSYIAGEKALPKESLEYQAFMVLNTINNIRVNGEKIPCALKQEIYHDIFEKNGKVTKKKILTYLNQRGIEVEENELDGIDTVIGCQLSTYRRFYGVFGDDLNKDSVRHIVEDIVFKGTVYGDSKKMFETLVAEKYGTSLAPEQIKRIMGFKYRDWGNLSKEFLELEGCNKQTGEVMSLIRALWEDEDNLNLMELLHSDKYTFEESLKEKHQKSLKTISEFSFEDLEEMYFSAPVKRMIWQTLQIIREVTEILGCPPKKVFVEMTRSEEEKKGDAGRKDSREKELLELYKQIKDDRSWDEEIQEAGASGKLRSKKLYLYYKQMGKDMYTGLPIDLNELFDDNKYDIDHIYPRHYVKDDSIHNNLVLVDKRKNSRKSDNYPIDSAIREDEKIAGYWRMLHKKGFINDEKYRRLTGCRHFTEEQQADFI

SEQ ID NO: 7532 - protein, 1240 aa, unidentified
  REGION 1..1240: note = Description of Unknown: Cas Enzyme sequence
MKENGNDQRQGDYYIGLDVGTNSVGWAVTDESYQIKKFHGNAMWGVRLFEDAQPAAERRTSRAARRRLARRNQRLMLLELLFAEEIHKVDPQFFQRLHESDRWEEEKSTGSKDSIFHDAAFTDVDYHRNYPTIYHLRSELLQSTQPHDVRLVFLAIHHMMKTRGHFLYETGENGDEILTVEQAFEQMNQYLRDEYDQMLEPTDKNAFLSIMQNNSMRTSAKKKALHAVCGTQSNIPELNFGVLIDLLAGDKAKPEKLFEDETLKDVAEINLKNGLDELESCQEALGERFALLEFSKTLFDAAQLSQICKGYTYISQAKVAQYQENASDLRKLKQYVRAQIPDKYYMIFSEKKNGLNNYAAYCQYKLTKDDYRCNQEKFCKFLLDKQVELPPPDEMNREMCEIYQKIKDGNFLPKLRGSENGVIPYQLNRQELVHILKQASLYLPFLNRIDDDGMSVSDKIIKTFEFRVPYYVGPVSDRAGHHWAVRFQGKENEKIYPWNFEQIIDLERSADTFMGNLVGRCTYTGEPVLPKDSLLYSEYMLLNEVNLIKINGKSLPVNAKKQLVQDLFYLSSKKVTKKGIIHYLNAKGWMTKSDELTGVDDRIKSTLRSYHDFREILMRTGDSEMVENIIRSILVLGNEPAMLRKWIKNNTHDLTEEEIRRICNLRAKYKEWGRLSRTFLMEIYSPDALGEAKTIMDYLRDTNCNLMQLLSEPYQFADQAKAHFDALVGNNRTLSQRLEDLYIAPAVRRSIQQTMRIVDEIVDIEHSIPKKIFIEMARDNAKEVKKSRTESRKDKLIALYRACREDSGELFQRLEQEEDSRLRSDKLFLYYTQFGKCMYSGEPIDLEALLRGESFDIDHIFPQSKVKDDSLDNRVIVVNTLNRDKSNIYPIQEDIRHKMQPFWAMLKDKGMISQQKYDRLVRNTKLTDSELSAFVARQLVETSQSTKALATILRETYGDRVVYSKAGNVSDFRHQFDLVKCRDVNDLHHAKDAYLNIVVGNVYDTKFTKEFFRNIEKEKYSLKKIFEFDTPGAWDKTESIKTVKKYMEKNNVLVTWMPREVTGALFDLQLLPAGKGQLPKKHGMDISKYGGYNKLTGAYLFVVEHTDKKKKRIRTLEPVFLCQKLVYERDPIDYCKNVLGLCDPCVVVPKVCVDALVEVNGSTLLVTSRSGNKIILKHTYQLTVGSAMERYIKAISKYNDRCEVKKEELPVTRFDGISTEKNLELYHMLADKCDTKSYQS

SEQ ID NO: 7533 - protein, 1081 aa, unidentified
  REGION 1..1081: note = Description of Unknown: Cas Enzyme sequence
AKQIHDAGALAGILHGAAYLSVARVDDYEKHKSDLAVLKSVYHQHKMLEEYDRMFRSEEAGSYGAYVKSVNASRYYKSPSRRNSDDKGRSRDALYKRIAKDLSGVDDARVNQILDDIKNDNFLPKQLTAGNGVIPCQVHARELRKILENAQKYLPFLNERDTFCDLTASEKIVRLFSFQIPYYVGPLTEKSAADGGNGWVVRKESGKIYPWNLEEKVDMRATREEFMRHLIRDCTYLSGEKVLPKASLLYERYAVLNEINNLRISGEKISVEEKQTIYMELFCKKNRVTRKHIEQLLTNMGLLTDSSQLTGIDVNINNKLSSYRKFATIFGDKLKEDRYFRAAERIIKLATIYGDAKKTLKACLREEFGEILDDAQMKKILGFRFQGWGRLSGELLELSGCDRTTGEIRSLIQTMWDTNDNFMEIINSEQYSYKEEIEARKKKIHKSLEEFQPEDLDDYYFSAPVKRMINQTILLLKEIVRVMGCEPDKIFVEMTRKDETKGDRGRKDARSRELLELYKNIKGEITDWECLTQGITDAGESGQLRSKKLYLYYRQMGRCMYTGHPIELSELSTTRYDIDHIYPRQFVKDDNINNNLVLVEKESNAYKSNHYPLGQMDASVYELWQSLHINGFINDEKYKRLTSRQPFTEEEKAGFIARQLVETSQATKGITDLLRQLMPGTTRVVYVKGNNVSEFRHEFGFLKSRLVNDFHHAKDAYLNIVVGNVYDTKFTMNPLNFIKKEYALDEEKNHYHMDRMFDWDVKRNGRIAWVGLTDKKNKCGGTIETVRKVMSRNTPLMTRMSYVQEGKITNKETLWGARTVRNGNEELYLPQKSSDGRKCDVTKYGGYTTITTGYFCVIEHLLKNKRVRTIETVPSYLTKSIKKDEQILLSYCETRLKLKNPRIIVKKIAIKSLISRDGYRMYLSAQSSGGKQYKAWNAVNLCLDQNNINYIRLIEKFCEKSEISADITKEKNMLLYKTLMEKHNLELFKHRLSSIGKIGNALKDGWEKFQQLAIEDQCYILYQILLLSSINETNADLSKIGGAKNADVITVSETLSEKNHLYLINQSITGIYEQVIDLLTV

SEQ ID NO: 7534 - protein, 1140 aa, unidentified
  REGION 1..1140: note = Description of Unknown: Cas Enzyme sequence
PGLKSFFAEDSSLAEQWENNKTSIQQIQEISRVLPKLADFKNFLKVNFKEELSDAKARKPYEDALKTIRSDAASILNMTVMGHKHRSKYLSAIRSDMKKDTRLSKVLKAFGGEERFANLVGNIANLQLRALHWYFNDPKFVLGDKLEADSLKKVLVRAFEFFHPDPKNSKKHQALVQKIGGAADIIELLCSLDPNETIPPYEDQNNRRPPVDQTVLLDPRKLQKKYGNKWEIWEEKLEKAFPELKGELDHITDQTDRKSRICIKGTEVLPKELYRKTYFLQRVLDRSKNLNKFSLRRLADGETKGSGAEDKAELASVLGSQHTLDFILFAQDYYDEVERAQSGLWQEDSDSLLEKSGLHPPAKKKILPRLVGSVLQISAEQAEDFLQNVWKTRYAGTATVLSSCRNIEKTRKSYGGEFNQRYKQAVYLSGKNEKVSNEDKELLKVKNYVEAVSKFLKGKLKLTDEKVSRFANPYSLAQLYTLIETERHGFSKTCLAVHEENAWRSMTTVFNNGEYVAQCTRLPADSVRPFDGVVRRTLDRQAWELTKVLGDKIIGSVPFKNGVVKVPFLAEANKFSFTASLYELKQKTEKLKKCEESAKRRRKQWVDKDERIRRASKGLCPYTGIRLDKDGEIDHIIPRSLTNDTEATVFDSEANLIYVSPRGNQLKGDKPYFLTNLNSAYLKKIFGTSDIKTIETRIETEIPKIQKENNIRYFELLSEEQQAYVRHALFLGVNSEARKIVVDCLKNKRRTLVNGTQAWFLRNVMEKLQVYLSDWKNQTGNQLIFRAWSCDVNVVHSLREAIGEQDPVLAKPEIQPVASHTVDAMCSFLSAGAVRRARNWMVGKIGWADPEQAAGLALLHPKKCRVIRIDALPIDKKQDIGSRAIFKEGIYGEEFLPIIVIKGVLYIGFDGRENNRIPVTADDAFGFLNCLLPFIDGFNADDKAALNEKLDAALKDRATFRINKQKAFNFLNEVQHREPTPQEETKAALLESLLYHTVHKNVVSVLTLQNGKTLKTEAAVIQDILNPKTYPIPVELKAAQWEADGTVYLPSVNLRDARLPLSKHEGASAVPLGFFKGGEFKGEFLPLLWNKGKLYIGFNGKDENRVAVTSKDAFGLLTFVSQFFVRTSKESFEKDAQNAS

SEQ ID NO: 7535 - protein, 1076 aa, unidentified
  REGION 1..1076: note = Description of Unknown: Cas Enzyme sequence
PTIYHLRSELLQSTQPHDARLVHLALHHIMKNRGHFLYQMSDDTDEIVTVPLALEELQRYIRDYYDISFAPEDCDQFIDELQKSDTGVMAKKKALKNAYGRIEENEDEENVDGIKISALVELLAGATIKLTALFTDPALKESEVGSISLKNMEDNIDSYLDALGDRIELLEAAKTLFDAARLAQIRGDHTYISQAKVAQYEKNRSDLRQLKQYVRRTIPEKYKLVFSERKDKLNNYAAYSQYRLRSGEYHCDQEAFCKFLLGKEIELPKPEDSDAEMNAIYTKIKDNTFLPRLKSSDNGVIPYQLNRQELVQILKNASAYLPFLSRVDEDGLSVQEKIVKTFEFRVPYYVGPVNDHAGHHWAVRFPGKEQEKVNPWNFEQVIDTESSAAAFMENLIGRCTYTGEPVLPKDSLLYSEFALLNELNPIQMNGKPLPVDVKQQLVQDLFYRTNRKATKKSICNYLKSQGLMGDSDEISGVDDKIKTTLRSYHDFKDILERTGDVDMVEEIIRSILVFGDDKKMLRRWLGKNTHDLTADDVKHICSLKYQDWGRLSRTFLTEIYSPDENGEAKTVMDYLRGTNNNLMQLLSDKFQFAENAKAHYDELFGNNQTLSQRLDNLYIAPAVRRSIRQTLRIVDEIVDIEKGTPKKIFIEMARGNAKDMRKERTESRKDKLIALYKDCKETSNELFEKLQNEDENRLRSDKLYLYYTQFGKCMYSGEPIDLESLLRGELYDIDHIFPQSKVKDNSLDNRVLVKNTLNREKTNEYPIKSEIRQKMQPFWYSLKQKDMISQKKYDRLIRGTELTNEELSSFVARQLVETQQSTKALATLLKEIYGDKIKIVYSKAGNVSDFRQEFGFVKCRDVNDLHHAKDAYLNIVVGNVYDTKFTERFFANIRRENYSLKKVFDFNTPGAWDTAESIKTVKKYMTKNNVLVTRMPHEAKGALYDLQVMSAGKGQLPKKKGMTIERYGGYNKLTGAYFCVVEHTEKKKRVRTIEPVFLCQKALYERKPIEYCETTLGLKEPIIIAPKVRIDSMLELNGSRLLITSRSGSKIISKAVVKGKCEILSFDSCIWLSKVF

SEQ ID NO: 7536 - protein, 1382 aa, unidentified
  REGION 1..1382: note = Description of Unknown: Cas Enzyme sequence
MEYYMGLDMGTNSVGWAVTDPQYRLIRKKGKDMWGIREFERAESAADRRTHRVSRRRNQRSQVRIGLLKEIFADALAQEDANFLARLDNSFYKAEDKEQCLTTLDAIFADKDYKDAEYYAEYPTIFHLKYALIMDKVPDDGRYARKLYLALLNYFKRRGHFLNESLSGEDEGGKDVWLAFVQMCDVVYEELDIDIKHDTEMADKFRDVFCDATLSRSRKREELMELLGITKKDVQEYAVLSAVCGLKIDLQKLLPIESEQKEDIDFSSAGFENKLPVIYSVVGESYAGIIDAMKQVYDAGVLAGIMSGTDEEGHAIVWLSQARVNSYEKHKKDLRILKSCIRKYCDEAEYDYLFREEENGSYSAYIGSVNSGRKVRRGEKLYAAKSGERYANLKKRLKKDLEAFADDENVAYILRELDTETLLPKQLTFANGVIPNQLYEREMRRILENASKYLAFLNEKDESGLTNSEKIISLFTFRVPYFIGPVCQNYKGNGWAVRKEGMEQKAVYPWNIENVINYDDTRQAFITKMVRECTYITGEKVLPKESMEYQAFMVLNTINNIRVRGEKISCALKQDIYHDLFEKNGKVTKKKILTYLNQRGIEVTENELSGIDVVVGCQLSTYRRFSDVLGEEISRDGAKRMVEDIVFKGTIYGDSKSMLKELIEAKYQDRLSPEQMKRILGFKYRDWGNLSKKFLELEGCNKETGEVTSLIRALWEDEENLNLMELLHSDKYTFEERLKEKHQQTLKSVTEFTFEDLEEMYYSAPVKRMIWQTLLIIKEVTEILGCPPKKIFVEMTRSEEEKKGDAGRKDSREKELHDLYKSIKDDRNWDDEIQAAGASGKLRSKKLYLYYKQMGRDMYTGLPIDLAELFDDNKYDVDHVYPRHFVKDDSIHNNLVLVDKRKNSRKSDNYPIDSDIRNNEKISAYWKMLHEKKFINDEKYRRLTGTKSFTEEQKADFIARQMVETSQATKGVNDLLKEIMPAGTTLIYSKAGNVHDFRNEFRFYKSRTINDFHHAHDAYLNIVVGNVYYTKFTASPVNFIKKEKTEYHLGRMFEKDVVRDGYTAWIAPKIDKQTGEIVESGETLAVVQDMMARNTPLLTRLNATQHGSISDATICSAEKAKTGGYLPVKSLSEPRLMDVTKYGGFNSVKNAYFFLVEHEIEGKGKDKGKPVRIRTLECLPVYKRNYVESHEDGLYQYCLELGLKNPSVRVKRIKPQSLIKVDGFPLYITKKTRNRYGVTNACNLIFEPYWNWYIHVIEKYNKSGRITEEISVEDNVKLYDELTDKHKNGIFAKRPNSVGEKLAEGREKFVSLEIKGQLKVLTEILKLSLICNSALADLREIGGSSETGGATINKRVSEYTEFKLINHSVTGLYTKEVNLLTV

SEQ ID NO: 7537 - protein, 1378 aa, unidentified
  REGION 1..1378: note = Description of Unknown: Cas Enzyme sequence
MGLDMGTNSVGWAVTDPQYNLIKKKGKDMWGIREFERAESAAERRTHRVSRRNHQRSQVRIGLLKEIFSDALMAEDENFLARLDNSFYKAEDKDSNLTTLDAIFADKDYRDADYYKDYPTIFHLKYDLIMDRVPNDGRYTRKVYLALLNYFKRRGHFLNESLSGSDENGKDVWSAYIELCDVVYEGLDISLNHDSSLAEDFRAVFCDSAISRSKKREKLMDLLGIAKKDAKEFIILGAVCGLKADLLKLLSIESEQKADLDFSSAGFEDKLPEIYSIIGESYADIIDAMKQVYDAGVLAGIMSGTDEEGDTIKWLSQARVSSYEKHKKDLKILKECVRKYCDEAEYDHLFRREEDDSYSAYVGSVNSGNVVRRGEKLSASKSGDRYANLKKRIKKDLENYDYDENVKYILREMETETFLPKQLTFANGVIPNQLHEREVRKILENASKYLPFLRDKDESGLTNSEKIVSLFTFRVPYFIGPVSQNYKGNGWAVRKPGMDTRAVYPWNIEEVIDYDDTRSHFITRMVRECSYIVGEKVLPKESMEYQAFMVLNTINNIKVRNEKISCELKQDIYHDVFENNGRVTKKKILTYLNNRGIEVSDNELSGIDTVIGCQLSTYRRFYGVFRNELSKDSVKHIVEDIVFKGTVYGDSKEMLRQLISEQYSDTLSQDQIKRIIGFKFRDWGNLSKQFLELEGFNKKTGEVTSLIRALWEDEDNLNIMELLHSDKYTFDESLKEKHQNSLKSITEFAYEDLNDMYFSAPVKRMIWQTLLIIREVTQIMGCPPKKIFVEMTRSEEEIKGDAGRKDSREKELLELYKSIKGDRSWDDEIKEAGSSGKLRSKKMYLYYKQMGRDMYTGLPIDLNELFDDNKYDIDHIYPRHYVKDDSIHNNLVLVDKRKNSRKSDNYPLDTDIRGDKEITAYWSMLHQKGFMNDEKYRRLTGDRPFSEEQKADFIARQLVETSQATKGVNDLLIEILPKETTLVYSKARNVSDFRRDFGFYKSRMLNDFHHAHDAYFNIVVGNVYYTKFTANPMNFIRKERGKYNLGRMFERDVVRNGYTAWVAPVKDKVTGEIIEPGVSLAAVQKTMSKNTPLLTRLSTTQHGAISDATICSASKAKEDGYLPVKSSNNTKLKDVTKYGGFNSIKIAYYFLVEHEIDGKGKDKGKPVRIRTIECLPVYKRAYVESHDDGLYQYCLELGLKNPSVRVKMIKPQSLIKVDGFPLYITGKTGERFVVRNACNLILTSYWNRYIHLIEKCNLSDRIPEGISADDNIRLYDELTSKHKYGIYAKRPNSIGETLDKGREKFIDLEIDKQVNILTQIINLSLICNSASADLKLIGGSSKTGVTLISKKVSGYSEFKLINYSVTGLYVKEVDLLTV

SEQ ID NO: 7538 - protein, 1368 aa, unidentified
  REGION 1..1368: note = Description of Unknown: Cas Enzyme sequence
SVGWSVTDEADGNLLQKGGKNAWGSRLFETAETAAGTRTARTTRRRLDRRKQRICNLREIIAPDMEQVDKDFFAKFNQTQLVEADRITDDAHILFNEETYNELFLEDASREHASKKYPSIYHLRKRLVEDSSKEDIRLVYLALHHLIKYRGHFLIEGELTAQSADGQASFVSLKETLVNYCEMHDIVFIEESFDSDAMNTVLTKSSAKRSERQEELAILLQSCFERTEKDFVKAITKAIFGYQISWENVFEIEASSETKFALNNDQKVEAFEDGILPEDDAELFEVIKMLYNAYLLAGILKGASGSTLSASMVALYEQHHRDLAWLKSVVKRYSAVDSETKRNDDYNKMFRGPKYADGTYMKKPAKGYTGYILGNVSLEDLYKQVKALVSSYSLSTEDAQYWESAKNRIEDGTFLRKLRASDNGAIPHQLHLEELRIIVKNQGQYYPSIKENAKHIEQILTFRIPYYVGPLGKEKNPNREKPFGWAKRRQGFENVQIKPWNFEEVIDIDQAANDFITNLTGTCSYYYGMPVIPKYSLLYSEFCVRQELNKCKVARDGENFTLMDVEIVEGIYQNVFKRHSRVKVDQVREYLKSIGFINTGFKGTQKDNEFASSLKSYCDFRKILERDFDSFEDYEMVEQLILWVTVYEDKKILKRQINEKYGPQGNGVLTKEQIEKIARLRYTGWSNLSREFLCELKVNYNGRKLSIIGALRDSGQLYPMNLMEILASEKFGFKKLLAEKNEEYLSAHEGFALEEIPGSPAIKRGIMQAIRIVDEITKIAGKAPKRIVVEMAREEVGQGKGKRTTPRDKQLKELYSKLQDDILLEDSEHLASQLTDKSAQLDNDKLFLYFLQRGKCMYCGKTFDVESLADYHVDHIVPQSMIKDDSLHNRVLVCRHCNELKLDEYPLPTSIRNFANMKRWKALKEAGLISAKKYNNLMLSDADERRLNGMARGFINRQLVETRQISKHVVTVLQARYPESDVETIKAALSHQLRETYDLPKVREINDFHHAHDAYLASQISRFIHERFKYMAEDLSYDKFSKYAYAVKKMQNSNTGLVVNSFKIIGADAGCHESAFKDAWDGEAEVKRLQTVLDYKDCYISRKIERLTGEFWNQNPISPREFSDKAVEIKQGLNVENYGYYQGVNSAYYALVEYLDTSKKKHVKKRAMVGIPVNVSYIIDNPASSLTMQSYLERLFEEVDIIRAPIYKYQKIEWDGGYYYLTSPSEMINARQLCLPHEHVSYLAVAQKAVCADAKYKAVKIFNEWPDKVALNKEIYIYLCEQINNYYPRYNGVYEKMTAVKTVSIFDNADIKSQVAMIFEILNMLHCDGRRGLSLLSLSPSSGRMNCLNLSSPDIRFINTSVTGMYES

SEQ ID NO: 7539 - protein, 1489 aa, unidentified
  REGION 1..1489: note = Description of Unknown: Cas Enzyme sequence
MKRILGLDLGTNSIGWAVVTARKDEEGREHIIGIEGDGSRIIPMDAAVMGDFDKGNTVSQTADRTSFRGKRRLQERFLQRRERLHRVLKILVFLPKHYEEQLTRYGKFITPDACNLAWTKDKDGKPTFLFESSFQEMLDDFRKTQPELVSDGHKIPYDWTLYYLRKKALTQEITKEELAWILLNFNQKRGYNQLRGEEEETPQTPKNRQYFERSTITDITDTGKEYKGKKILRITLANGDSGKIFRKDIPEWIGQEKTMIATVKLKDGRDAIDDDGEIDRIYKIPTEQEWENEWALVKMKTQQDLDAQEKTVGAYIYDTLLAQPGQKIRGKLVRTIDRPYYKKELYSILETQRNFHPELQDAALYKACIEELYAANDAYRNSIAKRDMVYLLVDDVLFYQRPLKSKKSLISNCPYEYHLYTKDGEEQREYLKCIAKSHPLFQEFRLWQFLSSLRIYKKETKADIDVTDQFLTSDAARAELFSWLNDRKSIDQKSLLKYPGFKLKKDADLYRWNYVEDKSYPCNETRALFLKAIDKVGLNASFLTTDIEEALWHILYSIADPKELAKALRRFAEKHGLQEEFVDAFKNLPPFKAEYGAYSAKAIKKLLSVMRLGKYWSADSIPASVRRQIDAITSGDCSEKLKVQMEGASLLNGHVEQFSGLPVWLACYVVYGRHSEGKEIQKWESPEDIDNYLNHFKQHSMRNPIVEQVVMETLRVVRDIWKQYGKIDEIHIELGRNLKEPADKRKKMTDRILENERTNMRIRLLLMEFANPDYKIEGVRPYSPSQQELLRIYEEEVLQSEEVDDEILEILKKFQQTDSAKQPKPSEIKRYRLWLEQKYRSPYTGKPISLARLFTSDYEIEHVIPQSRYFDDSLNNKVICEAEVNKLKSNALGFEFIKQHHGEKVQLAHGGTVTIFTEAAYEEYVKEHYAKNRKKCQNLLLEDIPESFSSRQLNDSRYISRVVKTLLSNLVREDGEEEAISKNVVPCTGSVTDRLKKDWGINDVWNQIILPRFERMNTFGIGSFTSVTANGNIIPDIPLQYRQGFNKKRIDHRHHAMDAIVIACANRNIVNYLNNVSASENGKTTRRDLQTILCEKHKLDGSNYEWLIRKPWDTFTHDVYEALSTTVVSFKQNTRIISRCTNHYERIVNGKKVRVPQTKGELIAVRKSLHKDTVFGEVNLVRTKFVSLNDAVKSPSRIVDRYLRGTIRKLLAEGCNAKKIKEYFAAHNTEWEAHTQKAKIEVRYFTQETNERFYAVRVPIDTSFTEAVIKKSVTDTGAQKILLRHLANCGGDSNVAFSPDGIESMNRNICELNGGKFHQPIYHVRKYESANKFSIGSTGNKRAKFVESAKGTNLFFAIYEQDGVRSYSSIPLRTAVERAKNHLPIAPENEQGISAKYVLSPNDLVYLPTQEDIANGKIAYPLYMDRIYKFVSTSKGEAYFVSAEVSSPIVNKIEYGPLNKIGRALSGEMIREICIPLQVDRLGNVTTKE

SEQ ID NO: 7540 - protein, 1122 aa, unidentified
  REGION 1..1122: note = Description of Unknown: Cas Enzyme sequence
KEIFKLIIGLKANLSIIFQDDAFSEVEHNKICFADSNYEEVRLLLDDEIQEKAGIIDVFHSLYNWVILSDILEGGDFEGHSYLSIAKVRNYEKHHKDLVKLKDLVKQYCPEEYSRFFSSKDAANYCSYIGKYKSNGKKISVKRCNQEDFYKSLKKLLSKMPENVKPIVDISTEVENKTFLPLQVCKDNGVIPYQINKMELQQILKNAEKYLPFLKKLDSECNMTISEKIVSLFEFRIPYYVGPLNTSKGENCWMIRKDEDGAIRPWNFEQKVDKDASAAKFIQRMTNQCTYLQNETVLPKYSLLYSEYMVLNELNNVRIHGERISVELKQAIYNDLFKVHKQVTGKKLLDYLNSHGYSLKKDDLSGFDGNFKSSLSSYIELKKIFQEDVNLYSMQQMLEDIILWITLYGDDQQMLKRVIRNHYGRELKDEQIKALSRLKFQGWGRLSKRFLSEILGAECSTGECMTIISGLRNTQNNLMQLLSSEYTFLETIDEENAGFHINGEISYDNLVKDVVASPAIKRAVWQTIQIVEEVKKVMGKAPKKIFVEMARSEEEKKRTISRKNKLLDAYQIIDKEYKSDWCAELSGREEGDFKSIKLFLYYTQMGKCMYSGEPIDLSQLNDATIWDRDHIYPQSKTKDDSLDNLVLVKRTINAKKSDGMISPEIQQKMRSTWRYLKDKGLISDKKYERLTRTTPLTEEELAGFINRQLVETRQSSKVVATLLNRIYQETEIVYVKANAVSDFRRDYVDTVKVRELNDYHHAKDAYLNIVVGNVYHTKFTSNPLHWLKEHPNTQYSLNQMFNFDLKDSKQQNIWLRGKNGTVRIVNETMNRNDILFTRYAYCNKGGLFNQQIVGAPEDKSKAAGLIPIKKGMNPEKYGGYTSVTPSHFMLVESKDKKGNLIRTIETVPLYKVKDFNENEGLLLDYCREVYGLIEPRIILPCIKKNARIVVNGFPMHLKGSTGKQLKLQGAVQLCLDNKHASYLKKITKYIDENAKRTDKRSMMKIDSYRKITKEENMELYNIFIDKLSNSIYKNRPVNICEKIFEKTDKFISLEIEEQCFILSELLHLFQCRPVSANLTLIGESKNAGVIVINKKITNFDSVKMVSQSPTGVFQQVVDLLTV

SEQ ID NO: 7541 - protein, 1102 aa, unidentified
  REGION 1..1102: note = Description of Unknown: Cas Enzyme sequence
MGEKMYLGLDMGTNSVGWAVTNENYELLRGKGKDLWGARLFDAAETSVERRLHRTARRNGQRQKARINFLIECFYDEIIKLDSGFFVRLKESKYHFEDRCEDNKQPYTLFNDSDYTDKDYYEQYPTVFHLRKELLDSTDKHDIRLIFLALLNMYKHRGNFLSDSIDADASSSIEDAYAALVAEAEKYEIVFDANINTKKFLELLGDKNKSRTQIKEEILKFIGIEKPKKDDAPGIARYEIINLICGISGKIVNIFGKDIVSEDNAKLSISFRDSNYDETELNVRETIGDDNFEIIAAAKVIHDIGYLASIMKGQTHLTYARVQSYEDHKKDLTLLKSVLKKYDMEAYNDMFRVMKPGNYSAYVGSVNSDKVKQRRSGGNGSRDELYKNIKKLLIDEKKFPQDDTDIQKILERIANETFLPKQLTFANGIIPNQVYVSEMRQILSNAENYCPFLLEKNEYGLTISEQIVEVFSFRIPYYVGPIGQEYLDKKGYNVWARRKESGRVYPWNFEDKIDTKEAAEKFIQRMVRRCSYLSDETCLPKCSLLYEKFMVLNELNNLKVNDTPISAETKQDIYSTLFKKGKKVTIKQIQKYFINSGLVAKDATNFLSGVDLQGFKASLSSLGKFLGVFGQDALRDDYMKMEEDIIFWATVYGNDKKFLKEKIIEVYGSVIDEKQLKRILGFKFDGWGNLSREFLELEGGSRKDGCKRSIIQTLWETNDNLMQILSSDYTYTEIIQEKINLVNKSLSEWTIDDLDGMYLSAPVKRMVWQTLKIMKEIESVKGKAPDRIFIEMAREDGEKGVRTISRKKKLDNLFTAMKAEGKIWKEEIEKYSEAEFRQKKLYLYYLQQGKCMYTGQSIDLDELMKKNSKYDIDHIYPQHYVKDDSLENNNVLVLKEENGRKSDDYPLDANIQKKMYGIWKHLADNGLMTQEKFRRLTRTTRFTDEELSAFINRQLVETRQGTKAITQIVQQAYPDSEVVFSKAGVVSDFRHQFDLPKVRCINDLHHAQDAYLNIVVGNTYYVKFTRNPLNYIKAAKKDTKGEYAYHMGMIFLRNVQRNGDTAWIAPDGKDKDEKLKSNTGTIKTVKKMMSKNTPLITKRTYI

SEQ ID NO: 7542 - protein, 1089 aa, unidentified
  REGION 1..1089: note = Description of Unknown: Cas Enzyme sequence
MKYYVGLDMGTNSVGWAVTDQEYQLIRKKGKDFWGIREFDEAEVAVERRTKRISRRRREREIARIGEVKMLFSDAVLSEDPQFYVRMENSKYHAEDKSDELKSVNGIFDDAHYKDADYYREFPTIFHLQKALIEDTLAYDDKYARLVYLAVLNIFKHRGHFLNTGLGGEMNTMEQIYPEFVRKSEELLSVSFPEDAAFSIEEILSDRTKSRSVKSEKVALICGAQKQDKKKILLIKLICGLKVDGKKLFDDIETEEDISLNFDDASYEEKSEQWLSVLGESYFGLIETAKQMHDSGVLAGILHGFSYLSFARVNDYEKHHDDLKKLKNLYHQYKNLQEYDKMFRSEEKGSYGAYVLSVNSEKYQKSPSRRASEINGRTKEELYKTIKKDLSSIDDERVTQILNDMENGVFLPKQLTAGNGVIPYQVHEKELFEILKNAEKYLPFLKEKDSTCGLTVSEKILRLFSFQIPYYVGPLSEKSARDGGNGWVVRKEAGKVYPWNIEQKVDMHRTQEEFIKRLIRECTYLSGEKVLPKDSLLYEKFAVLNEINNIKIFGEEISVDIKQKIYQELFCKGKRVTRKQIEKLLINMGLMTESSQLTGIDIHVNNSLSSYGKFYQIFGEKLKEDRYFSMAERIVELATIYGDSKKMLKVCLKEEMGDFLDDGQIKKILGFRFQGWGKLSRELLQLSGCDKTTGEIRSIVQTMWETNENFMEIIHDERFTYKEELEKKKKKLDKSLSEFKVEDLEEYYFSAPVKRMINQTLRVLQEIIKVMGDEPAKVFVEMTRSEGIKGDRGRKASRSKELLELYHNIKGETRDWEKEITDAGESGQIKGKKLYLYYRQMGRCMYTGHPIDLNELFTGKYDIDHIYPRQFVKDDNISNNLVLVETQSNEYKSNRYPLDRMDSSVYALWETLHGYKLMNDEKYHRLKSRNPFTEEQKAGFIARQLVETSQGTKGVTDLLTQLLPNTRVVYVKGNNVSDFRHDYGFLKCRLVNEFHHAQDAYLNIVVGNVYDTKFTKNPLHFIRDEYGKDAKKNHYNLGKMFRWDVVRGEEIAWVGHNEDKQGGTIETVRKVMQKNTPLMTRMNYINRGA

SEQ ID NO: 7543 - protein, 1191 aa, unidentified
  REGION 1..1191: note = Description of Unknown: Cas Enzyme sequence
MKTQQDLDVQEKTVGAYIYDTLLAQPGQKIRGKLVRTIDRPYYKKELYSILETQRNFHPELQDAALYKACIEELYAANDAYRNSIAKHDMVYLLVDDVLFYQRPLKSKKSLISNCPYEYHLYTKDGEEQREYLKCIAKSHPLFQEFRLWQFLSSLRIYKKETKADIDVTDQFLASDAARAELFSWLNDRKSIDQKSLLKYPGFKLKKDADMYRWNYVEDKSYPCNETRALFLKAINKAGLNGAFLTTDVEEALWHILYSIADPKELAKALRRFAEKHGLQEEFVDAFKNLPPFKAEYGAYSAKAIKKLLSVMRLGKYWSAENIPTSVRKQIDDIVSGDCSEKLKEQMEGASLLNGHVEQFSGLPVWLACYVVYGRHSECKEIQQWKSPEDIDNYLNHFKQHAMRNPIVEQVVMETLRVVRDIWKQYGKIDEIHIELGRNLKEPADKRKKMTERILENERTNMRIRLLLMEFANPDYKIEGVRPYSPSQQELLRIYEDEVLQREEVDEEILEILKKFQQADSAKQPTSSEIKRYRLWLEQKYRSPYTGKPISLARLFTSDYEIEHIIPRARYFDDTLNNKVICESEVNKLKKNKLGYEFIKHRHGEKVQLSHGGTVTIFTEAEYEEFVKEHYAKNRKKCQNLLLESIPENFSSRQLNDSRYISRVVMTLLSNLVREDGEEEAISKNVVPCTGSVTDRLKKDWGINDVWNQIILPRFERMNTFGIGSFTSITANGNLIPDIPLQYRQGFNKKRIDHRHHAMDAIIIACANRNIVNYLSNISASESGKTARGDLQRLLCEKHKLDGSNYEWLIRKPWDTFTHDVYEALSTTVVSFKQNTRIISRCTNHYERIVNGKKVRVPQTKGEMIAVRKSMHKKTVFGEVNLVRTKFVSLNDAINSPIRIVDKYLRDTIQNLLAEGGDAKKIKAYFAAHNTEWEAHTQKAKIEVRYFTQETNERFYAVRIPVDQSFTEDFIKKGVTDTGAQKILLRHLANCGGDSNVAFSPDGIERMNRNICELNDGKFHQPIYRVRKYESANKYPIGTKGNKRAKFVESAKGTNLFFAIYEQDGARSYDTIPLRTAVERAKKRLSIAPENEQGISAKYVLSPNDLVYLPTQEDIANGKIAFPLCMDRIYKFVSTSQGKADFVNAAVASSIVDKVEFGSHNKFGRAPSGEMIREICIPLQVDRLGNVTTKE

SEQ ID NO: 7544 - protein, 1272 aa, unidentified
  REGION 1..1272: note = Description of Unknown: Cas Enzyme sequence
DAIKKEDPDFFVRLDNSMFYGEDKVECVRGKNSLFADKDYTDVEYQREYPTIAHLQMALIEDKVPNDNRYARKVYLAVSNMYKRRGNFLNEGLGDDISTVESEYPEFVRQSKEVLNIKFPEDAAGKLEEIVTDPSLSKKKKAEKLTTLFDVGGKDKITPLVIKLMCGMKADLRSLFPDAHIDEKLSIDFDSTDMDEKGQEILQAVGETHFAYLNEVKALYDAGVLAGILHGEEYICQARIKSYDKHHADLTLLKEVYRAFCPRKKYKEMFAFDGPGSYSAYINCTKHSGKKRRRRSEKAGRAKEALYKKIQEDLTGIEDERVQRILDEIENETFLKKQITTENRVIPFQIRRNEMALILKNAQQYLPFLNEVDETYGITTSEKILQLFSFCVPIYVGPTTEESERSGGYGWVVRKKEGKVYPWNIEELVDMPATRNRFIEHLVGECTYLSEQRVLPKNSLLYQKFAVLNEINNLRIDGEKLDPATKQRIYRDLFLKGKHVSRKQIANYLIPYGLLQDETQLTGVDTKVNSALTSYGKMHRIFGEDLNDSYYWDMAERIIELATIYGEARKVYESCIHEEFGKVLHEQQIAMILKLNFRGWGELSKEFLLMSGCDKKTGEKVTLMDVLWDTNQCLTEITCSTNYDYVQTLEKRRRKMTKNLYNFEIDDLDAYWFSNPVRKMVNQSVSQLREIIKVMGHEPDTIFLELAKGEGENVRKEKAREKELLALYKDIKDPARNWKEEIKQEGTIKSRKLILYYQQMGRCMFTGHPIDREELFTDKYSIDHIYPRQFVVDNDLDDNLVLVESECNSKKSNRYPLEDIPDGVSQLWQVLHGHNLINDKKYDRLTSKEQLSVEQKAAFISQQMIGNNKVERKIVTIFTQMMPETHIVYIKGSNVSTFRKEFGFLKSRLVNDLHYAKEAYLAAVVGNVYHTKFTDNPMVFMQDYCSDPKKYHYHLGKMFANNVERDGVTAWIAPDEDGNGGTIETVRQTMKRNTPLSTMAVYTKTGAFSNETLINKDLAKPDVYFPIRSKDKRLCDVTRYGGKSSIATGYFFVVEHTKKNNRVRTIEQVPTYLLKKIEKNPQEQIRYCKEVLKLDEPRIVWKKIQLKSVLEKDGYRMYLSGKTGPNICFWNAENLCLDQEHIDYAREIEKNRNVKEVSKTITKEQNMEFYGMLKKKHAEQIYSRKPGSIGETLIAGEKKFEALSLQDQCYTLYQILLLTGIGVSAADLTKIGGSKNGGIGRVSKNISEKNHLYLINQSVTGIYEQKIDLLTV

SEQ ID NO: 7545 - protein, 1119 aa, unidentified
  REGION 1..1119: note = Description of Unknown: Cas Enzyme sequence
MEYYIGLDMGTNSVGWAVTDPQYNLIRKKGKDMWGIREFDAAESAADRRSHRVSRRGNQRSQVRIGLLEEIFHEALEKEDVNFFVRLDNSFYKQEDKDERLETMDAIFADSDYRDADYYRDYPTIFHLKYALIKDEVPNDGRYARKVYLALLNYFKRRGHFLNEGLSGSNAESEGVWQSFVTLCHALEEELELCINHESALSKSFEDIFCDSSLSRSARREKLMELLVLSKKDNPKEFIILGAICGLKTDLLKLFSIESEQKADVDFSLAGYEDKLPEIYSVIGESFSGMLDLMKRVYDAGVLAGIMSGTDYEGNTIKWLSQSRVNSYEKHKKDLKLLKNCIRKYCGDAEYDFLFREDEDSSYSAYVHSFNSENKVRRGENLHKSKSGERYDNLKKRIKKDLEAYSDDENVAYILKELETDTFLPKQLTFANGVIPNQLHEREVRKILDNASKYLPFLNNKDESGLTNAEKIISLFTFRLPYFIGPISQNYKGNGWAVRREGSEKTAVYPWNIEKVIDYDSTRKEFITRMVRECSYIAGEKVLPKESMEYQAFMVLNTINNIKVKGEKISCALKQDIYHDLFEKNSKITKNKIAKYLNEQRGINVAENEIDGIDTVIGCQLSTYRRFYGVFGDELSKDSVRHMVEDMVFNGTVYGDSKLMFSKLVKEKYSDRLSEEQLKRILGFKYRDWGNLSKEFLELEGVNKATGEITSLIRALWEDDDNLNLMELLNSDKYDFEENLKNKHEESLKTISDFTFEDLDEMYFSAPVKRMVWQTLLIIREVTEIMGCPTKKIFVEMTRSEDEKKGDAGRKDSREKELLDLYKSIKDDRSWDKEIQEAGASGRLRSKKMYLYYKQMGRDMYTGLPIDLNELFDDNKYDIDHIYPRHFVKDDSIHNNLVLVDKRKNSRKSDNYPIDKDIREDAKIAGYWKMLHEKKFINDEKYRRLTGSREFSEEQKADFIARQLVETSQATKGVNDLLREIMPQETVLVYSKAGNVSDFRRDYGFYKSRTINDFHHAHDAYFNIVVGNVYHTKFTANPMNFVKKEKKEYNLGRMFERDVVRNGYTAWIAPIYDKQTHELKEMGESLSTVKKMMAKNTPLLTRLSTTQHGAVSDATICSA

SEQ ID NO: 7546 - protein, 923 aa, unidentified
  REGION 1..923: note = Description of Unknown: Cas Enzyme sequence
VEYYIGLDMGTNSVGWAVTDPQYNLIRKKGKDMWGIREFEAAESAAERRTHRVSRRAHQRSQVRIGLLTEIFAAALTAEDANFLARLKNSFYKAEDKDPRLTTLDAIFADEDYRDADYYRDYPTIFHLKYDLILDKVPNDGRYARKVYLAFLNYFKRRGHFLNESLSGKDENGKDVWAAYLELCNTVYDELDISMKDDSILAEDFRAVFCEASISRSRKREMLMELLGISKKDDAQQFLILGAVCGLNADLLKLLHIESEQKADIDFSSAGFEDKLPEVYAVIGDSYANIIDAMKQVYDAGVLAGIMSGTDTEGNPIKWLSQARVNTYEKHKKDLNILKECIRKYCDSAEYDAMFREETDGSYSAYIGSVNSGVKARRGKKLYASKSGKRYEKLKKRIKSDLESYAEDEKVAYVLSELDAETFLPKQLTFANGVIPNQLHEREMRRILENASKYLPFLKEKDESGLTNSEKIIRLFTFRVPYFIGPVSQNYRGNGWAVRKPGMEGMPVYPWNIEEVIDYDDTREAFIFKMVRECTYIAGEKVLPKESLEYQAFMVLNTINNIRIRNEKISCTLKQDIYHDVFEKEGKVTKSKILKYLNQRGIVVDEDELTGIDTVIGCQLSTYRRFYGVLGDDLNRDSVRHMVEDIVFKGTVYGDSRRMLKELVTEKYSDSLTQDQLKRILGFKYRDWGNLSKEFLELEGCNKQTGEVVSLIRALWEDEDNLNLMELLHSDKYTFEERLKEKHQKSLKTITEFTYEDLEDMYFSAPVKRMIWQTLQIIREVTEILGCSPKKVFVEMTRSEEEKKGDAGRKDSREKELLELYKQIKEDRSWDEEIREAGASGKLRSKKMYLYYKQMGRDMYTGLPIDLNELFDDNKYDIDHIYPRHYVKDDSIHNNLVLVDKRKNSRKSDNYPLDSDIRKNMAE

SEQ ID NO: 7547 - protein, 1154 aa, unidentified
  REGION 1..1154: note = Description of Unknown: Cas Enzyme sequence
MKYRLGLDLGVGSIGSAVIGLDEQNNALDIVDAGVRIFEVSEGAEERRLKRTARKNVVRTRKRLELLAQKLSENGLWVNEKPEGTLHLRSKSPYKIRHDAVYGQLENPNYVGRAILHLAKHRGAGYVCASEEMEEEILDEGEKSKKKASPYENMSSYLRKTDSKTLGDFFYKRLCEGFEKDQDKNFIAPEKRILRQKAYALQNSAVDYAIPRYLVKDEFNQIWDTQAKYFLQMQKEGLKQEIYDILFYEKAPAPYATGKCIYFRQEDRLLKAHPLTEMRRLYEEVNNIRLENDLTRYRLSVEQRDKIINELLLKGHNAGKKAIKSLLKLGGQVKVSIEEDKVIKAYLYSRPEFTKIPYFQNLSETKLSELVEFLAEPKDPNDKDGRLLTEDKQILKLKVMLHFDDEKAIGELLAKLPKGRAMLGLSATKILIDEMKKAVLSPREITDRLAKTDPHFRAEEEIARASQGGSDILPYYGKILLTDTQPLPPLMKKYNQSLNADEREYGKIANPAVHMILNQLRRVVNEIIKLYGRPYEICLEVGKDVGLSTKKKKEFEKKQKQNEKSNIEARQYLSARHMRVTHDNILKYKLCKEQNNKDAYNPRVEIPQDFSGFEIEHLCPQAVEGSDTYNNLCLVSRNANLGKGKMFPYEWFEVKYKEHPEYIREILKNARDCLPPEKAWRFEPDAREIYTDTGDEDATSRYLTDTRYVSKMAMRYLKAIIDCPTGQEHTENRIISIRGRQTAELRRRWNLLGLEYDLTGLNREVPRYIALPAEVVNATTGEVFDRKKNPEWKAKPRIDHRHHAMDAITVACVDWWMIRHLSDEEKLKSAWIKPYPLKNVSHFRERVLEVLKNINVSHKPEHSKEGQLHKETGRTVLCANPEDKNALITVYSRNILQVLKTFKDLDKLLVSSAVKDEWHPEIAQSRQKQAKLKEYFELYGNTAEQILIAENEKAVAEGKKERKITEAMILTRAFAIIQEKKLWKGGSFRSYENSSSLVYIPKHNLAYEGRNNYCVDFYRKDGKVGWEVIKLFDVNQKGFVPQWKKDGGQALWSVQQRDILELDTPEEWQGYTDKPRCLAKVKKFSDGKITIDYMADARGTTKGKDEPNYMLVQSIDGRGLSYLTSHKARKVELTAFGRIKKKHKALWNGTAAAH

SEQ ID NO: 7548 - protein, 928 aa, unidentified
  REGION 1..928: note = Description of Unknown: Cas Enzyme sequence
DSLLECSGIHPPAKKKILPTLVGGVLQVSKEKAEDFIQNIWKLRYAGSASVLSKCRGIEQLRKAYGGEFNLRYKRALYLNEKGRVLSKEDKELVGVKKSVDAVAKFLKGRLGLTEAEADRFANPYSLSQLYTLIETERDGFTNTCLAVHAENAWRMTTTLFDGDLIAQCSRLPADCVRPFDGVVRRTLDRQAWELTKVLGARIKSSVKFTGGVVQVPFLAEANKFSFTASLYELKKQTAKLKKCEDAAKRKRKQWQEKDERIMRASKGLCPYTGIRLDKDGEIDHIIPRSLTNDTEATVFDSEANLIYVSPRGNQLKGDKHYSLSNLNAAYLSKIFGTSDTKAVEEKIEKEVKKLSDENRLKFFELLTEEQQAYVRHALFLDAGSEAREIVIDSLRNKRRTLVNGTQAWFLRRVIAKLQESLEPWKKETGNRLAFRAWPSDAGLVHNLREALGRLDPILVKPDVQPVVSHTIDAMCSFAGACAVRSARTFMNGNIDFANPEKAELLAALHPRNCRVIRIDSLPIDKKTSVESRALFKDGIFAEEFLPIVLENKVLYAGFDSACNGSKTNRVEVKTKNVLGFLQLLAPFFDRDIDETLQARATYRINKQKAFAFLNRIQHSQPTDSETLQADVLESLLYHTVRKNLASALVSQNGKNLLAEDEVINLKKFTIKVELKTKEWKAAGVVLLPALDDWKALLKTPELQSRLGGEIGEFDLTAFLAGIRGTDRKSRMQHKKCRRTFSLPMVEDPSGGVRIQRTNIRGDRVYQTHSANALFVGFSADGKKVAWNKPKLLPTFTTKNLTVSGEKYRAPEDGFVPLSQWRRVSDKFGAQIDMAPGSADRRYVRVRLSWSDFAGWIDAEKLELRDAMDLRDNVKVASFTDKVPAELRELLGKPRSVLFIEEVGPTVQFRYIVESSNAAMKQAFDEGE

SEQ ID NO: 7549 - protein, 995 aa, unidentified
  REGION 1..995: note = Description of Unknown: Cas Enzyme sequence
MEYYMGLDMGTNSVGWAVTDPQYNLIRKKGKDMWGIREFERAESAADRRSHRVSRRCNQRSQVRIGLLKEIFSDALMAEDKNFLARLDNSFYKAEDKDSGLTTLDAIFADEEYRDADYYKDYPTIFHLKYDLIMDKVPNDGRYARKVYLALLNYFKRRGHFLNEGLSGTDENGKDVWSAYVELCDIVYEKMEISLNHDSSLAENFGAVFCDASLSRSRKKEQLMELLGVTKKDTQQFIILGAVCGLKTDLLKLLSIESEQKVDLDFSSAGIEDKLPEIYSIIGESYVDIIDAMKQVYDAGVLAGIMSGTDEEGNTIKWLSQARVSSYEKHKKDLKILKDCIRKYCDAAEYDYLFREEEDGSYSSYIGTVNSGSRVRRGEKLSASKSGDRYANLKKRIKKDLADHSGDENVKYILSELDAETFLPKQLTFANGVIPNQLHEREVRKILENASKYLPFLKEKDEGGLTNSEKIVRLFTFRVPYFIGPVSQNYKGNGWAVRKPEMETCTVYPWNIEAVIDYDDTREQFITRMVRECSYIAGEKVLPKESMEYQAFMVLNTINNIKVRNEKISCALKQDIYHDVFEKNGRVTKKKILTYLNNRGLEVSENEISGIDSVIGCQLSTFRRFYGVLGEELSKDSVKHMVEDIVFKGTVYGDSKKMLKEMITEQYGNILSPDQIKRIMGFKFRDWGNLSKQFLELEGCNKQTGEAVSLIRALWEDEDNLNLMELLHSDKYTFAESLKEKHQTSMKTITEFTYEDLSDMYFSAPVKRMIWQTLLIIREVTEILGCLPKKIFVEMTRSEEELKGDAGRKDSREKELLDLYKSIKDDRSWDAEIHEAGLSGKLRSKKMYLYYKQMGRDMYTGLPIDLGELFDDNKYDIDHIYPRHYVKDDSIHNNLVLVDKRKNSRKSDNYPIDADIRCNEEIAAYWRMLHHKGFMNDEKYRRLTGDRPFSEEQKAEFIKRQLVETSQATKGVNDLLKEILPESTTLVYSKARNVS

SEQ ID NO: 7550 - protein, 1490 aa, unidentified
  REGION 1..1490: note = Description of Unknown: Cas Enzyme sequence
MKRILGLDLGTNSIGWAVVTARKDEEGREHIIGIEGDGSRIIPMDAAVMGDFDKGNTVSQTAERTRLRGIRRLQERFLQRRERLHRVLKILGFLPKHYEEQLTRYGKFITPDACNLAWAKDKDGKAMFLFESSFQEMLDDFRTMQPELVNNGHKIPHDWTLYYLRKKALTQKITKEELAWILLNFNQKRGYNQLRGEEEEAPKTSKNRQYFERSTITDIADTGKQYKGLKILRITLANGDSGKIFRKDIPEWIGQEKAMIATVKLKDGRDAIDDDGEIDRIYKIPTEQEWENEWALVKMKTQQDLDAQEKTVGAYIYDTLLAQPGQKIRGKLVRTIDRPYYKKELYSILETQRNFHPELQDAALYKACIEELYAANDAYRNSIAKRDMVYLLVDDILFYQRPLKSKKSLISDCPYEYHLYTKNGEEQREYLKCIAKSHPLFQEFRLWQFLSSLRIYKKETKADIDVTDQFLASDVARAELFSWLNDRKSIDQKSLLKYPGFKLKKDADMYRWNYVEDKSYPCNETRALFLKAIDKVGLNASFLTTDIEEALWHILYSIADPKELAKALRRFAEKHGLQEEFVDAFKNLPPFKAEYGAYSAKAIKKLLSVMRLGKYWSAENIPTSVRKQIDAIVSGDCSEKLKVQMEGASLLNGHVEQFSGLPVWLACYVVYGRHSEGKEIQQWESPEDIDNYLNHFKQHSMRNPIVEQVVMETLRVVRDIWRQYGKIDEIHIELGRNLKEPADKRKKMTDRILENERTNMRIRLLLMEFANPDYKIEGVRPYSPSQQERLRIYEDEVLQSEEVDEEILEILKKFQQADGAKQPTSSEIKRYKLWLEQKYRSPYTGKPISLARLFTSDYEIEHVIPQSRYFDDSLNNKVICEAEVNKLKSNALGFEFIKQHHGEKVQLAHGGTVTIFTEAAYEEYVKEHYAKNRKKCQNLLLEDIPESFSSRQLNDSRYISRVVKTLLSNLVREDGEEEAISKNVVPCTGSVTDRLKKDWGINDVWNQIILPRFERMNTLGIGSFTSVTANGNLIPDIPLHYRQGFNKKRIDHRHHAMDAIVIACANRNIVNYLSNVSASENGKTTRRDLQTILCEKHKLDGSNYEWLIRKPWDTFTHDVYEALSTTVVSFKQNTRIISRCTNHYERIVNGKKVRVPQTKGELIAVRKSLHKDTVFGEVNLVRTKFVSLNDAVKSPSRIVDRYLRGTIRKLLAEGCNAKKIKEYFAAHNTEWEAHTQKAKIEVRYFTQETNERFYAVRVPIDTSFTEADIKKSVTDTGTQKILLRHLANCGGDSNVAFSPDGIESMNRNICELNGGKFHQPIYHVRKYESANKFSIGSTGNKRAKFVESAKGTNLFFAIYEQDGVRSYSSIPLRTAVERAKNHLPIAPENEQGISAKYVLSPNDLVYLPTPEDIANGKISFPLYMDRIYKLVSTSKGEADFVSAVVASSIVDKVEFGRHNKFGRAPSGEMIRSICIPLQVDRLGNIIAIKE

SEQ ID NO: 7551 - protein, 1246 aa, unidentified
  REGION 1..1246: note = Description of Unknown: Cas Enzyme sequence
MKKNGNDARLGNYYVGLDVGTNSVGWAVTDENYCLKKCKGNGMWGVRLFDDAQKAEQRRTSRVARRRLARKKQRLMLLEILFAKEIAKVDPDFYLRMQESALREEDTSKGDKFSLFQDAAFTDREYHLRYPTAYHLRKELLESEEPHDVRLVYLAVHHIVKNRVHFLLDTMDDADGDVTLENALNDLAAFLQEEYELEFLPSDRPGFLAAMENRDLGVTAKKKAIKTAYGKAESSEELNLSAFLELLAGGSVKLASLFQDDALKDGEISSISLKNMENDAEQCSEILGDRFALVAKAKNLFDAAQLSQILNGKTYLSEAKVAQYEENKRDLKLLKAYVKKCIPEKYKLIFSVKNVKTDNYAAYSGYRLRSGDYACSQEAFCKFLLGKEIGLPEPAPEDAAMGTVYRKIKEGTFLPRLRSSENGVIPYQLNKRELEKILALASKHLPFLDRVEEDGLSVREKIIKIFEFRVPYYVGPVSSKANHHWAVRFDGEEKTKVLPWNFEQVIDLESSANAFMNNLIGRCTYTGEKVLPKDSLLYSEYALLNEVNLLKVNGKPLPVKVKNQLVQDLFYHAKKKVTKKSIIRYLCAEGVMTEQDEVSGIDDKIKTTLRSYHDFRDILERTEDPDMVEDIIRSVLVFGSDKKMLRRWLACNTHGLTEADIKLICRLNYQDWGRLSKTFLTEIYSPDENGEARTIMDFLRETNCNLMQLMSNQYSFAENSKAHYDALFGNGRSKYARLDDLYIAPAVRRSIWQTLRIVDEIVDIEKGVPRKIFIEMARDNAQEVKKGRTESRKDKLLALYRDCKETSGELFQRLENEEENRLRSDKLYLYYTQFGKCMYSGEPIDLDSLLRGERYDIDHIFPQSKVKDNSLENRVLVVNTLNREKTNEYPIKADIRAKMQPFWYSLKQKGMIGEKKYDRLTRGTGLTDQELSAFVARQLVETQQSTKALATMLQETYGDQVRIVYSKAGNVSDFRHEFGLVKCREVNDLHHAKDAYLNIVVGNVYDTKFTQRFFDNIHKENYSLRRVFDFDTPGAWKVGESIQTVSKYMAKNNVLVTRMPHEVRGALFDVQVMPAGKGQLEKKNGLAIEKYGGYNKLTGAYFCAVEHTDKKKRVRTLEPVYLYRKTAYEQDPVAYCQETLGLHDPVIIVEKVRIDALLELNGSRFMISSRSGNSIILKHTYQLLIGTEGEQYIKNLAKYSERCAAKKVELTVTEFDGISAEENLALYRWLAQKGTEKPYSRCFSAL

SEQ ID NO: 7552 - protein, 1392 aa, unidentified
  REGION 1..1392: note = Description of Unknown: Cas Enzyme sequence
MKNILGLDLGTTSIGWAVVNEAESIDETSSIVNLGVRLVPLTVDEQNHFNNMSGETANQTRSLQRGMRRNLQRYKLRRANLIEVLKEHGFISDESILCETGNKSTFETYKLRAKAVTEEISLEELSRVLLMLNKKRGYKSSRKGNAKESGKVINSIDVSKKLLEENITPGELSYQILRNGSNKLPEFYQSDLQKEIDVIWNCQSKYAPELTSELKASIRDKNKTQTWSILSKALNVKGKASKLKGKELRMENFRLRSEAVHKQIALEDLVNVLQDINGEIASVSGYLSNIGEHSKSLYFNHQTIGQYLMESLARDPNMSLKNTVFYRNDHIAEFDAIWATQARYHKELTAELQDELRDIIIYYQRPLKSKKNLISICELEQKEIEIEKNGKIITKVVGNKVIPRSSLLFQEFKVWQTLNNVVVSLKGVNKKVTKSPCLNFGEDELYIAGSRQLTADEKALLAEELQVKGQLTKSEVISLLFGSAKKLDLNYKVLDGDKTMSQLYVAYSKILELSGHVALNFNESAVQIKEQAYEEFKALGWNTDILDFDSSKVLDSQGSYRLWHLLYSYADDSSNSKVGALVERISEVTGIAKEYCDILSDIAFIDDYGNLSAKAIKRILPYMKEGNQYDVACLYAGYKHSKSSLTKDEIARKQLKEHLEILPKNSLRNPIVEKILNQMTNVVNALVDEYGAFDEIRVELARELKKSATERKQLNDSINALTRENEVIRQTLIKEFNIAYPSRNDIIRYKLYEELKPLGYHTLYSNKYIRKEQLFSKDIDIEHIIPQARILDDSISNKTLEFRDVNIEKGNSTAYDYVKEKYGEEKIEEYAKRCEECFKDKKTKLRKLMMSESEIPSDFVERDLRNTQYISKKALSMLSSISRRVVATSGTITSKLREDWQLIDVMKEINWAKYESLGLVEYHTNRDGQQVGQIKDWTKRNDHRHHAVDALTVAFTKDVYIQYFNNKNASDKPNTNEYAIRAKYIKEGKVLPPMPLSVFRTEAKKHIENILVSVKAKNKVVTKNVNKVRIGSTVKEKVQLTPRGQLHNETIYGSHYEYECKEEKVGATFNEEKILTVCKGVYRDALLKRLNENGGDAKKAFSGKNSLDKRPIWIDAMHTLAVPSKVNTVQAKLRFTVRKPITEKLKISKVVDKQIRKILEDRVNQYGTEKDAFSNLEQDPIWLNKEKGIKIKRVTIYGIADGQALREKRGQDGTVLKEHLPVDYVSTSNNHHIAIYRKPVLDKQGAVKVDDAGNEVTELVEVVVSFYEAVARAIHGLPIVNKEYRCSEGWKFLYSMKQNEIFVFPNEKTGFDPHEIDLLDSNNRALISPNLYRVQKISSKYYNFRHHLDTTVEENKELRGITWNRIQSLDKMDKIVKVRINHIGQIVAVGEY

SEQ ID NO: 7553 - protein, 1208 aa, unidentified
  REGION 1..1208: note = Description of Unknown: Cas Enzyme sequence
MNKILGIDTGTNSLGWAIVEKKDDGGYTLLEHGVNVFQEGVKIEKGIESSKASERTEHRSIRKHYWRRKVRKVRLLTILAAEKLCPPVNKEELRLWRTRKVYPQNESFLEWQRTNEQENVNPYYFRYLCLTKKLDLTLLPNRYILGRALYHLNQRRGFLSNRKEETKESDGAVKQGISQLSEDMKTAGCSYIGEYFYQLYQKGERIRAHYTDRKEHYLNEFHAICEKQELDDALVEKLEKAIFTQRPLKSQKQQVGKCTFEPKKARCSASHPLFEEFRMYQFLNSIKMKSPADADLRPLTPEEKQQVVPLFMRYNKSDRTFNFEDIAKKLTGKNKYAYAGKPAGKPYLFNYQMDTKVSRCPVTAQLRNIFGDDWVTGAHEVYTLAEGKSRLEVMNDIWHVLFFYSDTEKLQEFAEKRLQLSTDEAEAFSKIQLPGEYAALSLHAIKKILPYMRDYNLIYSKAVFLANLCEVLPSYIWNTRESRETVIESVIELMDDDELYAGIPVEQRVKDFLQNRYQVSEEKLKKLYHPSMIESYPRQRSNDQGIYQLGSPRINSVRNPMAMHSLFRLRKVVNTLLAEGKIDEDTTIHIEFARELNDANRRKAIQTVQRNNEKERDAVRKKIQEFYDERNIKAVPSEMEILRYQLWEEQNHVCLYTGDKIGCADFLGSNPKYDIEHTVPRSAGGDSTKMNLTLCQNKFNRETKKNMLPAQLANHEDILQRIETWKEKYEELEKQIRKLKGSSASTKDLKDLIIQKRHRLMLERDYWKGKYNRFIMTEVPEGFSRRQGTDISVISRYARLYLRSVFRKVYIVKGIATSDFRKIWGIQEEFEKKERVNHCHHCIDAITIACIGLDEYAKLAQYYHELEDFEKYGTKKPQFAKPWENFVADIKHIQDDLLVAHYTQDNLPKSARRRIVTPEGKVLSKGDVARGSLHLDTCYGAIERDGEIKYVVRKSLATLDEKDVKNIVDDEVRARVEEAIATYQGLKKAVEADGIWMNREKGVRISKVRVYTGSVTRPINIRKQRDLSVHEYKQQYHVQNDRNYLMAIYTGKTDKGKEKREFTIVSNIAAGNYYRRSHQHAESEKQLVPETSAKGYKLEYLLKIGGMVLLYQDSPEEVWSADSKEIQRRLYKITGLSSFVGSGNAYGTIVLTHHQEARPSTEVKAKNGIYVANEDLRPSIKFYHTQIKALVEGKDFRMNEIGEIIRLT

SEQ ID NO: 7554 - protein, 1417 aa, unidentified
  REGION 1..1417: note = Description of Unknown: Cas Enzyme sequence
MKKILGLDLGTNSVGWAMVNEAENETEKSSIIKVGVRVNPLTVDEKSNFDKQKGISLNAARTLKRSMRRNLQRYKLRRSHLVNLLIKEGWINKNTILSEHGNRSTFETYRLRAKAVNEQVSLEEFARILLMINKKRGYKSSRKTNKGNEETGAIIDSIDVAKYLYDNQVTPGEYCLYMLQRGKKQLPDFYRSDLQAELDLIWSKQTSYYPDLFSSTLKQDIVGKNKSQTWAILAKNWAWTVPTNSGEIVLHLQGIKRSGKKDEQRIETYGWRVKALNEKLGLEELAIVLQEINGEILASSQYLGNISDRSKELVFQHLTVGQYLMQKLDADPNVSLKNLVFYRQDYLDEFETLWTKQAEFHKELTAELKREIRDIVIFYQRRLKSQKGLIGICELAQKEVSIVKNGKEKVITIGAKQIPKSSPLFQEFKVWHMLNNVVVSCNGVNKRKKKAADAGLFSGLDDFDPLYLNGSRALTLQEKQMLAKELTIKDKLSKSEALKLLFEDYKDLDLNFKELQGNTTGNLIYQAFARIIDVSGHLPINFKDSTDDILSEIHSIFSSLGWNEDILYFDSAKKLDSQSYYRLWHLLYSYEGDKSLTGDDALVKRLMELCHFDKEYATILASVKFESDYGNLSAKAITKLLPHLKAGLRYDEACANVGYKHSKSSLTKEEIENKVLKDKLSLLPKNSLRNPVVEKVLNQMVNVVNQLIETYGRPDEIRVELARELKKSADERRELTESLAKSTKEQAAYREILQKEFGFTHVSRNDIIRYRLYEELKANGYHTLYSDTYIPKEKLFSKEFDIEHIIPRARLFDDSYSNKTIELKSVNIEKGDKTAYDYVAQTRGESQLQQYIQRCESLFGSKSAKFRKLKMQEKDIPSGFIDRDLRNTQYISRKALSMLSEVCRCVVATTGSVTDQLRQDWQLVDLMKELNWDKYKAAGEVEYFTDHDGRVIGQINGWTKRNDHRHHAMDALTVAFTKPVFVQYFNNKNASSKPSSNEYAIKAKYVEDRKIIPPIPLHEFRVAAKEQLQSVLISLQTKNKVVTRNVNQTKSHAANNKCIQLTPRGQLHEETIYGRHLEYVTQEEKVNASFNEAKIQTVAKKAVREALLKRLAEYGNDPKKAFTGRNTLDKNPVWINFYKGIAVPVKVKTVTLQPVYTVRKPITENLSIDKVVDVRIKQILKERIAQYGSPKAAFANLEEDPIWLNQAKGIKLKSVTIKASCSELALREKKDKDGKIILGEDGHSISTDFICTGNNHHSAIYQKPMLDKMGNPMLDNDGNVRYELAEVIVSFFEAVARVTQGLPIIDRNYKRDEGWSLLVTLKQNEYFVFPNETTGFNPKEIDLTNPDNYPQVSQNLFRVQKFSSKYYVFRHHLETNVDDKKELQEITWKRICSLSPLSSIVKVRVNHIGQIVGVGEY

SEQ ID NO: 7555 - protein, 1079 aa, unidentified
  REGION 1..1079: note = Description of Unknown: Cas Enzyme sequence
MGWPYGIGLDIGIASVGWAVVALDENAQPCGIIKMGSRIFDKAEQPKTGESLAAPRREARGMRRRLRRKALRREDVYALLAQQGIADRETLARMFETGHLEDIYALRTRALDQRLSGEEFARILLHLAQRRGFKSNRRGAGKEDGKLLQAVQENRRRMEQNGYRTAGEMLYKDPFFAAHKRNKAEEYLSTLGRDMVAAETQVMFERQRELGAAWATPECEAEYLSILLRQRSFEEGPSEPSPYAGNQVEKKIGRCTLEPDQPRAPKNASSFEYFTLLQKVNHIRLIEQGETRPLTDAQRNAVVQLAYHSPEVDYARIRKELALPEQVRFNGVRYSGSVQDFAKCEKKEKLPRRKGYFDLCNALGKETVDAWSTEQRDAIALLLCTYKNEELLRQKLGEQGQAEALLDVNFSGFGHLSAKACRALIPYLEQGMTYDQACTAAGYDFRAHEGKEKSHLLPAVKPEMEDITSPVVRRAVAQTIKVINAIIREQGQSPVWLHIELARELRKSFEERTQMDRSMKDNAANNEKLMQDIRETFHRISPTGQDLVKYKLWKEQDGRCAYSGRPIQAERLFESGYAEVDHIVPYSISFDDTYSNKVLVLSAENRQKGNRLPMQYLQGQRRDDFVVWTNRTVKNYRKRQNLLKTRLTDEDRQGFRQRNLQDTQYMARFLLNYIRDYLEFAAHPAMTGKSQRVTALSGAITAHLRKRWGLTKVRENGDLHHAVDAVVIACATQGMVQQISSYYGHIESEYEQDEDGSGSTHSRTKERFPAPWPHFREELEIRLSEQPQEGLLRLNPGFYSAFDVASIRPVFVSRMPRHKVEGAAHKETIKGAKALADGIVTVRRPLTDLKLDKEGEIANYYMPQSDRLLYEALRARLQAAGNVGEKAFAEPFYKPKADGTPGPLVRKVKLYEKTSLTVPVRNGAGVADNDSMVRIDVFYVPGDGYYWVPIYVADTLKAQLPNRAVVAYKPYSEWKEMKDEDFLFSLYPNDLIEVEHKQALKFVLTNTESTLPKTISVKSAMVYYVKGGIGTGAIAVETHDNAYTIKSLGVKTLQSIKKYQVDVLGNYYEVKKETRQTFR

SEQ ID NO: 7556 - protein, 1098 aa, unidentified
  REGION 1..1098: note = Description of Unknown: Cas Enzyme sequence
MKQIRYTLGLDIGVASIGLAVLLNDLHGEPMKLERLGVRIFEKAENPKDGSSLAAPRRQARGSRRVIRRRKHRKDRIKRLITSTGMITQEQMNKLLSSGKYEKCVYELRVDALERLLAMEEYVRLLIHFVQRRGYQSNSKSEETKDPKENGKVKQAISDNRQRMQDHGYRTVGEMFWKDDLFRRTNPDGSIVLVVHNQPDDYKVTVERQMLKEELRLIFAKQRAFGNSWASEEFESAYLEIWSSQRSFDEGPGGNSPYGGNQIERMLGTCTFEDPEPRAPKVSYTAEYFRLLQTVNNLKIVGHGLPAEFLDDDQRQTMIAFALSSPNGTYGQLRKKLALPDDIFFNNLSYGEKSAELVEKTKLGQMQFYHKVRIALDHIKKGAMQELSVDQLDEIARILTLYKSDDNRTTHLREAQIPEEYIPALLALSASKAAHLSIRAMKKMHPYLEEGYTYDKACTAVYGRHDGRKPDVKRTRKLEIGMAGEITNPVVRRAVSQTIKVINAIVREYGPPEVVRIELSRELGKPFTIRTKLEKQQDANFKKNTAIRSQIEEYKKDTPTGLDIVKFKLFQEQNGVCLYSGENLDISRLFEAGYVDVDHIIPYSISFDDSYNNKVLVRSRENRNKGNRIPFAYLGKDEGRWNRFETLVNSQIRSFQKRKNLLCRSLSAEQIEGFKQRNLVDTQYLSRLVYKLVDENLEFAETGNYKRKTQTVNGAITAQVRKRLGIDKLRANGDLHHAKDAAVIACISPGLVQRITRYSQRCECAGTKAGYVDYETGEVMSKDAFDEKYAPHFPAPWPQFRAELEARLSEDPRSEIDRLKLATYDSDEKLSPVFVSKMPNHKVSGAAHQETIRSGKQAGGTISKVALTELKLDKAGEIPGYYRPEDDVLLYEALKERLRAYGGDGKNAFAEPFYKPKHNGEPGPLVKKVKIFEKATLTVPINQGLAANGNMVRVDVFQVEDDGYYFVPIYVADTVKPELPYRAVVAYKPLEEWKVMDDTNFVFSLYAGDLVHIVSHKAIKLNLAKGAVGDEHVETTDALLYFGGLNIATGALSLSTHDRRYAQSSLGGKTLDLIEKYQVDVLGNYQKVKLPEKRMRFQ

SEQ ID NO: 7557 - protein, 940 aa, unidentified
  REGION 1..940: note = Description of Unknown: Cas Enzyme sequence
FMPKQVEGDNRVIPYQLYYYELSQILENAKEYLPFLSQKDAEGYTNEEKILSILEFRVPYYVGPLRSDNGDHAWLVRKAEGKIYPWNFNEKVDLDKSEQAFIERMTNSCTYLPGENVVPSQSLMYSSFMVLNEINNIKVNGCDIPTINKQGIYNLFIQNKKVTVKRIREYLEANNLLHKQDILSGLDESVKASLKPYHDFKRLLENKIFSEKQVDEIIERLTYSDDKSRIVKWLKETYPMLSEEDVKYVSKLKYNDFGRLSKKFLVGIQGCRKDTGEVFTIMGALWNTSDNLMQLLSDKYTFMDEIEDIRKDFYSNNPQTLESIMDEMYISNAVKRPIYRTLDILSDVRKACGSTPKKIFIEMARGDGEKGKRTKTRRDQIAELYKTIDKEEVRELSRQLEGRSDNELQSEVLFLYFMQLGKSAYSGVSIDIDKLKTNLYNVDHIYPQSYVKDDSINNKVLVLSEENGAKGDIYPIKKEIRDKMQPYWSMLMKNNLISEEKYKRLVRNTTFTDEEKTGFINRQLVETRQSTKALATILKMKYPEAEIVYSKAGLVSDFRHEFGMLKSRSVNDLHHAKDAYLNIVVGNVYHCRFTKKFYVEQKYSLKTKTIFSHDVKDGDKIVWDGKNSIENVRRTMMKNNIRCTKYAFIKKGGFFDQNPLKATSGLAPRKAGLDVERYGGYDNSTAPAFILVTYMDKGKKEAMIMPIESRFFDKFFVDEEYAQNYTKNTLEKVWGRENGQITGICFPMGMKPLKINTVFSFDGFRACIIKKANKSKIIGLSSMMPLVVGESWEKYVKKLEAFIGKKENNENLKLDENYDGISREKNEQLYEILLDKIENHLYSIPFSAQITVLKDGFHKFKNLDTENQVKVLNQIVLLLKTGRASSCNFKLVNGSPNAGAFTESSKISNWQKQFSDVRIINVSASGIYESCSGNLLDLLK

SEQ ID NO: 7558 - protein, 1103 aa, unidentified
  REGION 1..1103: note = Description of Unknown: Cas Enzyme sequence
MKANGNDRKPGSYYIGLDVGTNSVGWAVTDEQYRVKKFQGNAMWGVRLFEDAKGAEERRISRVARRRLERKKQRLMLLEVLFADEIAKVDPQFYLRMHESDRWADEKRSGCQYALFNDKDYTDKEYHQSYPTVYHLRRELLTSSQPHDIRLVYLALHHIMKNRGHFLYEMSDDSDEIMTVPRALEELQQYLQDCYNITFEPKDREGFVTALQKSDIGVTAKKKALKEAYGRADEDACEELDVAALLDLLAGATVKPKALFDDSLKDSEVSGICLKNMDDNAEVYADALGDRFGLLESTKTLYDAAKLAQIRGDYPYISQAKVAQYEKNRSDLRLLKQYVRRTIPNKYKLIFSEKRKELNNYAAYSQYDLVSGDYHRCDQEKFCKFLKSKDVGLPKPDESDKEMSAIYTQIKDETFLPKLRSSENGVIPYQLNRQELVQILKNASTYLPFLNRADDDGFTMQKKIIKTFEFRVPYYVGPVNDKAGHHLAVRFSGKEQEKVFPWNFEEVVDMESSAAAFMENLVGRCTYTGEPILPKDSLLYSKFALLNELNPIQVNGKPLPPDVKQKLVQDMFYREDGKKRKKTVTKQDLVNYLKSEGKWHEGDELSGIDDRIKTELRSYHDFKDILARTGDEEMVEDIIRSILVFGADKKMLRRWLVKNTHDLTDDEKKRICNLKYKDWGRLSKTFLTEIYSPNEYGEAKTIMDYLWDTNCNLNQLLSDDYQFASNAKAHMDALMGNGQTLSRRLDDLYIAPAVRRSIRQTLRIVDEIVDIERSAPKKIFIEMARGEMRKEEDKRKKSRKDQLIDLYKSCKEDSGELFEKLENEDENRLRGDKLYLYYMQFGRCMYSGEPIDLDALLRGELYDIDHIFPQSKVKDNSLDNRVLVKNVLNREKGDKYPIKPEIREKMQSFWYELKQKKKISEKKYDRLTRGTPLTDEELSAFVARQLVETQQSTKALATLLKEAYGDKTRIVYSKAGNVADFRADKKFVKCREVNDLHHAKDAYLNIVVGNVYDTKFTQQFFANIRNEIYSLNQVFNYNTPGAWSTTESIQTVKKYMVKNNVIVTRMPHEAKGALYDLQLVSAGNGQLPKKEGMAIERYGGYNK

SEQ ID NO: 7559 - protein, 1018 aa, unidentified
  REGION 1..1018: note = Description of Unknown: Cas Enzyme sequence
MVKCLSIRKFLQECKMGKRIFGFDLGITSIGWAVVDFSESDFYDPETGEICEGEIKKSGVRCFPGAENPKDGTSLAEPRRKKRLARRTCRRKARRMERLKVLFKNCGLVDDMQKDLNDRKTDVYARQVGGDVWNLRIKGLSEQLSKEELVRVLTHLAKHRGFKSYRKAVESEDTEGGKVLKAIAENKALLASHKTLAQIIVERAGSGKRRNYTSKDTKKAVYNNSIPRDEIKRELDMIYQAQKSYHLFTEDLYNNFVDIAFAYRPIGSVAQMVGYCKFEKNEKRAPKEAPTSELFVALTKINNMSVRDEFGSIRGVTDAERQAILDILKNTKTVKYSTLSRKVWHKKVLFADLKYPTENQIAAKDPEDKIFYEMKGWHKLKSLFSESEWFALSQQIPLLDQVMNVVACEKNDESIQKALQKLELSDDYVNRLTKLTSDKFLNLSLKALYNIVPYMQRGDLYNVACEKAGYDFRDNTNKLSVAKGHFLKPIAPENLTTVPVVNRTVAQFRKVFNAMVRRFGMPDQINIETGRELKKTFEERKLIKARNQENEETRNELKAELDKHNIEGKSQNILKYRLYLEQGGKCIYSGKTIDIKRLDENGYVDVDHILPYSRSLDNSYTNKVLCLSDENRKKGNKTPFEYLPSSEWEAFETRVRTLHNLKKENNLLQKNFIERELEFRERNAHDNSYISRYVKQYCEDSLDFSNSPVKNIKNRVQMRPGSLTDYLRHQWGLIKDRNANDKHHAQDAIVIACATQHMVQKLSSLSGIFENKYEYQEKKRKELGEEKAKAWYNYIKTQEQEPWPNFRSEVLQSLDKIFVSRPPRKKATGEVHDATIYTLNPNKKKYDKSKVKSGILVRGGLANNGDMLRTDVFVKKNKKGKDEFFLVPVYLSNMGKDLPNRAVVPNKDEKDWIIIDDTFHFKFSLYSDDLVRVTKSDGEILGYFCGLDRKTGAIGIEAQDRSWNTRTGVKTQKNIQKFIVTPLGEYFEVKQEKRQSLTNVKSNAQRHKEKMAKRQQKE

SEQ ID NO: 7560 - protein, 1003 aa, unidentified
  REGION 1..1003: note = Description of Unknown: Cas Enzyme sequence
ENMSSYLKKTNSKTLGDFFYKRLCEGFEKDAENKFIAPEKRLLRQKAYALQNSAVDYAIPRYLVKDEFHQIWDTQAQYFSQMQKDGLKQEIYDILFYEKAPAPYATGKCIYFRQEDRLLKAHPLTEMRRIYEEVNNIRLENDLKRYRLSLEQRDKIINELLLKGQNAGKKAIKSLLKLGGQIKVSIEDDKVIKAYLYSRPEFTNIPYFQNLSEDELAKLVEFLAEPKDPNDKDGRLLTEDKQILKLKEILHLDDEKAIGELLAKLPKGRSMLGLSATKILLTEMKKAVLSPREITERLAKTDPHFQAEEEIARDTQGRYKKLPYYGKILLTDTQPLPPLMKKYNQSLNTDEVEYGKIANPAVHMILNQLRRVVNEIIKLYGKPYEICLEVGKDVGLSTKKKNEFEKRQKQNEKNNAEAKQYLLERHIPITHDNLLKHKLAKEQSFVDAYDPNVTIPHDFSGFEIEHLCPQAVEGSDTYNNLCLVSRNANLGKGKMFPYEWFEVKYRAHPEYISQILKNARDHLSPEKAWRFEADARENYEETGDADATNRYLADTRYVSKMAMRYLKAIIDCPTDQEHTENRILSIRGRQTAELRRRWNLLGLEYDLTGLSRDVPRYIALPAEVVNAKTGEVFDRKKNPDWKAKPRIDHRHHAMDAITIACVDWWTIQNMSDEEKFKSAWIKPYPLKNVPHFRDRVIEVLKNINVSHKPEHSKEGQLHKETERTLLQESNIKKNAKVTRYSRHMLAFLHKKEDIQKLEMSKSLLKENIPELNNYAKKCTKLKQYFEENWNSCKEYLENEAKLREQKGFKQKPISDITIISKIFRHAREDNIWDNTKFYTYEVNSSLVFMPARHVYYEAGNNYCVDFYQKDGKVGWEVIKLFDINQADFVPQWKKDGGKAIWSIQQRDILELDTPEEWRGYTDKPRCLAKVKKFSDGQITLDYLTDARRTTKAKDDPNYMLVQSLIGRGLSYLTSHKARKVELTAFGRIKKKHKALWNGTALTK

SEQ ID NO: 7561 - protein, 1070 aa, unidentified
  REGION 1..1070: note = Description of Unknown: Cas Enzyme sequence
MSKYIIGIDMGINNVGWSIINEEKMQIEKSGVRLFKISSSAEERRNFRSSRRRKKRKYNRIKDILKLLGSIDFPSENTIDSNLLEKRVKGLKTKISKQDIANICCYYASHRGYIPFGDEERELINLDNKYPCEYYYQLLQERGKFRALQEVVDNKDLIREYKEIINKQLEYYPELIKVKDEILNTVERKREFWQGPGSEKSRTDYGRFKTEKYKLEHGLKNDLEYLYDDLIGKCSICIGEKTVPVSNYYYEVFNLLNDFINTSIKSIDNLTKQNAVYLDKNTGYYKLTSDSLNTIINYCKQNPNLKYNDIFRDLFGLKKEDLIGYRIDKNYKPTFSTMNFYRLVKNTFETFNSDWIDDIDEYNNFIRILAISPGIVETKNLIEKYMKHSFSDKEYELIKEISSKLKSKGGLKYGALSEKILKKSINDMMSTNQNFMQVRRKFDYDKESRDYFIKSYKETEGIYLMDEKFVDDIIASPQVKKSLRQSIKVINSIITEKKAFPDVIAVESTNELNNDSKRKLIEKEQKINESARTSAREYIINNFGDSYVSEKNITKVMLYNELDGICPYCGKPFKDGLNSIIKSNIEIEHILPLSKSFNDSYNNKTLSCRSCNSNKSDRSPYMWMGPEKFDEFSERIKKLPISEEKKTNFLETNDLDKYNTRFFNRNLRDTSYATSELINQIKIYNDFLDNKLDGNVKIRTLSAPGQLTYKIRKNLGIDKDRDAGKFHHAVDASIVGGIALDNGIGSILLESQNEKEFWIKKKYLGNRIDELIFNYNNSILDDQLRNIKSDNDIKISEQVDKDFNKSLANSNVYKYLKIGNDFKKVEQISNIYDEKIMTNKIIKNLFDDNDKKVNLMIKDNNPKMYKKLKNIFEQYNNKGPSSNPFINYCLEVNNISIDEFDYTKFGIKQENGPIVKKLRYYTTANIPNLLSNKNMKKNTYIGLDSVGQAYTKVYWDKDKLKFIFLPIYSTSIDLKNNKLNKNDKTYKQFYDLYLKGKNYQFVVNLYNGNHVTGISSTGEKITGNISYYHKTNNFICLKNKKNIGTTIKQLIVYDVDCLGNEKIRLTWPSD

SEQ ID NO: 7562 - protein, 1100 aa, unidentified
  REGION 1..1100: note = Description of Unknown: Cas Enzyme sequence
MKYVLGLDLGISSVGWAVLNLSDNRIEDLGVRAFSAAENPKNKESLAMPRRIARGARRRLRRRKGRMVRIRKLFIEAGFVAAERLDALFAPYKGQLSPWELRAEGLDRLLNAEQFARALYHIAKHRGFKSNSKAALNDARDQKADKDADDDGKAKAAIEQNTARLKQSPYRTAGEMVVKDDVFKARKRNTTGDYSKSIDRIMLLDETRVLFAKQRELGNSLASLEVEKQFVDLFSWQMPFASGDSILDKVGPCTFESGEKRAPRNAYTTERFTVLGKINQIAWFLGGDRVEISDEQRVLVDRLSRSLKQVTYTQLRKELGLPQEARFVALTYLRRAKPAPKAKGTGNETNGPIDADTGLVEDLEFKCETAVFARMPGYHAIKDIAVKAGVWEELQRNPDALDDIAHALTFYKTDDDIAARLTAAGMPEALIEHAIASSGFSQVSHLSLVAMRKIIPHLEAGLVYSEACARAGYDHSSPGGPVEKSYKLPVIDPETIRNPVVLRCLTQARKVLNAVIDRYGSPTRVHIELARELGKSVKDRRDIEKKQEDNRRAAQRFDEEFAELHNQPPKNGEERLKWRLYREQGGQCAYSHRPLDLENRFYEPGYVEIDHILPYSKSFDDSMSNKVLVLSAENQMKRNSTPHQYFGANEERWDKVEAWVTANIKDPRKRQKLLTRDYKGQERDEWLPRNLVDTRYITREFASFVRSRLLFADESEKLPVVCLSGGITSLLRGVWGLAKVREKDDLHHAMDAAVIASVTPRTVQLLTRFRQDRECTPWKVGENWVDPETGELIEFKYSFPQPWKKFRDEIIARLDDDPQSRIAALNLPTYVDVKELKPVLVSRMPQRKVSGAIHKETIKSARLDDEGKRVAVKRVALTQLKLADLARLYDPKSNTTFYAAIRGRLEQFGGDGEKAFAEPLYKPGKNGTQGPQVRQVKVVESQPSGVEVRGGVADNGDMVRVDVYSKGGKHFIVPVYASQLMSGKLPQRAISAHKPEEQWDLITGDFAFVCSLYPFDLVRVVTKDEEFTGYYRSTDRDNAKLTVSAVNSGNVESIRRLSSKTALSIEKQSISILGVPSVVTGEPRRGLENDSHLESGEAED

SEQ ID NO: 7563 - protein, 1048 aa, unidentified
  REGION 1..1048: note = Description of Unknown: Cas Enzyme sequence
MGYRFAFDIGTNSIGWAVLRLDADNAPAGIEHMGVRTFPDGREAKTKASLAESRRLAKSARRNRDRYLQRRKKLMDLLVRHGLMPERLADRKKLENLDPYTLRVRGLDQPLAPHEFGRALFHLNQRRGFKSNRKTDKKDKDQGLVRTGIEALRTNMQKMNARTFGEFLYRRRQQGKTVLARRHGTGKETHYEFYPDRELLFEEFEQLWTAQEPSLHLGEEARQEIEQAIFFQHPLKPVNPGRCTFFPDENRAPKALPLAQRFRIYQDLNHLRVLSPSLDSRPLTLAERDRLAQKLLRQQSMRLPAVRKALSLDAEHEVTLPGSETEKLIGDLTAARLSKKENFGPDWCDLPLDEQNELVRLLLETQDEGSLIATLQDRWKLSPEQAENLADLPLPEGYGRLGETALSRILAQLEKNVVPYSQAVLDAGLGSHSDFRTGEILDRLPYYGKALQRRVAFGTGDPADKQEVRYGRIANPTVHIALNQLRIVTNTLLKTYGHPDQIVLEVARDLKNSIERRKEIEKEQKKNREANDRRRSEIESLGHADRGDALLRMRLWEELSPDAAARRCPYTGEQISLSRLFDDEVEIEHILPFARTLDDSPANKTVSLRRANRYKGNQTPFEAFGESRDGYDWPGIAARALQLPKNKSWRFQPDALERFLKDRDFLARQLTDTQYIAVVAKEYLECVCDPKAVWATPGRLTSLLSRHWGLPPKNRQSHRHHAVDAALIGVTDRALLQRIATLHARDVEQGLRRFLAGLDAPWPTFREDVLAQAESMIISHRPNHGVQQRFLKDTAYAVLGENGEKGNASVRKEISTFAKPEELLKVKGRNIRARLLGASCGIPLQEALALLDECDAQGERAAKARLKQAVRVDDKDFKNRLQEYARRKNLRRVKIRDTLTLIPIKDKSGRIYKGYESGGNAYYDIRLAPDGKWVGEIVSAFDANRPEGYTTELEKQGLPLVMKLFNGDMLEITHEGEQKIFCVVKQSEGKISLAEHHEADVAERKCYFTRSPGVLQKQHARPLFVDPIGRARRLEVPNNDAADRGDQR

SEQ ID NO: 7564 - protein, 1340 aa, unidentified
  REGION 1..1340: note = Description of Unknown: Cas Enzyme sequence
MKKEFGDYFLGLDAGTNSLGWAVTDNNYDLLKFNGKAMWGVRLFEEGQTAAERRLHRAARRRQQRRVQRIALLQELFASEIYKIDPGFFIRLKESGLHADDKGIVQPNGLFFENGFSDKDYFNAYPTAYHLRKELIENNTPPYDIRLVYLALHHILKYRGHFLFEYQSFENISNFSAVFSSLLEFLHENYDFPQNSYDPEEVAEIIKSKKMGINDKKKSLWSLLGVEKKSDKEYITLMCGGKGKFATMFPQLDFNEAEIKDISFQGDAMDTAEDKLRATLGEHMECLERIKAIYDWALLADILNGSPYLSCARVDDYEKHKKDLGILKEVIKTKIPSKYNACFRSTSTKNNYCAYIGSSNGRQTDKKCTKDDFLKYILELLPDINNDSIQYLRNEAKNGTLLPLQKTKDNSVIPYQLHGKELQVILDNASSYLSFLQEKDKNGFTVREKIGKIMTFRIPYYVGPLNDAHKLANGEKGFCWIEKHSDEPIRPWNFEQVVDLETSAEKFITRMTNKCTYLIGEDVLPKNSLLYSKYTVLNELNNLEINGEKTSVELKQQIFKDLFCIYKKVTQNKLKTYLKKEGYYSKDQDIDVTGIDGDFKSSLSSFIDLKDILHEKINQREMIEHIIRYITLFGDDRKMLKNKIRKDYKDRLTEEEIKKIAALKYTGWGRFSEMFLEDIKHIDKETGECLSIIQNLWRTNNNLMGLLSYEFDYIDEIKKFNHTQHEEISTITPEIMDDLYVSPAVKRSLWQTLVIIQEIVKITGHPPKKIFIEMARGEQKDKTRKDSRKKKLLDLYGNCKEEERTWANEITNKEEHEFRQDKLYLYYTQMGRCMYTGEKINLSDLFNNNIYDIDHIYPRSKTKDDSLDNRVLVKKNVNLNKSDVYPLPPEIQAKQHLFWKKLMEKNFIPKEKHSRLIRTTPFSENELASFINRQLVETRQSTKAAATLLNKIYKDQTRIVYVKAGNVSDFRQKYNILKCREVNNFHHAKDAYLNIVVGNVYDAKFTENPYHYMKDASYRDYSLNRMYDFDIVRNNKSSWITGDCGTIQIIQKIISKNNVLFTRHATTKGGAISDQTIERKRTGKANLLPVKKGLPPEKYGCYNSLKRSYFILVRHKKGQKLVKTIVPVYIHLEKKIADGSISLEEYCKNVLGLNEPKILISKIKIDSLIEIDGYRMHISGQSESQILAKNAHQLIINKNNEHYLRNIVKYINRCETTKEELPLTKYDNISEEKNLLLFNQLLNKINNTIFKSQLNAERKVLTENREKFTELNIYRQCKLLLEIVHLFQCNSTLANLTNIEGSKYAGKIRFSQNISNFKKVKFINQSPTGLFEQSVDLVSL

SEQ ID NO: 7565 - protein, 1425 aa, unidentified
  REGION 1..1425: note = Description of Unknown: Cas Enzyme sequence
LPEHYLEQIDFTEKQGRFLPGKEPKVAYKPDNLKDKYDFLFKDSYQEMLSDFQDKNTEFIQKRKKVPQDWTIYYLRKKALSAKIAKEELAWIILNFNQKRGYYQLRGEDEDVSTNTKREEFHALKVVKVKEREESKGASAKWYDIELENGWVYSRQSNIRPDWEGKILELIVTYNIDRDGNIKTDKEGNEKRSFRMPKEDDWTLRKKKTENEIEKSGKTVGEYIYDNLLENPDLKIRGKLVSTIERKYYKNELVQILTTQKKYHAELNNRELFNKCVTKLYPNNDIHRKALLSKDFVHLIVNDIIFYQKPLKSKRSTVSNCPLEYRIYVDKVTGERKKVPLKCIPKSHPLYQEFRLWQYVKNLRLFEKERFENGRLMTNVDVTEQFLSNEGKYVELFEFLNSRKSFKQDDILKFVGIKSSKERLKYFWNYPEEKEYPGNETRYMIETRLKKIEDIPADWLNEEKIVTLWHLLYSVTDRKEIEKGLQSFAVKYQLPESFVEVFMGFPRMEREYGSFSEKAIKKLLPFMRMGKYWKPENINPGLIEKIQRIIDGEADDNIDDGIRERFSKINNMSDLRGMPLWKASYLVYGRHSEVAEVIRWRTSADLDQYIKDFKQHSLRNPIVEQVVLESLRVVRDIWNYFGEGREKFFDEIHVEIGRDLKNPADKRQKIASQIQENENTNLRIKALLVELFNDPEVQNVRPYSPVQQQILKIYEDGVLNAEKDIPDDIQKISKMANPTRNQLIRYKLWLEQKYRSPYTGEIIPLNKLFTPEYEVEHIIPKARYFDDSLSNKIISEAEVNRKKDQMLAFEFIKKMGGNTIDLNFGKKVSVLTVDEYQKFVKDHYGINPRSRVKMQKLLMDEIPQSFIERQLNDSRYISKMVRNLLSNIVREENENSPVAKQLITCSGSVTNTLKQEWGLNDVWNDIITPRFERLNKMGDQKYGEWTNKEGKRVFQIQMPLELEKGFSKKRIDHRHHALDALIVASATRSHVNFLSNEAAKANAKETRFDLRNKLCYKEERGQNRNFSWRFYKPWNSFTEDAKNALNNVVVSFKSNHRVINKSTNRYFKWENLPEGKKKRLVKQEKGDNWAIRQSLHKDTVLGKVSLRKVKAVSLSAAIDSWNNIVDKALKKKIRSLKDQGYDKKLILKYFKDRRNVFNGQNISRVNIYYFDEEMAARRVDLDTSFDSEKRIEGITDSGIKKILYAHLKNEKYHGQKDDKGKDISPYELAFSPEGIEEMNANIKQLNGGKPHCPIYKVRLAEPVGEKFQLGETGNKTKKFVEVAKGTNLFFGVYANDEGVRSFSTIPFYLAVEREKQGLKAVPEINEKGNKLLFYLMPGDLVYVPEEDTNIGDLRQSELSSSRIYKMVSSTKSECHFIPNFIATPIIQTKELGPNNKSERSWDGQMIKKVCYKLSVDRLGNVEIEK

SEQ ID NO: 7566 - protein, 1059 aa, unidentified
  REGION 1..1059: note = Description of Unknown: Cas Enzyme sequence
MATESTTGSYVLGLDLGVASIGWGLVGLDDGTRPKRIIRAGVHLFEAGIDGGKQDPETALATGKEKSRATPRRQARQQRRQIWRRAYRKRRLLKRLIRYGFLPKPDRRFSDPADIDSYLKTVDAELRQEWEEKAGADHRLRQLLPYRLRAEALDHRLEAHEVGRAVYHLAQRRGFLSNRKTDQDAAGADEEDTGKVKKGISELEQMMHEAGAETLGQFFASLDPIDPASRRIRGRWTGRSMYENEFDRIWEAQASDHPDLMTTEARQSIREAIFQQRPLKSQRHLIGRCSLIPEKRRAPLADRLFQRFRMIQKVNDLEVLLPDTGEVRALNDAEQEKVFAVLCAGDATFPALRRALKGDLPKNARFNFEEGGEKKLPGLRTDEKLRAVFGERWEEMDERARDAAVQDCLSYERADAMERRGREHWRLSAESARAFARAKLEEGYAAYSRAALRELLPRLEKGVRLQTARHELFPDSFVATEPVDMLPSLEEAFAEPVSPAVARALSEMRSVVNAIIRRYGKPEHIRIELARELKKGRKRRESISKQIAGRRKLREDAAERLLAQYPHRAVAAIDKLKVRLADECGWQCPYTGRCFGWDDLFGPHPTIDIEHIWPFSRSLDNSFINKTLCCVRENHDVKRNRMPAEAYSGERFDQILQRVAKFKGDGARPKLERFRASAMPPDFTNRHLSESQYVSRKAAEYVARLYGGLSDEEHTRRVHVTSGGLTAWLRQEWGMHAILSDRDVTDRSDHRHHALDAIVVALTTQSTVKKLEQAAAAADDAGSNRLFAEIESPFDMEDARRAIGAIVVSHRQSRKARGKFHKDTIYSRPLPAAAGKRRHRIRKELHKLNDKEIGEIVDPRIRQAVRKAYDERKAEGAKNPAQAFSEAEHHPRLPNGDRIRRVRIFTSAQPENVGKPGRLRRVDLQSNHHTVIMARLNRDGTEKTWIDEPVSMRTVLERRRQGIPIVCREVPDGYRFKSTLAGNEYVEMDRPDGNGRTVYRILNVSEGFIEIREHWDGRTRKELKESGAKREITRGSALFKRNARKVYVNHLGEVHDAGG

SEQ ID NO: 7567 - protein, 1579 aa, unidentified
  REGION 1..1579: note = Description of Unknown: Cas Enzyme sequence
MNAISKIQPSKNNNPDLQLAFDVGHSSIGWAVLQSRTGVTPVSDVTLLGCGVVTFPADDCLAIDRRNKRRQRRNIRSRRQRIERMEKLLAHLEVIPETELKRLHLQAKGHSKQTPHERRGASFPWLLAARVLAAQTEDEKRNSLLTWPELWDVLRWYAHNRGYDENLRWSGDYTIEGYSPENRLQPEVLGKMAEQAKKREQSGNGDGNEKPKKKEDVEENDSDKLAMGCWLMREYGFQTPTFAESFAKFLLGPERAVKPPKLPGGVGQPEKTKEVFTEEEFRHKLFGLSEEYRNHPKHLRNYYKGLKAAFPRRYLITGTKILAGGTEWEVRTIIRAHFNSPEGKARCDETFERVICGGIPEKRDDWKAYENQFPHLYLSDTDREKLKGEYKIRRRRPDECLDTYKKEKKRIVEERKKFLTGKIVLPKRYQGGLLFGQLVPRFENRIIAECLVTYGRKLPMLLRVIAGETPYTDAELWPDETKTDKKDKKKQIDREITHFQKKLSKLPVAATKEDKEKLAKHFAADLAKVPGKNCLAFLDYRWAMLLANIKIRKLGDIFPKGETLRPLKASERQQIDARAREKGFLIYERKEGKRKKGKNANTDNSAKKETKKPEFTEINEMAEIVQAVTGCGIEETNLDGFFIPPDMREALKIVPAEKGGEAFRLVWRHLDEKLRRRFAIRLLKGKVFTPEIICSELRKLERPEMAAAIEADAKAKLMTTEFACKKLEGRARYHHNVLRQAWREVMRGEDPRKKISDEIFLPKPKERDGCLVISNGTQRLLDEKPLASESNNHLVRQRIQVLTGNMQVHRDGTLRRNKDGRIVPRNSLLDDIINAPEFANGDERRINRITIEVTRDLQEMSGKGNEEKKKIEGQKRAEHTDISNKLAKWLVDEKGERLKINGQPVKIGKYIKKAWIAEDLADRGAANEAWRWRCPYTVPCGNNPIFLEPKHLVYPLSNDSRLELEHIIPKSKRVANGMEAQVLTLRAVNQMKGQRSGLQFIKERGGRPVPGLPGRRVMTEAEYRAFVDALPTKGATKQDIQRRKKRKELLLTEHWNEQEFVPRDLTNTAYVVKLAAEKLRARFRHLGENAPPVVYVPSSVTSAFRDKSWRMFRELAAAHPEVKAEMEKGDERFRFGFDGGSPKERNETRKQILVLSTGLKKFFETFGKESFTEAEKDAKTKELDALFQDCGQLEVRKKVFWLKSSFNLKQAIREITQLHHAVDAATLGLVTYYLVPPQCGSLDGTLAKYIVKGSLNNTERDEFRRIYYSLQLARNFWFQRERRLRFVGKDYEEQQDNRETFIAKCGEELRELIDKDAREPLTADERARFEKLVDELDLPRLFYFDTKNRVHIRDLRSGIKKQLHGELAKAIKGRIVQHVPADMSVMSVKENIKGYEVLDEKWAKVYQQERDSNTGKPKRKKPQKIARDKLIGVGAKAGKLAAVKGVLEITENMAVAMAEQNADNEEPPPMLVIPLHAARKRLEKFRDANRGKRVMLIRKGSLIRFKSGLHSGTAWKVFGVDNDQKNGPLLKIAKPDVVSLQTEPELNYKVTGLRTRWRDVELIEPPFTGIATYPTTSPA

SEQ ID NO: 7568 - protein, 1141 aa, unidentified
  REGION 1..1141: note = Description of Unknown: Cas Enzyme sequence
VYNDTIIALVKGEVMTEPPCGEFVLGIDLGTNSVGWAMVGLADGEPAKLLRAGVRVFEAGMEGDIESGQEQSKNLKRREARSHRRQLWRRARRLTKVFNLLQRANLLPPTEDVPAEFRKAPAWGKPFAGWLATDQSEARQDYLNWLDQRILDSPWFTDTHPVCTIPKNERTPEQQLESHRLKQLVPYILRAAALDERLEPYLLGRALYHLAQRRGFLSNRLKPAKKEDDEGKVKKGISELRKAMEETHARTLGEHLAHVSPTERRIRGRWTARSMYEEEFEKIWAAQAAHHPTLLNDDRRKQISGALFFQRPLWFDPDTIGRCDLEPGERRAPAYLLTAQRFRLLQKVNDLQIEEPGKVSRYLTPEQRAKLSDALELQGDLAFHRDRKANGRVRPSVRTLLGLPKNVSFNLQRGGEEKMPGNRTTSAFYAVFGERWLEMSAEEHNQAILDVLSIRKPEALKRRALGYWKLHEPAADKFCEISLEPDYMSLSRKAIEKLLPLLEQGIPLATARLELYRDKSEARGGLTHLPPVEVASDRTRLEEWLERTKALQPGAQLPDTVAAIRNPAVMRSLTELRKVVNAVVRRYGKPTYIRIELARQLKKSKKQRAGLSEINRRNEKARARAAEEIIKGDVGLKEPKPEDKRKYLLAEECHWHCPYTGKTISMQALFGPEPQFDIEHIIPFTRSMDNSFQNLTLCYVPENRSVKGNKTPNEAYSGDPERYQAILDRVKKFTGERAMVSAKLKRFTMSEEELEDFLKVFRNRQLNDTAYAARLATRYVSLLYGGLADAQHEQRVFAPSGQTTAYFRNLWKLNSILNDGPTTEGGRFEKSRGDHRHHAVDALVIALTDAGMVKRLSDAAQRASSAGRRRFATLEGPWPKFVETVREAIYSIVVSHRVSKKVSGALHEEMIYSSPRADGSVRVRKPLAELTKKEVEGIADAGVKALVLAKLAGGDPKKVFASEENLPCFQTSDGRRIPIRRVRINKAVPVFTLGDGRTLRHVTSDSNHHVEIYAEIDENGNEGRWDGEVVTMHEAYQRVKAGRPLVQRDHGPFAKFKFPLSPGEVIECDGGRGQRALWVSRGVASYESGPRLLLVPVSDARQKKEMLRSGSFWSPFVNPLRKLNPRKVIVSPLGEVSEAHD

SEQ ID NO: 7569 - protein, 1083 aa, unidentified
  REGION 1..1083: note = Description of Unknown: Cas Enzyme sequence
VYNGRKLMFVKGEIMAEQPCGEFVLGIDLGTNSVGWAMIGLVEGEPARLLRAGVRVFDAGMEGDIESGQEQSKNLKRREARSHRRQLWRRARRLAKTFNLLRRFGLLPSGDASTPERRQDLINKLDQDIRASDWFKTKASSGVYPAPEQTLPYILRAAALDEPLEPCHLGRALYHLAQRRGFLSNRLKPVKKEDDEGAVKKGISELRKAMEEAHARTLGEHLAHVFPTERRIRGRWTARSMYEEEFEKIWAAQAPHHPTLLNDDRKRQMTQALFYQRPLWFDPETIGQCELEPGERRAPAYLLAAQRFRLLQKVNDLQIEEPGRTPRYLTPEERAKLSDALELQGDLSFHKDRKINGRTLPSVRTLLGLPKNVSFNLQRGGEEKIPGNRTTSSFHAVFGERWLEMSAEEHNQAILDILSIQKQEALKRRASAHWKLDEAAAGRFCGISLEPDYMSLSRKAIENLLPLLEQGIPLQTVRMQIYPESFEAGDAQPLLPPVQRALPEIRNPAVMRSLTELRKVANGLVQRYGKPTYIRVELARELKRSKKQRAALSQINRRNEKARAKAADQIVKVDVGIKEPKPEDKRKYLLAEECHWQCPYTGKTISMQSLFGPEPQFDIEHIIPFSRSMDNSFPNLTLCHVPENRSVKGNKTPHEAYSGDPERYQAILDRVKKFTGERAMVSAKLKRFMMSEDELEAFLSDFRKRQLNDTAYAARLATRYVSLLYGGLADAEHHQRVFAPSGQTTAYFRNLWKLNSILNDGPSTDGGRVEKSRGDHRHHAVDAVVIALTDAGMVKKLSDAAQRAPSAGRKRFAALEGPWPNFVNTVREAIDGIVVSHRVSKKVSGALHEETIYSSPRADGSVHLRKPLAALSKNEVEEIADDGVKALVLSKLGGGDPKKAFASEENLPCFETSDGRRIPIKRVRIRKAVPTVPLGAGRTARHVTSESNHHLEIFAELDEQGNEVEWDGVVVSMAEAFWGKKQHLPVVQRDRGPHRQFKYSLSPGEMVRCGCGPLAGKLMVARAISQYTSGQIIVDLVSPTEARIKKEVVQSGGWLRIVPNTLRKWSAQKVVVSPLGEVTEAHD

SEQ ID NO: 7570 - protein, 1089 aa, unidentified
  REGION 1..1089: note = Description of Unknown: Cas Enzyme sequence
MTENPSQGFILGIDLGSNSLGWALIERANGEPTGLLRAGVRVFEAGTRGDRESGQEESRNRTRREARLHRRQLSRRARRQRKVFHLLQGYGLLPPGGADDEARQDLLNELDRTILASEWFRAKAESGAFAAPAQAMPYVLRAAALDEKLEPHFLGRALYHLAQRRGFLSNRLKPAKKDDDEGVVKEGINKLREEMGAARARTLGEYLAHLPTSEQRLRGRWTHRDMYKNEFSALWDAQARYHPGLLNEERRKQLFQIMFFQRPLRFDRAVIGRCELEPGEPRAARYLLISQRFRLLQAVNNLKLYPPLQGERELTAEERRKLVGALELQGDQTFAAIRKLLGLKTRVGFNLERGGEKSIRGNRTSAEFFAVFGDGWLSMSAGERADAVQYVYSFEKADKLKEAAKRKWGLDEPSAEKLSEVTFEPDYMNLSRRAMEKLLPLLEQGVTYAAARHQLYHPEQFRAAEALPELPPIECTTDGDALRRWAEHKKIAPEARRLPDPVGAVRNPGVTRSLSELRKVVNAIIRQHGKPAEIHIELARDLKKPKKQRQSLSERMRRNEAERKQAAKRIFDEVGIKEPKPDDIRKVQLAEECGWRCPYSTDRAISMRRLVGPESEFQIEHIIPFSRSLDNSFANLTLCHVEENKNKSNRTPYEAYSGDRERYAQILARVRQFKGDRSLVAAKLRRFQMTPEEVEKFLSDFTSRQLTDTAYASKLAKKYLSLLYGGLADEAHDQRVFASPGQATAYLRNEWKLNSILEDGPTTAGGRFSKERTDHRHHAVDAVAIALTSPATVKALSDAAQRAPLERRRRFASLQAPWEGFVNSVRNVVDSIVVSHRVSKKVSGALHEETNYSPPDKPGRPPLPPRTRRVVDPRLPGKRLSKPEVAHIADEQVKQTIVEKLSSSGTDDPEKAFSDPKNLPFLPNKKGPPIPIRKVRVNTSEPTFAIGKGTSMRYVTTDKNHHVEVIATFDDRGNEVDWDGRVVTRRDAYQRVKDNAPVIDKTCRQGEGYRFSLCPGELMECDDDAGARKFMVYKGVSQYTAGPVVISLLPVNDARKNPRLIRVVPNALRKWHARKVVVSPLGEVSEAHD

SEQ ID NO: 7571 - protein, 1044 aa, unidentified
  REGION 1..1044: note = Description of Unknown: Cas Enzyme sequence
MQGESTVLGLDIGASSVGWALLRMVGMKPTGIVQAGVRVFDAAATGVFETGRTEPPGQARRAARLMRRQTERRARRLRRLFLTLQDAGLLSAGNAGEVMPALDAAILDKYLKDTTLADDIKKRLPDNLPYWLRAEALNRKLEPSELGRGLYHLGQRRGFLSNRKAPRKNDEEAGAVKKGISDLKEKLGERTLGQYFSTLNPHEVRIRTHYTERGMFNDEFERIWKAQEQYHPDILTPKLKRKLRRALFLQRPLKSAKGLVGPCEFERGRRRATLATLEAQRFRLLQRVNDIESIDHVTGEVMRLTPEQRLRLVDALQTQSEMTFGGVRKLLGLSGKRHCFNLEEGGEKRLIGNRTNAALRAIFAERWDGMSAEERERVVHDVLSVRQDDVLERRSREFWKLPPDSAAKLAAFSPEPGYLGLSRHAMRKLIPLMESGLRYSEAVDKVYGFGQRGEALEALPPVAAGLPHLRNPVVHRVLAEVRKVVNGIIREHGKPQVVRIELARDLRRTKKQRQQVTERNRQNEKLRTEAAKRVLAETGESHPSRRDIEKVILWDECAGICPYTGKSINFGALFGDSPEFDIEHIIPFSRSLDDSFFNKTLCWVKENREQKRNRTPWEAYGTDPTRWNDFIERVKRFHGDARIEKLKRFQTREVASLEEFASQLLNDTRQASKEAMRYMGLLYGGLWDERGVRRVQASKGGVTAYLRYVWELGSVLGHGDGGKSRMDHRHHAVDAIAVALTEPGTVKALSDAAVRALSEGRRRFGHVEEPWKGFVQDARRATECIVVSHRPEHKVGGALHADTLYSKEHEGPDGQPCRHVRRMLNTLKEKDIERVVDAAVREQLAAKLARAGGDFKKLVAPVQPSCLKEGRRIRDARLCAECILPCLPARDGHGVPIHSVRVRENVYPVQIGKGARARFALTRHNHHMEVVEEQTDKGIRWKGLLVTRFEAMNRVSRRQAVVRKDHGRGRRFLFSVASGDTLKIKDGQLVVVRTVSDGKIEFVDARDARKKKDIKEETKLSGQNPDNKKGGGWTTRSPEELRKL

SEQ ID NO: 7572 - protein, 1062 aa, unidentified
  REGION 1..1062: note = Description of Unknown: Cas Enzyme sequence
MQHVWGFDIGTTSIGFAVVQLDEEKDAGSIIHEGVRIFPEGRTEKDLEPRNQARRAARLLRRQVRRRRLRRKFLRQAFADAALLPSYGQPQWDEFMNSGVDPYELRARGQHEKLLPHEIGRALYHLCHRRGFLSARRADDRPSEKKARDKEEGPIKAEIQGLSAKLQGLPLGEFLYLAGLEKAERDQRMQAWNIQNLYLEGLKQRERRRGRHIGRTMVMEEFQRLWNTQAQFCPGPLTSDLKDKLRDTFTYQRPIFWRLQTVGQCALEPGEPACPKGSWLGQQFLMLQQLNNLRLRFSGQPARWLDEEERKILLERLARQETLEFGGVRTALKKLWKERGLSLKPEINFESGNEKRLIGNAVEAKLAEVFGKDWGSHPARKRLRTELYDRAFAIYNRRVGNKRIELHRQDQFKDEVAPAKAKFVEQAQSDFGITREQAEKLADFDPPPGWLRFSARAVQKLIKLLEEGFGLNETGGALDQAYPNWKASGERVLDRLPSHPKAMPVLRNPSVNRALNEVRKVANNLLRAYGKPDLIRIELLRELKKTKKQRLAISSHYGKNRDLREAAKRDLEENGVRPTPEAKDKWVLWKESGEYCPYTGRKICFDDLFRRGEFQIEHIFPLSRSLDNNLTNKTLCATDVNKDKGNQTPFEYFRSRPDAWDEIKDRLEGWVQAGNFPKEKMEAFLRDDYPQGQEELEERQKADSSYTAVEARKFLARLGVPVEVVNGQVTAQLRSQWGLDAILNPGSPKIKNREDHRHHAVDALAVALTTRSFVKRLSDYYAHERRGEKPKFKPPWEPTFWQDAERKTREIIVSHRVQRKISGPLHALTYYGDSYRKFVTRKEIKDLTESEVKGEKRSRIRDDTIRGLIQQELAKRGGKPAEAFGGSDRLVLPPNEKKKQRKEAAGESVIAPVIESVRLEVKQQHHLMVPVWPKAKSGLDPQTFADLGGNYCIAIYKLPDGTAYHHTISLPEATALLKQKGKKHQPVARQALENGARLVMSLTPGDVLEISRGQAREYIVVRYCNEKGRVFYKPHTMATDPKPEVSFGPEAFLKPNICKVSF

SEQ ID NO: 7573 - protein, 1059 aa, unidentified
  REGION 1..1059: note = Description of Unknown: Cas Enzyme sequence
MASVGEQLVLGLDLGSNSVGWALLRESEDGPTALVDAGVRVFEAGTEGDVESGKDEPRGMQRRMARQRRRQAERRSRRMENLACILRRSGLLPDDVVRHGAKRDAAFRGLDQGIYVRHRAVLGEDSPELGALRQLPYFLRSRALDAPLERHELGRALYHLAQRRGYLSNRKARKKDDDSGEVEPAIHALQAEMDAAGARTLGEYLSRIDPVQEQRIRRRWTARRMYQEEFNAIWEAQRPHHKKVLTDALKEQAYECIFDQRPLKSQKGLVGECDLVRGKRRAPMALLNAQRFRLLQKVNDLEVCFADGTQGPLTPEQRQKVLDGLETVEHIKFPGLRKLLKLKGAEFNFERGGEDRLPGNKTAKRLRDVFAERWDALSRAEQEAIIGEAMGIQKPETLVRRGREVWGLDAEAAERFGKVQLESGYCSLSREALKVILPLMEQSKRFATARDEAFGGQWSRVVNSELAPVVDACSSIRNPVVTRTLTETRRVVNAIIRKYGKPGVIRIELARELKKTREQRKEITRNINKRRDQRGEFAEVVENETGNKNPSRRDVERIQLWTECGGKCPYTGNSISRGQLLSAESPWDVEHIIPFSRCLDDSFLNKTLCYHEENRNVKKNQTPWEAYGGTPAWDDIIMRVSQFHGDAAKEKLRRFQLRDLDDFDTFTQRQLNDTRYASRLAAQYLSWLYGDEARSRIQVSTGQVTACLRNAWNLNKILGDGGQKERSDHRHHAVDAVAIALTERRYVKALSEAAARQFAQKGRSRGFQKLVEQPWDDFLRDVQDVIGRIVVSHRPQRKVAGGLHDDSIYSPPRTDENGKPYVVMRKPLDKDFKASHLEDVVDPEIRRILQDWLERHDNDFKRAFGDPKNHPSIVIKHGPQAGQTIPIHKVRMKFHREVTPIGEGERLRHVWTRGNSHIEIFAFKDANGNVAKWEGRVVTRLDAYRRVKHKRPVVNRTWTENHEFLFSLTQGDVVELDVEPEADRTVREPYLVRGISFQGGGIFELTHIRDARKKGDIPPKVTEEETTFVRRRPYVDGLRKLNCQKVSINPIGEICPAND

SEQ ID NO: 7574 - protein, 1052 aa, unidentified
  REGION 1..1052: note = Description of Unknown: Cas Enzyme sequence
MKSPRQSESQPHSLILGLDIGAASLGWALVEVGPERPQSIKASGVRVFHPPVDEKKGDIAKGTEVFHSAARREARLRRRQLARRRHRLDKLAGILQEAGLLPPGDLSSADAAVRYFETLDRDQFPREARRANPHLLPYSLRARALDESLAPFEIGRALYHLAHRRGFLSNRRVKPGAQGDDQEKEEGKVKGAIGELAQRMQDAGARTLGEYLSRLNPEEEPIRGQGHYLGRKMLEDEFDAIWSAQAAHHPAVLTEALRDKVQRAIFFQRPIKSQRHLIGYCDLERTRRRAPMCTLAAQRFRLLQKVNDLLVEGPDGKHALTADQRDRLLEALEAARRLSFPDIRRMFSLPRGTKFNFETEGEKSLPGNRTAHDLAAVFGSQRWSALAPEQRDRAVEDLRSIHNRDALKRRAAKAWGLQGEAAERFAEIALEDGYCNLSRQALAKILPLVEQGMQFATARKQLYGDEPPPAAVTMLPRLESVLEVRNPAVQRALTELRKVVNAIVREYGKPDRIRIELARDLKKPRKDRQRISRQNARNRAAREVAGEEIEDLVGPNPSRDDRVKLLLWKECGGLCPYTGKPISREALFGDHPQFQVEHIIPFPRCLDDSFMNKTLCEIEENRRKGNRTPWEAYHGTDQWEAILGRVKQFRGDARRAKVDRFQTEELPGLDDFTTQQLNDTRYASRLAVEYVAMLYGAGADGVDPQTRTKRVEASRGAATSYLRDEWDLNTILGGGEKTRDNHKQHAIDAIVIALTDPAAIKRLSAAAARAPEARRRRFAPLPPPWEGFLDHVRALTDHMVVSHRVSRKVSAAIHEETIYSKPQLDERGKPCVHVRKPLESITKKDLPDIVDPAVREAVAAKLEAFGDKAFKDRANHPTLRAKDGRMIPIHKVRLRTSVSPEQIGGDGAYSRSVKLGSNHHVEIIETQDKKGNARWEGCVVTTKEAMRRLKAREPIIRRDHGPAKCFLFSLAGGEIIELDAEQSKRQLFAVRTITVKRTGRVSLEYAAINDARKKNEIQAANAWGMADVDPLRKRHCRKVVVTPLGEVRTARD

SEQ ID NO: 7575 - protein, 1226 aa, unidentified
  REGION 1..1226: note = Description of Unknown: Cas Enzyme sequence
MSKILGLDLGTNSIGWAVVETEKGQSFKLIDKGVHIFQEGVKIEKGIESSKAAERTKYRSARRLKYRRKLRKIQTISVLSDYGYIPKVSKEELNLWRYKKIYPENPEFRNWQLTDELKNENPYFFRDLAVKQKLDLTKKEERYKLGRAFYHIVQRRGFISNRLETTKESDGAVKQEIDKLSKEKGDRTLGQYFYDCYKNKQKIRKHYTHRELHYLEEFNRICDIQNLNKDFREKLKQAIFFQRPLKSQKGFIGKCPFETNKPRCSVSHPLFEEYRMLCFLNNIKIQAEADDKMRALTQSEKDTIIPLFFRKSKPHFQFDDICKKLTPKGITYEYYQSKAKYEKVYLFNFKMNTTVSGCPTYAHLIDIFEEPLETNILKHYTLQTTSVGKKTYEEIINDIWHVLFTYNDTEKLVEFAKSRLQLDPEKAIKFSKISLKNDYASLSLKAIRKILPWLRSGLIYSHAVFLAKLEDILPAHIWSDVKNRDIIKDTINDIINSQKTEIQLNEIVNGLLKNCQTENVSWSENDYWQNIIRSEINQKLNSYFGMNTWKEFNDDLKLTYESEVLNKFKTQMQKNIGKNKYGIEESALSRIYHPSDVETYKKSGRDEDGNFYLGSPRVDAVRNPMAMRTLHQLRKVVNEMLSEGLIDNDTKINVEMARDLNDSNERKAIQTWQRDKETKRKEYFDKIKELYKVETGKDIEPTSDEVLKYQLWEEQNHKCLYTGEQIGISQFIGADPEYDLEHTIPQSKSLDNSQVNRTLCSSKFNREIKRNKIPSELSNHEEILARLDHWKEKFEDLENQIEKSKKASRSASEKEIKDRIIQKRHRLKLEHDYWYGKYKRFTMKDVPEGFKNSQLNDTRIITKYACQYLKTSFEKVYTVKGTTVADFRRMWGLQQDFEKKERVNHIHHCIDAVTIACMTRKNYDELANYYYELKQWEYKKNANKPVFKKPWDTFTEDVKNFDKEVLISHFTPDNLLKQQKKKLRKRSKIQMNDSKKPLYQQGTSIRGSLHLEKYYGAIKREILTKDNLPEEKILYVIRKPVDSLSQADINNIVDGSVKEKVQHAVNEKGLKAALSETIWMNEEQKIPIKKVRCFTPHISNPIRLKRHRDISDKEYKEFINVVNDENYLLAIYEGIDQKGKAKKDFELINNLNAGLLKTEINQKGSTIKLVPDYHTISKLPVKQILKIGTMVILWAESPDEVKSLSVSEICRRLYKVTGLSSMLIQN

SEQ ID NO: 7576 - protein, 1001 aa, unidentified
  REGION 1..1001: note = Description of Unknown: Cas Enzyme sequence
RCGVRVFPAGVEGTPEQIEQGREESRTAKRRQMRLMRRQTDRRRRRLKNVYSLLRSYGLLPAAETSKDRGLALDAVDRELSRQYPETSVLPYFLRARALDHRLEPFELGRCLYHLAQRRGFLSNRKVRSRESEEDRGKVKTGISQLQSAMEAAGARTLGEHLSRLDPHQERIRERWTQRAMFEREFEAIWAAQAPHHPGVLTDGRRAELFEAMFHQRPLKPQTELIGKCELEAGEKRAPLWHPLSQRFRLLQAVSDLRLLDPAGLERPLSEEERAKLVAALDVEGDLEWKKIRKLLGLAKTVLFNRQAGGEKRLVGNRTAAKLRGVFQHRWGEMTFEEKEEACADLAGDFSEGQLARKAVERWGLNELLAGEYAELELETGKYLSLSLRAVASLLPRMEAGEPYMTARMAEYPQALSVPIAELLPPVADSLAEIRNPAVVRALTEVRKIINALIRQYGKPEEVHIELARDLKRPRPERERRADRMRQQQDRREEAVNQISAQGGPGEPSRADTEKMLLAMECRFQCPYTGRQFGYKSLESGEVQLEHIVPFSRSLDDSFLNKTLCFVDENKRKGDQTPWEYYGRTGHPEWEHILQRVKQFDSPLAREKLRRFQMQEEQVSRLLSEFSSRQLNDTRYASRQAAKYLAQLYGGLSDKDYGLRIFVSGGEITAYLRRLWSLGGILGQSPGKNREDHRHHAIDATVVAMTGPGWVKALSDAASRARAVGRRRFASLQAPWDGFVSEVGEAISRVVVSHRLDRSVGGAFHEETFYSVRDHRDRPGVASVRKPVTTLTAKQIDAILDPAVRERVRLQVGIVGGDPKKLHGPQNEPTLPTRDGRHIPIRRVRVAVRSEDVRPVGTGERERLVMGGDNHHFEVFAVVGSDGQPKKWDCAIVSKQDAAERLRRMPRQPVVQRDHGPGTRFEFSIAKNDTLEIGPEAQRRLVVVRLLTGAKLVGVVNTEDARPASLKTGNLERYAVNQLMRAHHCRKVLVTPLGEVVPCRD

SEQ ID NO: 7577 - protein, 947 aa, unidentified
  REGION 1..947: note = Description of Unknown: Cas Enzyme sequence
MKIAGTGRTQSEFVLGLDIGAASIGWALVETRDGQPQSLKAAGVRAFAAGVEGDISSGRDQSRAVTRREARSRRRLLWRRRHRLTKLASRLQQAGLLPPVELSTPETINGYFTNLDRDLFPQHIRTRDPHLMHYRLRARALDEKLTPYEIGRAIYHLSQRRGFLSNRKETARPRREDDEGVVKEAIGKLEQEMHAAGARTLGEHLSRLDPEQERVRGRYISRGMIERELEAIWQAQAFHHPDILTDDLKLAVRRAILHQRPLKSPKRFIGFCDLERDRRRAPLAILASQRHRLLQKVNDLKFIPNDSAPCDLTPEQRAALAQALDTTPALTFPAIRRLLSLKGGRFNFETEGEKGLIGNKTAARLLAVFGEERWAAFTPQERDQIADDLRTIHNPDARRRRAAKWGLDEEAAAHFADLVLEDGHHSLSRQALARILPLMEEGQQFATARKACYPDRAEGNPRDLLPPLDDVMEVRNPTVERALTELRKVVNAVVRKYGNPYCIRIELARDLKRNRKQRQDIHSRNIANRRDRDRAAAVLLQERGITNPRRSDIEKWLLAEECRWTCPYTGRQISLEALFGDAPQFEVEHIIPFPRCLDDSFLNKTLCHVDENRRKGNRTPWEAYHNTPQWDDIIGRVRSFQGGGRGRAARNPKLERFQRQDTDALDDFVSQQLNDTRYASRLAVRFVGQLYGAGADGVDPQGIRRVQAGRGQITSDLRNEWALNSLLGGGEKTRDDHRYHAIDAVVIALTDAATVKRLSDAAARAPSAHRRRFAPMEPPWPTLLEDVRTAIEGIIVSHRVSRKVAGAMHEDTIYGRYRYPGEDGKERDWAHVRRPLSGSRSALAKNDIPSIVDPAVRRCIEEKLAALGETDPAKAFKTADTHPTIRARNGREIPIHKVRIRRPDTTQRIGLGPTARDVKLGNNHHMEIVEITDSKGQTRWDGVVVTT

SEQ ID NO: 7578 - protein, 924 aa, unidentified
  REGION 1..924: note = Description of Unknown: Cas Enzyme sequence
ERLKAEGAPLEKVQLVPHVLPYLLRARALDEPLSPHELGRALFHLGQRRGFASNRKSTPKKDEELGEVKKQIHELEEKMAGRTLGQYFALINPHEQRIRGHWTARQMYENEFEKIWAAQQPHHPALLTDDLKKSIHHAIFHQRPLRIRKEFLGNCECERGRKRAPMALLAAQRFRLLQMVNHTRVKRDGAERDLTPEERHAVIEALESGGDLEFGRAKKLLKLARGEKFNFEEGGEKRFLGNRTAAKLGDIFGERWDQFSGPDRDRIVEDWLSIQKNWVLAKRGMRVWGLDKDQAATFGALQLEDGHCRLSRQALAKLLPKMEEGMPYTNARLDVYGPDYAGKPRDRLPRVLEALPELRNPAVSRAVTELRKVVNAIVRKWGKPAAVRIELARDLRNSRDKREKNWKKSRENQKAREAAAKKILDETGNQNPSRDDKEKVLLFWECKGECPYTGKHISLTNLLSTQSQFDVEHIVPFSRALDNSFLNKTLCDAEENHNRKRNRTPWEAYGHDENRWAEIVQRVKRFAGEAAREKLRRFQLQRIESGDEFASFQLNDTRYATKLAMKYLGLLYGDEALSRMEASRGQITAILRNELQMNSILGDGGKKTREDHRHHAVDAIAVALADRRTVKMLSDAAARAQEARRRRFAPIQPPWDGFLDAARQSIAQIIVSHRVSRKVSGPLHEESIYGKEMKDEEGKPCLHIRKRIEDLNKSDQVEAVVDRRVREIVRAKLQELGGDFKKFSDPNNHPFLKTRDGRRIPIHKVRIRDRRSPSQIGQGPSERRVWLRNNHHVEIVEVRDKKGRTKWEGRMVTLFEAKQRLKDDKPIVQRHHGEGKRFLFSLGHEETVIVKADGEERIHKVTKFSESGKGQIEIALRRNSDARLAKELPKGKDGLWRMPPNSLREVELRKITVDPIGEVRRAND

SEQ ID NO: 7579 - protein, 1085 aa, unidentified
  REGION 1..1085: note = Description of Unknown: Cas Enzyme sequence
MSTGELLNYVLGLDLGANSIGWALLAAAQEGDRLRPTGLVATGVRIFEAGVEGDLERGREESRAQKRRLARQSRRRLERTARRLEKVFRLLQSAGLLPQSQPPAALPGIEVPKEKMTARERREERLRHAAEREAILARLDAACLVRWSDKLTAEKASEADIALLAHRLPYVLRARALDEKLPLHELGRALYHLAQRRGFLSNRKAAPKKEENKGVVERDIAKITVAMQETEARTLGEYFSRLDPQQERIRGRWTSRKMYEDEFERLWAAQAPHHPDRLTSDLKKKVKRAIFYQRPLKVQKDLVGECEFESGRKRAPMAVLCAQRFRVLQQVNNTRVLAPDGVERGLTPEEAGTLLDALETQGDVKFAKAKKLLKLSPQHVFKFESGGEDKFIGNRTAAKLIGVFGLDRWKGFTLAQRERVVDDLLTIQKPETLGRRGQSFWGLDAEAADNFARVRLEDTHCRLSRLAIENLLPLMERGMSYMTAAREIYGERPAPPPVDLLPAVGEAMPALRNPAVQRALTELRKVVNAVVRKYGKPAAIRVELARDLRKNRKQREQTWKQNRENEGLRLDAARRLLEEMHMQGPKRSDIEKMLLYQECACQCPYTGRHISMRDLFGDAPQFDVEHIIPFSRSLDDSFLNKTLCEVAENRNVKGNKTPWEAYGHNPQRWSEIIQRVSRFQGNAAREKLRRFQLQSVQELEDFTSSQLNDTRYASVEAVKFLKLLYGEEAQRRTIVQAARGGTTRFLREEFGLNQILGDGGEKSRDDHRHHAVDAVCIALTDPATVKMLSDAAARARSERRRRFAPVPFPWGGFVDHVRAAIAGINVSFRVSRKVGGALHEETFYSPPKKDPATGRECVHVRKPVSALSEQRIENIVDPAVRAAVQAKLKQVGGDPRKLADNPPKLKAKDGREIPIRKVRVREYITTFGIGQGGNRQVVTDTNHHVEIVETRVKAGQAKWEGHVVSQYEALRRLRAKEPVIRREHGEGRMFMFSLALGETVQMRGDDGQVGLFKVTGVSVTSGAHVDLEFRAIADARPASRLRKEQKENPKLKGWRVRRTPDSVRQSSAQKVLVTPLGELRRVGRD

SEQ ID NO: 7580 - protein, 1046 aa, unidentified
  REGION 1..1046: note = Description of Unknown: Cas Enzyme sequence
MAEKISGDFILGLDIGASSVGWAILGTDKGKPVKLVRCGARVFDAGMEEGDFAAGKENSRNATRRQARQARKLTNRRWRRQRKLFNLLVKAGLLPPGDPGKVIPELDGTLRAKLLAPLLKYSPERRRVEHVLPYHLRAMALTGKLEPFELGRAIYHLAQRRGFLSNRKAPPKKDEKPGEVKEHIIELEKKMKEAGAATLGQYFAGLDPEQERIRRRWTSRCMYQAEFKRIWDEQARHHPAILTEELGKRVYRAIFHQRPLKNQSNLIGTCEFERGRKRASWGLLLAQRFRMLQQVGNTLIVAPNGAQRAFTDDERDRLLSVLQRDGDQTFREARKLLNLPKGHKFNWEEGGEDRFLGNRTNAKLAAVFGEDWSKMSETEREQVVEDVLSIHKDDALERRGARRWGLDPEAAAKLGQTALEDGHCALSRQALLKLMPMLEDGVPYSKAVKEIYGDRHGDALDCLPPPASTYPHLRNPMVLRVLAELRKVVNAVIREHGKPTTIRVELARDMRRSKKQRTEAWQKMRQNERDRKKAADKIAKEAGTENPSRADVEKVLLAEECGWICPYTGRAISMKDLLGQTPQFDIEHIIPFSRSLDDSFLNKTICEVKENRDHKRNRTPHEAYAGNPEKWDAIIARVRRFKSSAAHAKLRRFQQETTEGLEEFASRQLNDTRYATLQATDYLALLYGGLYEKDGRRFIQAGRGGTTAYLRNEWQLNTILGDGGAKSRDDHRHHAVDAVAIALTDASTVNMLSDAAERATTEGRRRFGRVEEPWAGFLDDVRQAVEGTSVSHRISRKVNGPLHEETNYGPSRERDAQGRPASFAVRKPIESLSANDVKLIVDDRVREAVKAKLDELGGDAKKAFADPKNHPFLESRRGRRIPIHAVRTRRAESAITVGEGARLRYVASGSNHHMEIFEVTDKKGKRRWKGRVVSRYEAMRRQATRRPVVDRSPPDGGRFLLSLAHGEIMELTSAGRGPELYRVRKVSLSKSGSIEVAAARLTDARLKDQIIKSGHWLRIRSLDNLAAMACRKVIVTPLGEVRYAND

SEQ ID NO: 7581 - protein, 1112 aa, unidentified
  REGION 1..1112: note = Description of Unknown: Cas Enzyme sequence
MNKEKVVLGLDIGVGSIGWGLVKLTEEKYTDEKPDGTIVEKYKISDGKIIDTGIRAFQLSQDEKKESLALKRGTARRSRRTTRRKAQRLKRLMGLAKEFNLINDNFDRYAILKPKEGDKESKWDIWFIRKQALERKLSDDELFRVLYHIAKHRGFYFHTKAEEMEEEDKKSEEGKEKARVKAGLSRIKKKLKDGGWETIGQMFCEEFQQTNKENKRKRNAPDKYENSIHRSLLKEEIETIFERQQQFGNSKAAKELKQRYINGILMKEEGPDDEKLQRMMGRCEFTGELCAPKEGYTSERFTLFNQLNTLELVDTRNKDKHLQLDKDQRDKIIALAYENAKVTFAQTRTALELQDKLHTRFNRCSYREKNPEYNKKLECEVKNGKLQFNEKHKVPIVDINTGEVKILDKEIKVIFLSKKLWPNAKKIYVYYSDIRKQLNLSEDFRFNLSGYTKSAAEFGSETKYIKQFEGDTLVELKGYHKIKNAIEENCGGEKWGQISGDTAKLDTIAEALTYCKSDETRKDYLLKNGISDESIIEAVLTINMKQLATYSKEALSNLLKYMEAGALFNDAKKKCGYDKLEYDKQAILQPYGGFFENNPVVARVVSQTRKLVNALVRKYQKHYTIDQIHIEVATELASSKKRKSQIAQGQRRYKDAKKAAEERCREEGLDPEEGQNLLMFRLAEEQNYFCPYTRAKITLCPTGAANEVYIQDCEIDHIIPMSRSFNDSLNNKVLCTQKANQDKRDRIPFEWFEETYGKDSQRWIEFENTVKKMYSMPYPKRKNLLRKSWTEKDKEKFLSRNLNDTRYAARHIADYLRKYFDFSISERDDIKDVSRVKVRSGGVTAFLRHMWGLRKDREESDLHHSVDALVVACSTDGHVYLISNLAKEIERKGENWYKRFGFIRGKFKPWDSIREDIQEAVGNVFVSRMPRHKVTAAAHKETILSFKKAPTKNRVIKTNCGYAEIGEMVRADVFTDEVGRNYVVPIYSVDIFSNKELPDKYLHKNDAPYYEWPSVKDDNLKFKFSLFKDDLIRIDEQMYYIDHIRGTRPLINVKNIDGSVFESNNKESELGYRNVRLKKYSVDMLGNYKEVKQEKRLGSRFENNKKMAKEEN

SEQ ID NO: 7582 - protein, 1433 aa, unidentified
  REGION 1..1433: note = Description of Unknown: Cas Enzyme sequence
MNKIFALDLGTNSIGWALRNPDLQENQIEKFGVITFNKGVGLGKTGEYSYAAERTKKRSTRRLYQARKYRLWSTLEHLINEGYCPLKIENLNGWRYYSKEEAQKNNNGGRVYPVDDLVFDAWIKLDFNNDGKPDYTSPYQLRKELAEVKFDLTKEENRFKLGRALYHIAQRRGFKSSRKGSDDNKEKETANENDIVDLQYSEKKKNKVIVELFQKYPEAKTIGALFANLENDGIRIRESIAQYAIRENFKDEIKHIFQIQGLLFTDPLYSKLVETGKNKNDGSIFYKRPLRSQKGLIGKCTLEPNKYRAPISHPSFEIFRAWSFLNNIKFKQSDGNDEGWKPLDLDLKKKIYNKLFFRKKAYFPFSDIEDLLKKEGKNWQLNYKSRTTVTGCPLSARLKDIFGDNYLFVQIPKSPSPKAKKNFYNIEDIWHVLFSFEDQEYVEEFAATKLKLDDEKVKQFIIAWNATPVGYAMLSLHAINKINTFLQKGLIYTEAVLLANIPEIIGKDVWSKNEALLINEISKVIDENRSQKTILTIVNSLISKHKNLADHEKFGFKDNNYKLDSSDFTAIEETIKDQFGEKKWVTKPEDEQKQISNTVRDCYQAYFINTGLERKDIHNERHFAVKSNNKIYYKSDSGYFRLPKLIDTLAEFLQLNFTVSDEKLKKIYHPSEINIYPPAKPDKEGVLKLGSPKTGSFKNPMAMRALHELRKLINFMIETNQIDSDTRIVVEVARELNDSNKRWAIEAWQKQRESENNEFALAIEQLLKEEQGVSADSKSSVDIDKFRLWYEQGEEESVPPIAEGKKDVKGIKWSENKKNSYKEIAAKKEMLDKYRLWKEQNCQCFYTGRIIKITDLFKENVIDFEHTIPRSLSFDNSLANLTVCYADFNRTVKKNQIPFNLNNYNEILPRLKNWQEKVERIKQQIDFWNTKSKKAADKSWKDDAIRQRHLWQMELDYWRNKVDRFTMEEVTSGFKNSQKVDTQLISKYAFHYLKTYFDRVDVQKGSITAEFRKIYGLQIPDAKKDRSKHSHHAKDAAVLTLIPIAAKRDEILKTYYEHQERRKTFSTEPYKGFKREFVWNIDDSVLINNIAIDQSLTPAKRIVRKRGKVQFIEGTNKPKIATGDNIRGQLHLDTFYGAIRPAKRGEKGEILRDENDKIVQEETVKYVLRVPFQFKSKPELPGFKTLEEIETQLVDPGLKKQIVSQVNEAGGVKEAFEKGIYMLDRKGNKVNKIRHVRIFQDVKEPLQIKKQTNLSKHNYKHFYYANNASNIAYGLYRNHDNSKSSFKIINLFTASKISKLTGSRKIELENEIIIGKNALKLYSILQPDQKVIFYKENISELKNLLFEELSSRIYKIEGFEKDGRIRFMHHLNAAPDNELKKLENQFGKGIYQGYSTLNYENPWPKLKLSLSNLMMAIENRDFKVGMDGTIQWL

SEQ ID NO: 7583 - protein, 1029 aa, unidentified
  REGION 1..1029: note = Description of Unknown: Cas Enzyme sequence
MKYRLALDLGSTSLGWAIVLLNGRAEPCAIIRAGVRIFPDGRNPKDGSSLAVTRRNARAMRRRRDRLLKRKARMQRLLIEHGFFPADEAARKALETLNPYELRAKGLDAALTPAEFARALFHINQRRGFKSNRRTDKKDNDSGALKAAIGSLRAQLDPLGADGKARTVGELLWRRMSDPSVRTVRARYREQRVTKDDGKTRVDKSYDLYVDRAMVEAEFDALWTRQAELNPAQFNEIARAALKDCLLHQRNLRPVRPGRCTLEPDEPRAPLALPSQQRFRILQEVNHLRLLGGRLLEEALTLEQRDKLVAALEDGSKSFKTAIPKLLGLPGSVQFNLADAKRTELKGNATSMVLGKRDFFGPAWHGFSAARQDEIVMRILEEESEARLVDWLIESTGVDESHALKIANAPLPEGYGSLSAKALAKILPAMRAQVITYDKAVLAAGYDHHSHISHAASTGEILPELPYYGEYLQRHVGFGTGELNDPPEKRFGRIANPTVHIGLNQVRVVVNALIKRYGHPAEVIVEVARDLKQSQDQRRETQEHQARNQKRNERLRKDAAAILGIAEERVRLADIQKLILWEELSFDIADRRCPYSGVQLSATEVLSDRVEIEHILPFSMTLDDSLNNKTVALRQANRLKGNRTPWDAREAFAGQGWDYDSILLRAERMPRAKRQRFAPNGYEKWLKEDKDFLARALNDTRHLSRVAREYLSLVCPAGTRVIPGQMTAMLRAKFGLNDVLGLNGEKNRDDHRHHAVDACVVAVTDQGLLQRFAQASADARGKGLDRLVETMPDPWPTYREHVRRAVNAIWVSHKPDHGFEGAMHEDTTYRPPHLDPKNMWRTRGIGGGKPNEKDADSKAMVGFTGPEHLQRHHRDEAGQQLPYKGYVASPKFCMDIVRNDKGRWEGEAVSTFEVYRLVSELGREAALARIQSKSHSISGKTLVMRLQGGDMVRLEDDEGQHRVLRVVKLKANGQVFFAPHNEANADARDADNQDPFVYLSKTAGSLQRARGRRITISPSGELSDPGFKE

SEQ ID NO: 7584 - protein, 1086 aa, unidentified
  REGION 1..1086: note = Description of Unknown: Cas Enzyme sequence
MQQGNAMPSYSLGLDIGIASVGWCVLGQDRILDLGVRAFDKAETPDGESLNTARRSARLLRRRLRRRAWRLLKLARVLKRYGLIGDSRLFLTQAPVTQSLWRLRVDGLDRQLEGEEWARVIYHLCKHRGFWFARKAEADSSEGGKVKQGLERTRSLMREKGYRTAAEMALAEFPNNQRNKRGDYSQSLGRELLADELAMLFQRQRALGSLHANSELEAAILDPDTGLFWQQKPALSGEAMLALVGKCTFEPDEYRAAKHSWSAERFVWLTRLNNLRVSIGGESRSLNEAERQIALDLPYELVSVKFKQLKAKLVKSGMWPEAARFGGLNYRNDGKDPEDAKLIELTGWHELRKSLETVGLKTEWQSLATDHAKLDAVTTVLSIYKTDAEIHAQLTRLALPEPVIGALLGVSFNDFIRLSLKALGGILPGMERGQRYDQACEQAGYHHSATVEKAASRYLPALDDDAPNNPVVLRALNQTRKVVNAIIREYGPPMNVHIEMARDLSRPLDERYKIEKDQLAYAERNEKDRERFAAAFGRRPTGREFEKWQLYHEQHGKCAYSLMPLDLNRLIDDATYAEVDHALPYSRSYDDSKNNKVLVLARENRDKGNRTPFEYLDGASDSERWQHFVVFVSGNKVYRQAKRERLLRKNFGKDEAAGFKDRNLNDTRYACRYFKNFVEQHLALHSQSEAKRCVVVNGQLTSFLRARWGLAKLREGSDRHHAIDAAVVAACSHGMVKRLADYARREELDAVREGFVDLETGEVLNPAMLHQLDKHFPRPWPHFDDELCVRAGIDRSTGKVRDELTHEGMRKHLAALGYDADALAAIRPLFVSRAPKRRNGGAAHKDTIYASRPTPAQPKRVTQKVALNQLTLADLDKLVEPHRNAALYAAIRERLEAAGGKAEKAFAADKPLYKPTRDGGQGPLVRSVTLAIDKLSGIPIRGGVAKNDSMIRVDVFRCAKGRFHLVPVYVHHRVAKVLPDRAIVQGKDEEDWTQIDESYAFLFSVYPNDLVAVQIKGKALATGYYAGCDRSTAAITLWAHDRNLAVGKEGLIRGIGIKTALSVEKFHVDVLGRVYPAKPEVRRGLA

SEQ ID NO: 7585 - protein, 1533 aa, unidentified
  REGION 1..1533: note = Description of Unknown: Cas Enzyme sequence
MKKILGLDLGTNSIGWALVNDTENEYKEILGIGSRIIPMSQDILGKFDNGVTESQTAVRTRFRGVRRLRERHLLRRERLHRVLHIMEFLPKHYEKYIDFENKLGKFISDTEPKLVWKEIQNGVFDFIFKATFTEMVEEFKVTQPQLFAADKLIPYDWTIYYLRKKALEQKIEKEELAWLLLNFNQKRGYYQLRGEDDLNDKKNEYVVSLKVDQIEKGEPDRKNNNRSWYNITLENGWIYTATFTSEPKWLNEEKEFLVTEELDENGNIKISKDKKTDTEGTEKRRITPLPSFEEIELMSQSDKNKIYKKIKAKTEATITNSGKTAGCYIYDTLLQNPTQKINGKLVRTIERKFYKQELKAILEKQKEFHSELNDVELYHACLNELYGNNEAHRKSNDNRDFTYLFLNDIIFYQRPLKSKKSLISNCKYEVRTFIDKETGEKQKEAIKCIAKSHPLYQELRLWKFIQDLKIIEREKDINGKLNTDVDVTNEFLKTEDDYVELFDWLNKTKEIKQDTLLSSYFKIKKKKGEEKLSHRWNYVEDKEYPCNETRAQFLNRLSKLNNVPEDFLNKETEIQLWHLLYSVEDKLEIEKALKSFAVKYQLGDDFVEVFKKFPPFKKEYGAYSEKAIKKILPLMRIGKYWDIDRIDEKTKLRIDKIISGEYDESIQNRVREKAIKLLNISEFKGLPEWLVSYIVYDSHSESSDISKWKTPEDLEAYLLTFKQHSLRNPIVEQVITETLRTVKDIWKYYGDFSEIHIELGREMKNPADKRKSMTAQITENENSNLRIKYLLAELMNHNDVENVRPYSPSQQEILKIYEDGVLNSGIEIPEDISKIVKQSQPSKSDLIRYKLWLEQKYRSPYTGEMIPLGKLFTSAYEIEHVIPQSRYFDDSFSNKVICEATINKEKDNALGYEFIKNNEGRIIELSYGKSVKIFTVRQYEDFVKQYYGKSRGKMKKLLMEDIPEAFVERQLNDTRYISKVVKGLLSNIVREEGELESTSKNVISCTGGVTTILKQDWGLNDVWNRIVTPRFERMNELTKSNNFGQWINKDGKRVFQTEMPLELQKGFNKKRIDHRHHAMDALVIACATRNHINYLNNESAKPSSNVSRYDLKNKLCFKSKTDDKGNYKWQFHKPWNSFTEDTQVALENIVVSFKQNLRIINKTVNKYQVIDNGKKVFKTQEKGDSWAIRKPLHKETVAGIVNLRFKKPVTLSAGIDQWEMLVDKGLKTKIKQLINEGFDKKKIIKFFAEQDNKWFGKDITKVELYYFSNDKEVLVASRVNLDTTFGKKKIESVTDTGIQNILLNHLANYNDQPEFAFSPEGIDDMNKNIVSLNNGKFHQPIIKVRTYEPKGNKFNVGITGNKKDKYVVAASGTNLYFAIYLDNNGKRNFETVPLNIVIERLKQGDKPILEKKFDDKGNEFVLYDYLNPNDLVYIPTVEQNNNHNLSIDVLDKNRIYRFIDSSDTTANFVPIITSSLLFNVNKKEQEKIGINYPIQNEYGLGSPQSKNQKAITGEMIKDVCIKLKVNRLGNISI

SEQ ID NO: 7586 - protein, 1066 aa, unidentified
  REGION 1..1066: note = Description of Unknown: Cas Enzyme sequence
MTQQTQDYSLGLDIGMASVGAALLANDHIIALHVRTFDKAETAKEGESLNLIRRESRLTRRRIRRRSHRLLRLTRLFKRVGMISQATPQAFAIVQEVSTWQLRSEGLDRLLTPSEWAAVLYHIVKHRGFLSNRKSEAKADEKAGQMLSGVSANQVRMKAGNYRTIGEMVANDDAFIDAKRNKGGDYSHTFARLDLAQELTALFAAQRNFANPHATPDIEQQLQTTLMARRPTLSGDNLLKMIGKCTFETSEYRAPKASHSSERFVWLTKLNNLRITSQGETRGLFDQERALLINLPFTQAKLTYKQVRSKLTLNDSEKFVGLAYRHDKDIEGSTTLFEAKAFHALRKAYTDANLSTQWQRDSIDSKRLDTLAYAQTVFKDDKEARDWLLAQGIEPDIIEAVLDVSFSEFIRLSIKALDKILPYMAQGQRYDEAVQSAGYTHHSNLHAGEKKTRYIPRISKDDIPNPVVYRALNQARKLVNAIVKQYGAPSSVHIELARDLNKPFDERRRIEKDQKTFQETKQKDIQAFEDTFGRTPRGTDLIKWRLYREQFSQCAYTQKPLDLTRLFDTGYAEIDHALPYSRSFDDGMNNKVLVHTAENRNKGNRTPYEYMNGASNSPQWQNFVAWVEGNKNYRLAKKQRLLRKNFDGDESEKFRERNLTDTRYASKKFKELVETHLQLHSDSKAQRCVVVSGQLTSLLRARWGLLKVRENGDLHHALDAAVVAATSHGMVKRMSDYAKHKELAFVQSGFVDPETGEIPNIHAHEVMKEHFPEPWNGFRKELEARLSPNPAVFFPEGDAPKPVRVSRAPLRKGLGQAHQETIRSAKLLAKGEALSTVKVPLTSLKLKDLPKIIGYNDPRNADLIAAIEQRLRAFNDDGAKAFKEPLYRPSKDMSNAPLVRSVRLADTQKSGLPVRGGIAANGSMLRVDIFTKGGKFYAVPLYVADAVKKELPNKAAVAAKDESEWTIMDDSYQFLFSLNPNDWVRVRFKNAPVKEGYYAGFGRATASINIWAHDRNPAVGKEGLMSSIGIKTALAVEKYHVDMLGNLYPVGHEVRQPLRTPKGQKG

SEQ ID NO: 7587 - protein, 1221 aa, unidentified
  REGION 1..1221: note = Description of Unknown: Cas Enzyme sequence
MNKQILGLDIGTNSIGWAIIIEAEAKPQILGLGSRIIPLTPDEKSEFESGNAISKNQKRTLRRTQRKGYNRYQLRKESLKRKLVELNALPDYSLFKLSALELYGLRVKAIKEQITLPEFGRILLHLNQKRGYKSSRKDELKDEKETEYVAEVNSRYDRIKTKKLTIGEYFHSQISIDERYRIKDQIFPRAAYIEEFTSICEKQQKFYPDQLTEDTINQIRDEIIYYQRPLKSQKGLVSVCEFEGKWYKNKEGKEVFSGPKVTPRSSPLFQVAKLWESINSIAITSKRGDRLEISLEKKKELFTYLDNHDKLSEAELFKILGISKSEGFYGNKQLAKGIQGNLTKTSIAKILSVGDTIHPLLQFELSEDPYQRVDIHTGELMDSRRIKADVEKQPLCQLWHIVYSIPEEKDIVRKLVADFAIQEDQAILLSKLDFTKGGFSNKSAKAIRNILPYLQEGAKYSDAMTLAGYNHSDSLTKAQNLSKPLKDKLKLLEKNSLRQPVVEKILNQLINLVNAIIDQYGRPDEIRVELARELKQSLTERNAAFVNNNKRERENKGIAVRLQNEYRVKANRRNIEKWRLYEQTNGQCLYCGNKIELADFLNGDESDVEHIIPKARLFDDSFQNKVISHRKCNKAKADSTAYDYMLTQSAEHLNRYEESIALLFKDKRITKAKRDKLLMTEVKIPNDFIARQLRETQYISRKSREILQEVCRNVWATSGSVTEKLRRLWGWEEALMHLQVDKYRTVGKTEWVEFENNGKVFKKERIIGWTKRDDHRHHAIDALTIACTQQGFIQRINTLNSKHTRDEMLAEIKEVVYKEKLTLLEKLLLSKRPFDTAHIENQLSEIFISYKSGKKVATPGSRKVRKEGKRIVMQKSILIPRGALSEESVYGKIKVSGKESVKLSPDFDQAEAIINKIHKKLVLDRLAAFDNDPRKAFKGLFKNPIWVDESKTKVLTTVDVRSYNEEYVIKYPIQSLTVKDLPSIVDKRVREIIERRLTLFSNNPKEAFKDLENNPVWFNEEKKIAIRTVRCSTGLDAIAPVKFNERNEAVGFVKPGNNHHIAIYQDKDGKKIEHVVTFWDAVERKLNGLPAVIQDTKKAWDLVLSAKDDYEQDFLSKLPQDSWTYLMSMQQNEMFVFNLKPEALNEAIQNKEHGLISKNLFRVRKLTEGAYWFNHHLETEPKESLEDKKLGLCIQASMSSMSGIKVKIDTLGRITNVGDRY

SEQ ID NO: 7588 - protein, 1073 aa, unidentified
  REGION 1..1073: note = Description of Unknown: Cas Enzyme sequence
MDYTLGLDIGSNSIGWTVLGNREIIDMGVRIFPVGVKEDDYNKSGKEESKNATRRTARGIRRLYDRYKLRRKQLKKLLLSLEMLPPDTLLSARQIYGLRAKALDEQISLQELGRIFLLLNQRRGFKSNKKNKGSAETQKELSEIKEKMAQLDQLIHESGFRTVGEYFYSLFRRENELSDWRNPDEPVERIRNRFVFRKTYEHEFDCIWQKQKEYYPGILTNNNYKKIKENCIYYQRPLKSQKGLVSKCRFEPKKRVAPKSSFAFQEFRIWQFINNLRITGGNRFRDVLTLEEKTRLADAFAYEYELTVTKMKACLNFPKSYTFQNDLPQRIKGNTTNAKLATALGSTYYKALSDEQRYRLWHTLYFANDEEWLEKYALKKLHLSPEQTAAYLRISLEDEYGSLSVKAIQKILPFMKAGFDYPQACEEAGYHHSFDEETNGSDRELKEFIERDKEDELRNPLVQQAVNETIRLVNALIVEYGKPSAIRVEFARELKKSKEKREEQTRKMREKEEKRNDYRDFLKKRLHKETISNSELLKFELWLEMEFNERELQNISESIDLAEFRKFSKNVKPGDKQKYQLWLECGRVSPYSGKVINLHRLFSSDIEIEHIIPYSRCLDDSFMNKTLCERELNLEKNNQTPFEYFSGQPQQWSEFCRRISHFSDGKQAKFMTKEIPSDFISQQLNNTAYIAKQARKKLKTVCRDVTVTNGQATSKLRHLWGLNTILNPKGENEKSRHDHRHHAIDALVIAATTPGFIQDLSSHAKFDSLGKLTLKDIPPPYTGFRDEAKEKIATILISYRNKKRLITTKSNKYVHSRGNKTQQAISIRGPLHEETFFGMINNPHKQNKATYVIRKPITGIENEKHIEKIIDPVIRDLIREQVAQYGGKVKEAMAAGVFMLSKDGKKKIPVKKVRMEENAEELIQLRPNENPKLFVASGSNYLMAIYEKDGKRAFENVSFYEATKRKLVGKPIFPHEKDGKPFLMTVTQKDMVILYDTNPDEIDWSNTKQQFEKLYLVRKMDRNGYIALVKHNLTNINPDKKKLYPAGWTYTKTYSSLRAIKVQISVTGKLERV

SEQ ID NO: 7589 - protein, 1013 aa, unidentified
  REGION 1..1013: note = Description of Unknown: Cas Enzyme sequence
MASLRYRLALDLGSTSLGWAMIRLDAQNAPCAVIKAGVRIFSDGRNPKDGSSLAVTRREARAMRRRRDRLLKRKARMMRLLVEHGFFPAEEGQRKALELLDPFALRAAGLDRALTPPEFARALFHINQRRGFKSNRRTDKKDNDNGALKTAISKLRKALETEGARTVGEWLNKRLESGKTVRARFRQDRVIVDNKPRIDKHYDLYIDRSMIEQEFDVLWAKQAELNPALFKEAARLNLKDALLHQRKLRPVKPGRCTFLPDEERAPLALPSTQRFRIYQEANNLRMLRQGLREEPLTLEQRDTLVAALERHGKRSFIQIKKLLGIGGAVSFNFEDPKRQELKGNVTSAALAKSELLGEAWFSLDEGTQDEIVQRLIGDENETALVQWLVEKTGIDEARAEATAAVGLPEGYGSLSRKALALILPELRRGMVVYSDAVQAAGFDHHSNISAAATGEILPELPYYGQPLQRHVGFGTGVVSDSDEMRYGRIANPTVHIGLNQVRAVVNALIKRYGHPSEVIVELARDLKQSKDQREEESKRQAENQKRNARMRTSISGVLQVSEERVRVADMQKMLLWEELSFDPANRRCPYSGVQISAQMLLSDEVEVEHILPFSETLDDSLNNKTVAMRAANRLKGNRTPWQAFGEHATSGFSYADILARAELMPKHKRYRFGEEGYKQWLKEDAGFLARALNDTRHLSKVAREYLSLVCPQATRVIPGRMTAMLRGKFGLNDVLGLNGEKNRNDHRHHAVDACVIAVTDQGLLQRFAKASASAREQQLGRLVEDMPLPWDSYREHVQRAIERIWVSHKPDHGFEGSMFKETAFGIRRDGSVVQRVNADGETGRKIDYVVPIAAPKAAGRHGLDDKGLPRAYKGYVPDGNHCIDIFRNDVGNWQGEVTATFEAYEMVRSRGIEVFRNQATSLSGKPLIMRLMIDDCVRIEIDGRLRLMRVASINAAGRLSLADHQEANVDARNREQGGNWRYSYKQAGSLRTAKARRVTVSADGQVRDPGFKP

SEQ ID NO: 7590 - protein, 1043 aa, unidentified
  REGION 1..1043: note = Description of Unknown: Cas Enzyme sequence
RSDISHSAILSELGFKKDLFENSEKTFSFKLNYPEDKDFKGNETKALFRKVFRKLKMENECEAILGNKQKFELLWHIVYSLRNEEEISSALRNRKHFDLHEDVIMHLSKLPEFPSRFAAYSSKAINKMLPLMRSGKYWDEANIVNSIDKYAANIDALREKIKPRVASNLKNDEGVDKRESLLKQLEMLESVDKFQGIETFLSTYLVYGRHSERDNEDKYNDYSQIDVRTLLPYNSLRNPIVEKIIRETLSIVKEIWKQYVQPDEIHIELGRDLKKNNEERKKISDQSLKNENERKRIIAILKELNGANPESPMDIEKFQLWKDTGGENAKLEFTGLFTGTRETDPIKDKLDEYKKNYWEENEFNKEPSKSDIERYTLWIEQNHISPYTGKIIPLSKLFTASYQIEHIVPRALFFDDSFANKTICEAEINDLKDRRLAMLFIEEFSGKEIILSSGARTNIFTAEEYKYHIDKTFSGKKRRHFKLDEVPSGFLSRQLNDTRYITRTISNLLYPAARDLNGIIFTNGAITSELKNSWGLHKKWKELLKPRFERLEKITGDKLIEFDTTRQDFHFKKDYKRIDHRHHSLDALIIAVTSGQHIKYLNTLNALNADKKEWEKYFYLLKAEKRLKGQQNGVREFEHPWKTFPTDAFESLQKVIVSHKNNVKLVTAAINKYSKYVLNESTGNWEKKYNVLQVDPANGKTWNAVKKSMFAQPLGKSLIAEYKKDVQLEQAIKIQIDFIQKHKYQWDSEEYRIARSDLRKQIDAVIVKYGFEEKKIFSALNQTLHNTEGLPIETVDLLRFKSYATKRVAIDSSFTKEKIEKMPYANHPKNWLTKLLKEHLELNNNDPKKAFVGEGLEALYKKAPFPISKVTRKESGEKMEVKGKYVEGDKGTNMFFVINENIETGKREFYTPPLFSKAPEIGVIDRLANQLPIAENRDGYKNIILSPNDLVYVPNCDSNGCIIEDIKLIDWANISQEITGKIYKMISSNKGQCFFIPFYVSAPLIPTVELGAKNKSESSWDDKMIKKICVKLYVDRLGNIKPA

SEQ ID NO: 7591 - protein, 1116 aa, unidentified
  REGION 1..1116: note = Description of Unknown: Cas Enzyme sequence
MGATYTIGLDIGIASVGWCILGETHIIDLGVRAFDKAETAKEGESLNLARRSARLMRRRLFRRAWRLKKLTRLLKREGLIADAKLFKPEQPFATSLWQMRVDGLDRRLSNEEWARVIYHLCKHRGFHWISRAEAKQAEGNSKSEGGKVKQGLAGTARLMDEKGYRSAAEMVLAEFPDAQRNKQGEYRKALSRELLAKELALLFAKQRKFGNPHTSSELELAILGNGDQKSGLFWQQKPALAGADLLKMLSTCTFEKGEYRAPKASFTAERHVWLTRLNNLRIVTDGATRQLTEQERLLALPLPYRQAGDLTYKQLGAALTQAGLLEAGSFNFIGLAYPTEAQKAEGKAKDPESATLVKIPAWHELRKTLTNNGVGLDDEWKKLSGDALCGQPEIFDKIAWVLSVYKDDDEVRAELAKLALPNPQAMTEALLNIRFDKFHALSLKALRAIVPHMEQGLRYDEACVQAGYHHSQLHKVGEGEHKYLPPLYDGRDSDGRMIFAEDADIPRNPVVLRSLNQARKVVNAIIRRYGSPSAVHIEMARDLSRPFDERNKIKKDQDEYQARNQRDREQFIELFGHPPKGLEFEKWRLYREQNGQCAYSQRPLTPSGNVAEIFLDGSTEIDHALPYSRSFDDSKNNKVLVLTRENRDKGNRTPYEYLGGAENSERWQRFVSFVESNKAYRLAKRTRLLRKDFGAKEAEEFRERNLNDTRYVCRFFKNYVEQHLKLAEGSEAKRCVVVSGQLTNFLRARWGLLKVRADSDRHHALDAAVVAACSHSMVQRLSNYSRTRELEQVRDGFVDIETGEIVSPAMHQQLREHFPDPWPYFRHELEARLKIDSPELLREEMARLGSYTEEELATLKPLFVSRAPQRRNGGAAHKDTIYGQPEKLKKNGSVTQKVTLASLTLKDIDLLADPHRNAKLYGAIRERLEAHGGKGDKAFPTANPLRKPDKEGNPTGPIVRTVTKVIDKLSGIPVRGGIAKNDSMLRVDVFTKGGKFHLVPVYVHHRVTGLPDRAIVAFKDEEEWTPIDGSFDWCFSLYPNDLVQVKLKNECYQGYYAGSDRATGAIGLWAHDRNANVGKDGLMRLGVKTASSVEKFHVDTLGNIYPAPSEKRRGLA

SEQ ID NO: 7592 - protein, 1031 aa, unidentified
  REGION 1..1031: note = Description of Unknown: Cas Enzyme sequence
MKYRVALSLGLGWLGWAAIRLDAHGRPMAVIRAGVRVFGDGLDPKTGEPLGAQRRDVRARRRRRRRQVRRKDRLLALLVQHGFFPAEPQARRELERLDPYELRARGLDQSLAAHELGRAIFHLNQRRGILLERDLGGHADESDGLQRQAVQATREAMQRTGARTVGEWLNLRRQQGLQTRSPISRRLMRVRDAPPGEPRAAAEADRAGEAGSPHLPPLADRTMVAAEFDLLWERQRAFAPAVCTEAAREALRETLLHERGRMRPEPGRCMLLPEEPRAPAALPSAQRLRILGELQAMRLRWRGSPGEVGLSPQQRDKLLEALDRTVSMNFVRLRDLLDLPADAHISGSGTGRHDIRGNATSALLCKAAAFGKRWAALPEPLQDETVVQLLEQTDPAALVRWLQAHTGIDAETAERVSALRLPRGSAALSRAALARVLPPLRAGAAGLRAAAQAAGLPWPAEDSVPAHPAGAQAAGESLPYYGVVLLQHLRHGTGRAEDDEEARLGRLGDPSLHIGLNQVRLVVNALVERYGRPAELYAEIARGLKRSGEQRRRDLRRQRYLQGEAQRLRETAAARLGIDPTEVGPALVQRLRLWQELGSEEVDRKCPYTGVPLSAEMVLNGEAVVDHILPFSLTLDDSLSNKTLTTRAARRAKANLTPWQAFAGAAGDATGAPFGALAPGGARLAADKRDRLRWDGLETWLRGHADGVSRALEDDYAASHLLRRYLQHLCPGAVRVVTGRLTALLRQQLGLNDALGREPPAHLHDYRRHAVDACVVGITDEPVLRRLSRAAERAREAESPRLLEGFEPPWPTFVQHVRRAAQAVCVSHRPAHGHQGALHRDTAYGLRESGEVSARSPGQPDRQPVVQNLNVIPIADARAAHRHGLDESGRPRAYKGYKSDSNCCVEIVADAEGRWQGEVLTTFDAYDIVRRHGTERLRHPSVSASGKPLVMRLFKGDCVRVNLRGQARLMRVRMITQDGRIHLCEHNEADVKRRMEAGDKSLVHTLVSADSTRKWGARRATVSPLGEVRAG

SEQ ID NO: 7593 - protein, 1116 aa, unidentified
  REGION 1..1116: note = Description of Unknown: Cas Enzyme sequence
MKISPDLHLAFDVGHSSIGWAVLQHDGNRAPNLLGCGSVIFQADDCLASQRRQFRRQRRHIRATRLRIARMKRLLAHLGVLTQPQLDKPGCAWPWLLAARVLRGGDKLTWPELWDVLRWYAHNRGYDGNKAWSAHEADIAANEEDTEKVENARALYTKHGTRTMAETWCSVCGLDPLGEKKSVALPGHLRPRGLNAAFPREDVEAEVERILRAHLGGLTGMDESLITALLRDHTAVAGVDLHLPRRYGQILADWSRSPGGVLFGQLMPRFDNRIIARCPITWQRVHDRMLAEGKDAERAKHEADKLAKVPAKDCPEFYRFRWAMQLANVQIATGVKRDTRPLEKDERAKVNAVMEATGFLTPGDFKKTVREITGTKLDNLDQMLTHPDAGDALILDPARKAVASGVWERLFPTFDERVRKHALTKLRRGHSLRLGDLVVAGDAEKFNAAADALLTAANTKKARGQRVSTREELLALTVSAKLPTGRAPFSREVMYDAATFVFDTGRHPTEGTEKSKDNGPLFRSEAIRHAQLQRAIDEQTNNHLVRHRLRLLEKLHEDLVKSPDYANGDSLRIARIAIEVNRDLRELSGKTAKQVAQDLGQRLANFKSVVARLEKAFDGKNVRITPGLIRKARIAEDLGWKCPYTGQSYDEFDLLHRKVDKDHIIPRSDRASDSLDSLAITFSAVNKMKGKRTAALFIEECQSQPVEGMANVSIRPLNDYKAFVEKLETFKGHDDDKRRKKRRKEKLLLRDYVEKTFTPGDLTQTSQLVRLGAEMLGRSYLGAQKPPVITSIPGSVTGSVRKSWDLIGCLATGNPGVINPDEKDEHDRPKLRTKTEIRDITHLHHALDACVLGFADIFIPRDGGVWELLVQRRLDAGQQAQLRKGLGTMISFSKAGQPELQELPKVLREQIRRRLAERRVVQHIPAEIAGLSVEQNAWRVVDVKDGVATIRQRNRQPDGSRPQKQTTEKVSKLLGLSPDRKDGGEGKLAKLKAALVIPSNYGLALDPEPEIIPFHKVWNRLRELREKNGGKAVRVLRNGMLIQIPRGNYEGVWRIFSAKNNTSGMALDIGRSDVVRLRNKTEGHKINVLLSTLIRDGLKILPSILTGHAAVEKKKE

SEQ ID NO: 7594 - protein, 1283 aa, unidentified
  REGION 1..1283: note = Description of Unknown: Cas Enzyme sequence
MISRNYLLYLQNGGREAAHAKWLQAPFYASKVSLGIDIGLEGIGIYLRKGRDEVFAKTVDVSDVLPGANALEKRRLLRHARRNRANKRTRLSRLDALLAKHGLPLPWQDNKPAYEHSDPFKMRHRAIRQEGNGLESKEALAIAIRSCVALRGYDYGRFSEDGEHPWGRSHRLADALKWLTTATIDDNLAERLQEYVQRRELAADKKATDAKWAEFEEEIARRLKVSNEHTLETVLRDHFKGEKHDNLRQKARGFAFPRHKIWEHLVHIVRRHSAMIDDAEGFLAALGLDPDDKKQFPDVKAATAAREKAIFWYNRKSLPEMEAHWAKKRKDCPYAARLGLGDWKTSPRGHRALRLWAMLEFGITRRVEITYKDAEMEKAAKAAKQKVDKKKCHKEFLHVLTPNAVRALVGLVAGQYGDAPDVLVLDKERRSEAKKRAREIIEEDIEKYSGIAAELNPKPAAMAKESWNESFFDQLEDIVAPNAIGGTGSLYHATAERLFNTATADGADFTAEGYNRRLVELEFYDWRRESVLDWGVYPQVEFLLGRRVKRGERKGEVSRSCQGFLRHLFSGFQVEGHPLKGIIAPDFVTVEVVGDPPRTQKQKDEILKEHKKKRDERREAFDKSPYADSGVASRRRRMALHGQQKGRCPYTGETLPDDPLDSRLEIEHIYPAEMGGLSVDDNLVLTFRQTNGLKAKQTPLKWLGENRLRELAAKNADMRWSALKREVFMWGTRREDDPAGKWPKNYDDQGQLLVPDFGNMTRTAQLARQLNAAVADWLGIAKQPEEMAKRIATPSGWLASQALKSWLPDYRKDRADLTHHLIDAAVLSHIPPREGMNSVHCGGIFYSERVSEINPQKPGEMTDRLVTRALPGLLDVASIQHWLPGESREYAQCPVLLRKSRSKTGSLGDSTFWRQADKDKPDLAQREGSPFNPADYKGNPDKLWRLLRKMGINERKDRQWRARNQRKGLPPPPFKDVLPTIQDIEKYLEAATATLQSERGQTPPVVLRLRDGKDGKPWTPITKIWKWNSKGSLGKGLGWSGRLNEQGTRTALRSLELKYDRLEVWLGYDIEIAQKARKKGDLAWEAAGWQYQKRLIPNVTALKHLKQLGLRYDRDSRSPAPAFMQNKPEKVETHQTLRDLIQGKRLLPFSKRVGAVRRGDVFKVNYDHEGSLTNSEADKVWSTFLKVTSTTGDNRGTIEMACLLISDKKLTPLKECKQDILSRKAGVAADLAALLDLPSAFDMARSLIAMGKLKTPTVPDDPSPDTPRGRGRRAAPAGEADLL

SEQ ID NO: 7595 - protein, 1362 aa, unidentified
  REGION 1..1362: note = Description of Unknown: Cas Enzyme sequence
MHKTLGLDLGTNSIGWAIRDISEPENQIIDKGVLTFEKGVGEGKSGEFPLVQKRTESRSKRRNYQAEKYRKWALLDALIENKMCPLKLEELDEWRKYTKGIARRYPQSDKFIEWLRFDFNGDGKPDFEIFGFSKHENHYLFRMLAVSEDPNHKRIFEENPHILGRVLYHLVQRRGFRGRDEEEARTIMQGSKESGTVGVDAIIPFIQKYKTLGAALYHLNKEKNERIRKRYNLRTDYEQELKEICLVQNIDEDVHKKFWKAIIWQRPLRSQKGLVGVCTFENNKPRCPISHPIYEEYRTWVFINNLKIELPDGIDRVSYLTEKVYPLFYKKDRDFKLGSIVKELKKVGGGIRSKFQYSDADDERKKHEEKKNNETKVVSSTLLNNFKDLLGDDWQERYSWHESLQNQPKTSTYSIEDIWHILFTFDSREKLFSFGKEKLNLNDEDAEKFSKIKLQQGYATLSLSAIKKILPYLKQGFIYSHAIYLANLHKVLGKDQILYEEALGFSTTLKHIFAESQEEKLLMGAVNGLITDQLSSETRYGMNVDYQLDSDDRNDIEKKLEDIFGIKTWRENKTEEERQKSIDFVSHKYLEFLRRSINFKKADLFNKPERLFDKIFNHLHETYGTPEERKKYLWHPSEQETYPQANKKNDIPQLGDPQPISRGFKNPMALKTLHKLKSLLNYLLQTGKIDDDTRVVVEIARELNDANRRKAIERWQRERERENDEFKKMIQENPEAANFNLDITKKSIVDKYRLWIEQNRMCLYTGAMISFSDLFNGIKFDFEHTIPASISFDNELKNLTITDGLYNRQVKGNKFPTQLPNYDRDASIDGRMYSAIKPRVEFMEKKVADLETLFEEWTNKTKFASTKDIKDACVQRRHLIKFDLDYWRKKLQTFTLTEYKAGWRNSQLRDTQVVTKYAIPYLKTVFHKVEVEKGSVTSDFREIYGIQPRKEKKDRSKHSHHAVDAAVLTLIPPAAIRDQILLRYNESKDKHQNITHHEPVKNWSNFQPYHIISIEDEVLINFQPQQRTLVATYKNVRKRGKQQFVKSKTSEGKWQYKLSVNGEKIPLVAKGNTIRGQLHKESFFGAIKQSGERLLVERYPISSFTSINDCKHIVDDKVRQVVKETLEKRIGEGQPFDKAKLEPIPFPSGKEVIKKVRCKVAAGRGYLTPEKALEIKKHDSPSRHDYKQFVYAQNEENTLCLFYEKITDNKTERAFRVVGLYELAQLKMKNLEELKGEKYYQTTEAGRGKNKVEIPLSHIITVGTKVILYKESKEELKELIRKDILKRLFRVYKFNEPAPSTVYIYIQNHIEARTNEELGNGEKDVDLDKYQPRIFLNSSKFNCAIEGKEFNIKPDGEISWLF

SEQ ID NO: 7596 - protein, 1157 aa, unidentified
  REGION 1..1157: note = Description of Unknown: Cas Enzyme sequence
MQNISKQNYRLGLDLGTNSIGWAILGLNENNEPYKILDAGVRIFSDGRNPKDGKPLAVARREARSMRRRRDRFLARKSKLMNCLIRLGLMPQDEIERKKLESLNPYQLRCKALDETLNSSELGRAIFHLNQRRGFKSNRKEQVSDDKKLSETKQNQEDLAKKIVETNSRTLGEFFYKERILKELTARAKPDESGLYPTRDMYENEFDEIKKAQFPSQKLSEENWQEIRKIIFDQRPLAPQEKGVCRFVNNHNYLPNWAAEIFENYKKLSKKNEAAKGLPRAYLALPSYQRFRILSEINNLKIIKNNREEISLDATQKRKLVEYLHQKKSANFSLLRKQIGFGAEEFRFNFEGGKRDKFDGNATEIFLKDPKHFGEKWHNFSLQKQDEIIEFLLDSEDENQIYQKALNAWQLSEEQALAVKKITPSNFKSGVGNLSKELLQKLVTEISEKNCRYDEAIKNLGFHHSEKEFGEIKDQLDYYGKVLQASIVPVKYGSKEEIDFGKIANPTVHAALNQLRKVVNAIIKENGNPSEIHIELARDLKISKDEKRQIEKNQSKNQKENEEFGKELERLNQRNTYDNRLKLKLFRELEKSNNGVACCPYSGRLINITNLFSHDVEIEHILPFAKTYDDSIVNKTIAYRSENQKKGNRSPFEAFGDATFERIKNLPKNKSWRFYENAMEKFKDESGFQERQLNDTRYLSKIARQYLAQICDYNKIKVANGKLTALLRHNWGLNSILNPNLDKQENQANEAVIEDLAEEIIDAETGEVFVEKTKKIEKKNQKPKNRDDHRHHAIDAIVIAMTETRLLQQLSRDNARGHDLNRLIINVPSHWNRFREDVVEAIERIIVSHKPDHGKNGQFHEETYYGVIDSPVTLERKDGKDEGYNFVYSKPLAGLSENEIERIRDQKIYQDLKKRLAGTTDKKEIADILSNYKIQTKNNEIKVKNVRLLKKENRFSIISNKQLTLQKKKIGGVEEKTHTKAVVGSNHHIAIWELPKLSFLPLFHLKGKKLEATLDKLSEAEKTKFERFKAHQEKTKNWISKDCEYAVSCTSSFEAAKDDENLFKPHPAAKLLTKIHNGDLIRLKLKDLEVVAKTIKLVPSNDGIALLKHNETGKEVKQIWLSFSKFKESELTKIFITPTGKVFDSGPILKTKNPQEK

SEQ ID NO: 7597 - protein, 1341 aa, unidentified
  REGION 1..1341: note = Description of Unknown: Cas Enzyme sequence
MKKPYSIGLDIGTNSVGWAVTRDDHDLIRRRMKINGDYDKGSMKKNFWGVRLFDEGVTAEERRVNRTTRRRLRRRKNRVHYLQSFFIDEMKKIDENFFHRLTESFIVPMDKDHDRHPVFGTMEEDVAYHNQFPTIYHLRKHLADTDEQADLRLVYLALAHIMKFRGHFLIEGELSTEHASNDAVRETFKAFLHQYNQAFHLQSDDTYINPIPEDISVEAELTAKVSKSRKAESVLHKVETEKSNGTFHQFLKLMVGNQGNFKKTFSLDEDRKLDMGKEEYEEDVESLLAEIGEDYRELFLAAKDVHDAIELTGILDGAETHTKAPLSSSMIARYNEHKQDLQALKTLVKAERPDRYFDIFRNKIKDGYAGYIEGKTTEESFYKLMKKELNKVDGAEVLLKKIDEERFLRKQRTYDNGVIPHQIHLHELKSIIENQGQHYPFLLDNKEKIESLLTFRIPYYVGPLAKTKDQSEFAWIERKGHEAVRPWNIKNEINLVASAEKFIEKMTNSDTYLPDEKVLPKHSMLLQKFNVFNELTKVQYVDDQGQRRNFSSEEKQDIYQNLFKVHRTVSLKVFEDYLSNDYQLENPKVQGIEKKFNASLKTYHDLLKLGISRDTLDNEAYADRFEDLVKILTVFEDREMIRKQIEGFSDLFDQVTLKKLERRHYTGWGRLSAKLINGIKDERTQKTILDYLIEDDGPKKNINRNFMQLINDDNLSFKKTIEEARLNLESNDLKDAVDQIPGSPAIKKGILQSLKIVDEIVGIMGYEPESIVIEMARENQTTSQGQRNAKERLNNVESALKELKSDLLKKHPVDQDMLKNDRLYLYYLQNGRDMYTNQELDINKLSSYDIDHIIPRSFTTDNSIDNRVLVSSKSNRGKSDDVPSEAVVQKMKPFWTTLYRSKLISKRKFDNLTKAERGGLTDDDKAGFIKRQLVETRQITKHVASILHQRYNNPELDEPAVKIVTLKSALISQFRQAFSLYKVREINDYHHAHDAYLNAVVARLLMSIYPQLIPDFVYGEYRKTSAFKVNKATAKKQFYTNLIERFSKEDKLPDENGEIAWDKARDLAKINRVLSYHQMNVVKKIETNSGQFFDINIKAKGANNKLIPIKEHLDVTKYGGYGSPYIAYSIIFTHEKGKNAKVVNEILGINIMDRTLFEKDREKYLKDRGYVNPIFKYKVPLNTLFEFEDGKRRILTGASELQKGNQFILPRHLVNLIYYCNKYVNSQFKNVDYENYIYDHKHQFSELLNCVLEFGQKYVLSFSKVEKIRNAYNESFNQSDIKEIVASFITLMDLNKMKPSADFNFFGVKIGETRYRSTREVLTSKIIYQSVTGLYETRKEV

SEQ ID NO: 7598 - protein, 937 aa, unidentified
  REGION 1..937: note = Description of Unknown: Cas Enzyme sequence
MMNAPDIQLAFDVGHSSIGWAVLQAPPGQNPELLGCGAVIFQADDCLASQRRGFRRQRRHIRATRLRIARLRKLLAHLGVLTSAQLEAVSSSSPWFLAARVLRGGAKLTWPELWDVLRWYAHNRGYDGNKAWSRNEADVIAVKEDTEKVERARGLLADFARKHGREGSMAEVWCDLSGLDPLGSKTSCALPGKDRPKGQNAAFPREEIEREVLAVLRSHFDHLPRVDETLLTALARDWQAIPCPEIRLPQRFRGGLLFGQLVPRFENRIIATCPITYEHVYQRVLRESGDAEKAKHEATKLAKVPAADCVEFFRYRWAMQVANVLVQTADPKRPRRLSIAERRALDRRMAERGALTKGEFAKSIEELTAKTPSNVKQMLLHPDADKALVVDRAQRELTSKDIAPYFATLPERLQKRLRGQLRHGAVRTLGQIRDDLAAIGDPSAFDALLAVEVDGTETKRSKKTKPVTRADILARTVRIEPVNGRAPHSRVVMRDVVEFIFSTDRHPAEEGGPLYRSEAIRAAQLQRAIDEQTNNHLVRHRLKILERLHDDLLKTYACDDKVRVRNITIEVNREVKQLSGRSAKDIAGELTKRLGNFTGVTQRLAKDLAGTGIRITPGLIRKARIADDLGWKCPYTGASYDAVQLARRAVDKDHIIPRSDRASDSLDSLVITFAAVNRLKAKRTATRFIEEEQGKPVPGATHLSIKTLANYTRDVEALETFKGHADDQRRKKNRKRMLLVRDYVEKEFTPGDLTKTSQLVRLGSQALERHYLDSAERPVITAIPGFFTGTVRKSWKVLGCLATANPQVLNPDDLDEDGRPKVRSKTEIRDISHLHHALDACTLAFARHFLLHDGSAVELLTKRRLNADDRARARALFGSAIEITAEGDPRLADLPRPFKEQIRTRLAERRVVQHLPREMAGMRAELNAWRVVKVEGD

SEQ ID NO: 7599 - protein, 1396 aa, unidentified
  REGION 1..1396: note = Description of Unknown: Cas Enzyme sequence
MTTKTILGLDLGTTSIGWAFVKESDGDGNVSSIEKIGVRVNPLSIDEQTDFEKGKPISVNADRTLKRGARRNLQRYKQRRENLIDALIKSNIISTETILAEDAKGTTHETYLLRAKAVSEKISKEEFARVLLMINKKRGYKSSRKAKNDDEGQAIDGMAVAKRLYAENITPGQLAFQLLKESKKYLPEFYRSDLLSEFNKVWDFQKQFHPEILTDEFKKEIEGKGQRATSASFWNKFKFNIAENKQKTRVEKKLKAYEWRTKAITEKLEKEDVAFVLTEINNDLNKSSGYLGAISDRSKELYFNKQTVGQYLYAQLVANFHTRLKNQVFYRQDYMDEFEMIWEEQAKYHLELTAELKTEIRDIVIFYQRKLKSQKGLISFCEFESKEIEIEKDGKLIKRTVGLKVSPKSSPLFQQVKIWQILHNIEFRNKITKERVFPDLASKQLLFEELNIKGNLTANKITELLGYKTKDWELNYKEVEGNRTSQALYEAYLQILELEGYDEDLFKIAGKDEIKLADINTSSNEIKNMVKTIFETLGIEVSILDFDAEIDGKAFEKQSSFQLWHLLHSYEGDDSNSGNETLYALLNRKFGFKKEHAQILANIIFASDYGSLSAKAMRKIFPYLKENNYSESCKLAGYNHSSSVTKEENEKRPLKGKLELLKKNSLRSPVVEKILNQMVNVVNAIIEDPSLGKPDEIRIELARELKKNSKERAEMTLNINSAKIENEKIRKLLSQEFGVKNPTRNDIIRYKLYEELKGNGYKDLYTNTYIPQEKLFSKDFDIEHIIPQAKLFDDSFSNKTIVPRQVNLDKGNQTAYDFVLGKYGAATLEEYLLRVELMYKQKEGSISKAKYQKLLKQGKDIGDGFVERDLRETQYIAKKAKQMLEEVCRKVISTTGNVTDRLREDWGLVNVMQELNFEKYKTIGLTELVEKKDGTFKERIKDWSKRNDHRHHAMDALTIAFTKHSHIQYLNHLNARKDEDNKLHNHIIGIENKETELVIEDNGNKKRRFKQPITNFRLEAKKHLESVLISFKAKNKVVTKNKNKIKSKNGEKVKIELTPRGQLHKETVYGKLQQYVTKEEKVGAKFNEEIIKKVANKKQREALMQRLTEHAGDSKKAFTGKNSLDKNPVYLDEQKLQVVPDKVKLVFMEADFAIRKDITPDLKIDKVIDAGVRAILQKRLDEHNGNAKTAFSDLDKNPIWHNQEKGIRIKKVRISGVKNAEALHSKKDHLGNDILDANGKPNATDFVSTGNNHHVAIYRDAEGNLQEKIVSFYEAVERVNQGLPVIDKKYNESLGWEFLFTMKQNEYFVFPSPSFNPTEIDLLDARNNKLISPHLYRVQKIATKNYFFRHHLETTVEEIKELKNMAYKPQLGLSAINNTVKVRLNHIGKIVKVGEY

SEQ ID NO: 7600 - protein, 1350 aa, unidentified
  REGION 1..1350: note = Description of Unknown: Cas Enzyme sequence
VTTILGLDIGSNSVGSAWVDTEERNIRVGVSVFPAGVEEKDDGRGAPKNQKRREKRSMRRSLARKSSRKRNLRALLKEHGLFPSEPRQVLELMKTDAWRLRAEGLGRELTPFEFGRVLLHICQRRGALGLKLPDSEQDDDTGKSKADVDEDGKVKEAIDATRTAMQLHNATTFGELMATLAQSRRSPVMSVDGKPKLNGSGLPITFSHKIRNELGNFEFHADRQMLRDEFVRLWETQIHFQSELSSILTEDLKRQLDDPTGDEVWRHRGLLFGQRRTYWKTGTLGRCKLEPTDECVPIADRHASFYRVVETVNNIRIRGPQDHNFRPLYSDERQKVIDRLRSQKSGTVAAVRDALGIGTKSLKKMGIPPEAYALNLERDEDREINTDWFYRAIVVEGIGEKAWEAWGENKREGLNRAILRFDPSEEIDTQKFASVAKKLGLDSEKLDRLLAQWRTRPKLEKRLKLSRRAVLNLLPYMDKPDTNGHWPTQIEARMGLANDANAMDRTSIQPITSKQRERYSLGANNLSKRDRHYLKKHPEMVLPPAPTLTNPVVRKAIHEVRRHVIAHIRASGSKPDRVVIEFARETTKTAKQNDQILARNRFREKYRLGIRENVIRAAFGAMYDSLSTNQLRAAEDRVILCEQQEKNCAYTGQTITPMQAALGNGLEIDHIVPYSRCGDNSLNNRVLCYRDSNRNKLNQTPREWWGAAFDEHIRPMRFMDGIGKNQIQPYFSKRDYANKWKNLSAENVPSEWKGNQLSDTAYAAKEVEAYLQQSLWPDEPSFLAGDTRRRISVTKGAYTAQLRRDWQLYRQRSGDADNRVVRDLLAAKDRGDHREHAIDAVAIAFTDGSRIQALAAIMTHQQNAWIRAKNQGSKPESIKRKPLDPPWGNIQSFRREVLSLIYDDFDDIQEKRDTGSSNRAIVVSHRPVGRKLVGRFHEDSLFGSVPDDKKLYTGSIRIADLKPNHLRMPVPEKEEDAICRLAERYLKSKTVSNPRDAKKIAKEFVASKAYVPRLVDPPPEKSGLIRDIGLRNQVRSAIEDRLRRCGIDRTADSFTASDLKKILNPVNSDTGRPQFSPLTMNSGVPIKRMVLLRTMNDPVIVPRRRWNEELMEWEIDESPKASRAYVGGNNHHIEIRTNDKGVWSGEIVSMYEAARRARVQKTDPVDRSYDPNRGGAFVLSLAEGETVYMRHKQTGVPGYFVVVKLVKPATIEFKAHWDARRATGEKNEQGELITDSARAAIPVSAAQLAGLAAPGEGTPIKVLVNPLGQIQRVEPLPSREDQLVEVDPRVLLIAREAVVARRSKNELKGSRRKRKHGSWSWMRARLKREKLEHLAAQLSVAVRLLDRENS

SEQ ID NO: 7601 - protein, 1041 aa, unidentified
  REGION 1..1041: note = Description of Unknown: Cas Enzyme sequence
YGKFREDSEPKLVWKPNGKKENGKDKFEFLFQDLFNEMLEEFKKTQPQLFYLMANGKETKIPYDWTIYYLRKKALTQKITKEQLAWLLLNFNQKRGYYQLRGEEEEINQNIKEYVALLAITKVEKGEIDKKNNKRTWYKMTLSNGWEYSAPFTNEPRWLNKEKEFLVTEEYENGQIKIVKDKKTDSTGKEKRRLNILPTFDEINVMAKKEQDKIYGKIKARTELTINNSDTTVGAYIYHSLLQNPKQKINGKLVRTIERKFYKEELKQILEKQVELQPELFKDKYNDCVSELYRSNESHQQQLNSKNDFVHLILNDIIFYQRPLKSKKSSIGNCSLEFKKFKKKDKDGKEIEVKEYLKCIPNSNPYFQEFRVWQWLYNLKIYTKIDDKDVTSQFINSNEDKEKLFSFLMSKKEVDQKDILKYLFANKKAKEQKEEIAKYRWNYVYDSMSDESKKYPMNLTGYEIRKQLENVVNIPESFLTREIEQQLWHIVYSVTDKNEYESALKSFATKHRLDEISFVESFRKLVWTKKEYGSFSEKAIKKLLPLLRAGKYWSFNNIDDITKRRIANLQTGEVDESIKERVREKAIHLTDNNHFQGLPLWLASYVVYNKHSEGNEKDKFGKTIKDLQKYLEEFKQHSLRNPIVEQVVTETLRVVKDIWQHYGKGADNFFDEIHVELGREMKQTAEQRKFQTNTVTENENTNLRIKALILELKENSDGRLAVDNVRPFSPIQQEALKIYEAGVLNSNIEVPEDIAKISKSAQPTKAELTRYKLWLEQKYRSPYTGQIIPLNKLFTPAYEIEHIIPQSRYFDDSFNNKVICEAAVNWQKDNQLGLEFIKNHKGEIINTNHGNNVKVFTEDEYKKFIEENYAKNPKKKSNLLLEEIPEKMISRQMNDTRYISKFIVSVLSNIVREDKNDEEFNSKKIIPGNGKITSILKQDWGLNDAWNELILPRFERMNELTKTTAFTSKNKEGHTIPSIPMELSKGFQKKRIDHRHHALDALIIACATRDHINLLNNQSAKSENTRYDLQNKLLNKEPWKD

SEQ ID NO: 7602 - protein, 1073 aa, unidentified
  REGION 1..1073: note = Description of Unknown: Cas Enzyme sequence
ELIKKEGKKWDLNYKSKTTITANPISARLKEIFGTDFLNIQIPKEKQDKNGVNYYNIEDIWHILFSFEDLEYVSDFANEKLKLNEEQTKQFVTAWNATPVGYAMLSLNAINKINRFLLKGLIYTEAVLLANIPELVGKEIWDENEELLLNEIGTLISENRHQKQIINIINNLISKHKNLDAGLKFGHKDNTYKLDQSDLKDITDTCEETFGTKTWNEKSDIKKTEIFDIVKSCYQSYFQSKDLEIKYIKEEKHFIVKVNNKQFYKTETGFYRVPKLKDTLSDFLELSFNLSEKQLNNIYHPSEINIYPPAKEDKKGELKLGSPKTGSFKNPMAMRTLHELRKLINYMIETNQIDQETRMVVEVARELNDSNKRWAIETWQKRREEENKEYAQAIQALIQNEKGIKADSNSNDDIDKLRLWYEQNNNDKETLPPVADGKKDVKQMKWQDSTKESYKDIVTKKELTDKYRLWLEQQCACMYTGKIIKLTDLFNDNIIDFEHTIPRSISFDNSLANLTVCFADYNRNIKKNQIPYNLNNYESEFGNYTAIKPRLKNWEEKVERIKQQIDFWKTKSKKAVEKKWKDDAIRQRHLWQMELDYWQNKLDRFTMKEVTQGFKNSQKIDTQLISKYALHYLKTYFDRVDVQKGSITSEFRKIYGLQVADQKKDRSKHSHHAKDAAVLTLIPMAAKRDSILQEYYNSKEKNQAYSTEPYKGFNREFVWNIDDSILINNISNNQTLTPAKKIVRKRGKIQFIENTKKPKIATGDCIRGQLHGETFFGAIKLAQKDKDGKFVKDKNGNLLQEEKIKFVLRVPFQYKNKADAPGFKTLEEIEKVIVDKHLYNQIKKQVEAAGSLKDAFEKGIYMFNNKNEKENEIRRIRIFKPVTEPLKIKKQTYLSTHEYKQHYYAGNTTNSFFALYEGDEKNDFDYRTLFDTAKIKTFNDNISKEDLFEKNIFLTKGKKITSLNLIYILQSELKVIFKRDKNENLKTLSIVELSKRLYKYSNYEKNGTSARLNFSYHLEARNSSKDITEDYIESEIDFNIPKPTLRFAYSKYYFIVENYDFKIKMDGTIEWLF

SEQ ID NO: 7603 - protein, 1079 aa, unidentified
  REGION 1..1079: note = Description of Unknown: Cas Enzyme sequence
METRASPDYVLGIDLGSNSLGWAMIGLEDGQPAKLLRAGVRVFEAGMEGDIESGQEESRNLKRREARLHRRQLWRRARRLRRVFNLLQRFGLLPPGEGSLPEKRQDFLNELDKTILSSPWFAAKKISGVYPEPEQTLPYILRAAALDERLEPHFLGRALYHLAQRRGFLSTRKKAKAAKEEEEGVVKQGISDLRRKMEEAKARTLGEFFARIPPSEERIRGRWTARPMYEEEFQQIWNAQAEFHGELPTDERKKLLFQAIFYQRPLKDQPELIGHCELEPEERRAAAYLVTSQRFRLLQTVNNLTILPPGEPEKKLTPADRAKLIEALELHGEQTFPHIRKLLGLTRNYGFNLERGGEKSIKGNRTNADFYAVFGDRWSRMSPEERQRAILDVHSIQKPETLVRRAREYWKLDEEAAQRFCDISLEPDYLNLSRRAMEKLLPLLEDGITYGEARRLLYPERFQAVEPLPLLPPVQDALTEIRNPAVTRCLTELRKVTNAIVRQYGKPGEIHIELTRDLKQPKKRRQDRADRMRANEKARKAAAKRIVEEAGISDPSPDDIRKVLLAEECRWECPYTGKSISMRKLVGPESEFQIEHIIPFIRSLDNSFLNLTLCHVEENKVKANKTPYEAYSGDPERYERILERVKRFQGDKGIVAQKLHRFLMTPEQVEEFLAGFTARQLTDTAYASRLAADYLGLLYGGVVDQAHVRRVQATSGQVTAYLRNLWLLNTILRDGETTHGGYATKPRDDHRHHAVDAVAIALTDAGTVKQLSDAAQRAPLERRRRFASLQAPWPDFVDSVRQEINRIVVSHRVSKKVSGALHEETIYSAPVAAGGTCPDLIGSPPGATLKGGATDVRHVRKPLASLTKTEIEDIVDPGVRQRVLDKLEELGGDIKKFTKEENLPFLLAKDGRRIPIKRVRLRKKTPTVTLGEGRRAREVTPGSNHHIEIFAELDEHGEEVEWDGQVVSMFEAHQRMKAGQPIVQKDQGPDHLFKFSLAQGEVVECDDKQQGRSLFVFRKVTQFTAGGIQIGFAPLNDARKAREIQVSRAWLWATPNTVGERHARKVAVSPLGEVSEAHD

SEQ ID NO: 7604 - protein, 1197 aa, unidentified
  REGION 1..1197: note = Description of Unknown: Cas Enzyme sequence
MYKFLAMKKILGLDLGSGSVGWAFVHESENDQEQSKIIKSGVRVIHYGDNVVKKDSQGNISESREPMKDFEKGMGLSLNAGRTKMRGARRNLQRYKLRRENLIEILQQKGLIKEDTPLNEQGKETTHETLRLRAKAATDPIAMEEFAKVLLMLNKKRGYKSNRQAQGEDSETSIDSMKTAKLLYEENLTPGAYAFKLLSEGQKVLPDFYRDDLQQEFDRIWDFQKQFYPAVLTSGHHDEIVGLTRKDTDLYFRINLDTEQSELKGNATEKKLKRYELRKKAMSEQLDLAEIATVLVEINKEISNSSGYLGEISDRSKKLYFNNQTVGQFLFNQVKANPHARLKKQVFYRQDYLDEFERIWEVQAKANSDLTEELKREIRDVVIFYQRRLKSQKHLIADCEFEKYHKAVPKSSPLFQEFRILQNLNNTEVFVKGEEKQRLGEEDHQYLRKLLRYADNMSETDLLKLMGTSKKAGSKVNFKKLEGNRTFATLTGKFLKILEYEGYDLSGVKDPEERHSEIKNHFIHLGFNTDILDFEIDFEDQGFDKNPTYQFWHLLYSAEDLDKLKEKLKTKYNFNDSAAAILASTSFEADYGRLSSKAIRKILPHMIQGHDYFGACDLEGYNHSSSVTAEENEKRELKDQLDLLPMNSLRNPIVEKILNQVVNQVNAIIEHPDMGRPDEIRIEMARELKSSADERQSMTEGIAKATAENDRIRKKLKTEFDLPRVTRNDIIRYKLWEEAGHVSVYSGKPIQRSEIFSRNYDIDHVIPQSKLFDDSYSNKVLCERSWNEDKSNETAIEYLEHKLSPEEFESFRVRVEKDLTSKGGMSKTKCRKLLMFSKDIPDDFIERQLRESQYIAKKAHELLLQVTRNVQPTVGSITNRLRSDWEVVDVLKELNWPKYETLGMTHIIDGKNGERIKRINDWNKRNDHRHHAMDAITVAFTKPAFVQYLNNLNARSNKGGSIFGIEQKHLYRDVNQKLRFNPPMPDMRKEVKKSLEEILISFKPSWKVATLNKNKVKLKGGKVHTQEVLTPRGQLHKETVYGKIKRYEAKAVAVNSKMTPELAQSVANKKEREAILNRLKENDDNPKKAFAGKNSLNKTPIYLNGGATELPKKVKVVEMGDQFTIRKTVDPDLKVDKVIDEGAKRALQKRLDEFGGKPKEAFSNLDKNPIWLNEEKAIKIKSVKITGVKNAQALHPK

SEQ ID NO: 7605 - protein, 1137 aa, unidentified
  REGION 1..1137: note = Description of Unknown: Cas Enzyme sequence
MKKILGLDLGVASIGWAFIKEDDKKSEILGMGVRIIPLNPDERDEFNSGNAISKNAKRRMKRGMRRNIYRRTLRKSLLKNALKEVGIDPGKELFEGMSKLSLWELRSKAAHEQISLDELGRVLYHLNQKRGFKSNRKTDGAEEDPKKESEYKAEIRKNDQMLRDSNQTIGEYVYAELRQDQYFKLKGRIFPRQAYADEFNAIWKCQSKFHSNVLTEELRRRIQDEIIFHQRPLKSQKALVSRCEFEKRYAWVNGKKMDVSPRVTPKTSPLAQWTKIYEALLNIRVKNELGQLVHLDFEKLMEVADTLKYREKMSATEVFKTLGLSKNYTHNIGDKGIQGDTTFSTIEKAIKGLAESENLLSKLKDIQFDIVFKDNKDLTMVDEETGELFHYQSKVIGDGFEKSDYYRLWHLLYSVESEESLVKNLIEDFGCTQELALKLVKLDFTKPGFSNKSAAAIKKTLPYLMDGFDYTRAMMCAGYRHSDFLDKAENEARALLDKIPILQKNSLRQPVVEKVLNQLINIVNAIIEHPSYGRPDEIRVELARELKQSKDERNRSSSNISKNEKRNKEIEDRLRKDYGFVKVTKALINKYKIYEEVGGISPYTGKRIALADFLNGAGVDVEHIIPKSRLFDDSLSNKTMAEAWVNKAKGNMTAFDFMKAQPVPGLQSFDDYIAMVNLWYKAGVNGAKITRTKYERLLCEEKNIPNDFIDRQLRQTQYISRKASQILGLVSRNVYATSGGVTDFLREKWGWNDVLKKVNWERYEKLGLTSVEKREDGKRIYQIEGWSKRDDHRHHAVDALVVACTKQSYIQSLNRLNQFVNKTNNASGLKDADHYKLKELGELSPFKVDEIVDVVSKIIVSFKPGKRVASKSKNKSTGHISIIPRGALSKETVYGKIKVQSKREVALNKNFNPEWLVVDRFLRTVIRERIQSANGDLSKAFKLPILMADGETPVKKVEIYEWNEEAVVKYPISSIKQKDVEYVVDPVVKQKLQAFFDAFPNEKEAIKNIGVQPIWFNEEKRIPIRTVRLKTGLGKVVPQKQVSPDEANGFVDSGNNHHLAVYEREDGSLFDVMVSFQEAFERKVNGIPLYLNEYEGGKLKWKFEQNDLFEIANADGKVMYYRMQNVSKNASEQIFIF

SEQ ID NO: 7606 - protein, 982 aa, unidentified
  REGION 1..982: note = Description of Unknown: Cas Enzyme sequence
MGLRLGLDIGANSIGWAIIETEKQQIVNIGTRVFPAGVNDYDTNKEVTKNQTRREARGLRRQYVRKRWRKIKLLEFLIEHKMTPFTMSDLTLWKKNRDQPYLAHLTSWFALNPYELRQKAINEKLEPLEIGRILYHIIMRRGFLSNRKSDSTEDSTIFQGRKDSGTIGISDTATALNQFKTLGEYLAQIDTRKERIRNRYTSRAMYVDETKQILKTQELYHDFIDEVFSDRLIGSDTKKNMNGVLFFQRPLKSQKHTLGKCIFEPTKTRCAMSRPEFEAFRVWSFINTIEHQGEPIPFTKRELLADYLLSQQSDKTFKDVKKQLKYSLLEDRFNYSDDDKVPTAVVTAGLIKAFGIRVWQSLSNDTISKVWHDLYAASDNEWLSNRLSSYGLNQEGINILLKTKIKRDYGSLSLKAIQNILPFLKQGFIYNQAVVLGGVKNAFGEKWEPLKDKQAVIDTVSGFKGSSLDGSIMEQTKDFLSSVYGLSNAELKKLYHHSQTDHAADGLDRLPEPQKIRNPIVMQAIFEVRSLVNRLLDMHGSFDAIHIELARDLKKSREERSQIKKKQRENEAINKEATDNLKQYEIDDTYFNRLKVKLFNELREKKCPYTGKTIHIGQSNGVGLSLFTGEVQIEHIIPYNRSLNNSFGNLTLCDANENRAKGNKTPYEFYTSLGTWEEVKQRAKDILPYFKYTHFKKKEFESDIASRLLNDTRYMSREVHKYMKQICDDVVVVTGSLTADLRHHWGLNSILSDDDIKNRNDHRHHAIDALVVALTDRTTVLRMARWNKFNKVDNDRRVTPTWEELRLQAQIAVNQILVSHKKINRFVTLRTIKTKKGKRIFKNLGRSARGPLHKETVFGKRMSPETGAYAYHVRKSLNGGITTRKQIEKVVDPKLRSLLYNCLNEQDVTGDAIPKGTFTYLGQDNKLNSRIALPSRSGELIPVYKVRVKENLDNAVEVKDNTGQYVNPRNNHHVALYIDSNG

SEQ ID NO: 7607 - protein, 1489 aa, unidentified
  REGION 1..1489: note = Description of Unknown: Cas Enzyme sequence
MSKIFGLDLGTNSIGWALRNSNLNENQIEKFGVITFPTGVGKDEYGRYTKSFAAERTKKRSTRRLYQARKYRLWATLEVLIIEGYCPLTIIELNKWRHYSKEEALKNNNAGRVYPVWNTAFDTWIKLDFDNDGKPDYSSPYQLRKELAETKLDFAQEANRFKLGRALYHIAQRRGFRSSRKGADDAKEKETNDSEVMDLQYSEKKKNKVIAELFEKYIDSKTIGWLFALLETDKIRIRESIAQYAIRENYKDEIKYIFQFQGLKLDHPLYTKLVETSNNKNDGSIFYKRPLRSQKGLIGKCTLEPNKYRVPISHPAFETFRAWAFLNNIKYKDNSEWKSLPLELKQEIYSELFFRKSKAYFLFSEISDFLKKKGKDWQLNYSLKTTVTACPVSARLKDILGDDYLNVQIKKDQKSKSGKDYYDIEDIWHVLFNYEDQEYVAEFGENKLRLNADKIKQLVIAWNALPVGYGMLSLNAINKINVFLRKGMIYTEAVLLANIPKIMGGGLWQQNEQLLLNSISNVIAENRQQKAMLNIVNNLISKHKDLEANKKFAHKDSNYKLIESDFNDIKTVIEEQFGTNKWNGLSQDGKKTIFDTVTDCYQAYFSKQGIVRNNGNEERVVTIQSGNKKYHKTESGYYRLPKLIDTLKEFLKDHFEYLDEAKLSKIYHPSEINIYPPAKEIDGVLKLGSPKTGSFKNPMAMRTLHELRRLMNYMIETNQIDSETRIVVEVARDLNDANKRWAIETWQRQRKAENQEFAEAIKQLLNEDKNVKANVESKDDIDKIRLFYEQNTEQTLPEVVETKEDESGKKKKKKSAEKDDAIRWSGHGKKLIDKYRLWKEQGYQCLYTGKYIKLTDLFNENVIDFEHTLPRSKSFDNSLANLTVCYHDYNRTAKKNQIPTQLLNYDKEYDFGGSIGKCSSITSRLDTWKDKVERIKQQIDFWKTNSKRAWDKIRKDDCIRQCHLWQMELDYWQNKLNRFTITEITTGFKNSQKVDTQLISKYAFHYLKTYFDKVDVQKGSITAEFRKIYQLQVTDEKKDRSKHSHHAKDAAVLTLIPVAAKRDAILEKYYEAKENKTDFKAEPPFAGFRREFIWGIDDSVLINNIINDRALTPARRKVRKRGKEVFIEKPDGTKVNKWAIGDSIRGQLHQETFYGAIKPAQKGEKGNLLKDENGKFIQEESIKYVLREPFTADFNKVDKIVDERLKKQIKEHAQKAGSFKKAFEEGICLLDKNGNPHGNKIRHIRVWASVSEPMAIKKQTSLSNKEYKQSYWAANGENIICAYYKNDTLDKNGKIKKDRELEIVNLFDAAILKKFGLINAKGELYLYRKDKNNQVIIDDKGNNQTPYVILKAGMKVIFYDEKLEELKKQENERDSDYYKRISYRIYKVVKFTGGRLTFQHHLEARNDKELEIAYPENIVFKTDEKNKEVAFGDRGKSGFTEKVSDALKFNRHNNYEPFPKLRYSVNWLDFAVEGYDFIVEMDGKVKWKI

SEQ ID NO: 7608 - protein, 1471 aa, unidentified
  REGION 1..1471: note = Description of Unknown: Cas Enzyme sequence
MKKILGLDLGTNSIGWALIQQNFESKQGNILGMGSRIIPMTQDVLDNFGEGKPSKTQTAERTGYRSTRRLKERYLLRRERLHRALNVLGFLPKHFANQIDFANRLGKFFNDAEPKLAYNDKNFIFLNSFNEMLEDFKVHQPSLVANGKKVPYDWTIYYLRKKALTKKIEKEELAWILLNFNQKRGYYQLRGEDDEDATRTAQTRIYFDTQVISEIIDTGAVYKGLKVISIKLSNEDSGKYFSKEMPNWIGMKKNIIATIDLDKDGNDKYEDDGTLKRRFSIPTEEDWDKKWKLVKIKTEKEIKDSNKTVGAYIYDTLLQNPNQKIKGKLVRTIERKYYKAELSTLLLKQIEFHLELQNEDLFTGCVRELYRNNENHRHTLNGKGFLHLFLDDIIFYQRPLRSQKSSISNCSLEKRKYKDSDGNEKVVPLKAIPKSNPIYQEFRIWKWISDLSVYKKDNDSNVTDQFLKSHKEYEKLFEELSSRKEIKQEALLKYLVEQTGLKGKAASTEAAKYRWNFVEDKTYPLNETGSAISNRLEKVEGLPKDFFTKEIEKQLWHIIYSVTDKTEYEKALNSFANKHKIDESSFVENFKKFPPFKSEYASYSEKAIKKLLPLMRIGKYWSWEVIPTNSRERIDKIINGEFDENINNRAREKAQSLTDQHHFQALPDWLAKYIVYGRHSEASDLTKWDSIDDLKDYLEEFKQHSLRNPIVEQVITETLRVVKDIWQQHGKGTTDFFDEIHIELGREMKNTAEDRAKITNQIIENENTNLRLKALLVEMLQQGDVENVRPYSPTQLEILKIYEDGVLKSNIEVPDDILKISKTAQPSNKELLKYKLWLEQKYRSPYTGEMIPLNKLFTPAYEIEHIIPQSRYFDDSFGNKVICEAAVNKLKDNQLGLEFVKNHHGEKVETGLGKTVTILEEAAYQDFVKEHYAKSRGKKAKLLMEDIPEKMIERQLNDTRYISKFISSVLSNIVRAEKDDDGFNSKNIIPGNGKITSQLKQDWGLNDVWNDLILPRFKRMNKLTKSEAFTAYSKTHQKHLPTVPLEFSKGFQKKRIDHRHHALDALVIACATRDHVNLLNNQHANSETKRYDLQRKLRSYEKAKYFSKKENRTIERDVPKDFLKPWATFTTDAKEKLETIIVSFKQNLRVINKATNKYEKWIEKDGVKTKELVPQTKGDSWAIRKSMHKDTVSGKVELPRIKVPKGKILTATRKIIDSSFDLKTIESITDTGIQKILRNYLASKEGNPELAFSPEGLEDMNKNIQIYNDGKPHKPIYKARIFEIGSKFCLGQHGSKNSKYVEADDGTNLFFAVYENKDGERDFETIPLNEVIEYQKWYALLSWEEKKKTLPLPINSEKGKFLFSLSPNDLVYLPTMGEKENISRINFNHLDNDQKQRIWAVNDFSTAIYFRPNRFSKAIAPKEVDLFFNQKKNKLQGSYDYKTASFDGKQIKDFCIKIEVDRLGNIKRGML

SEQ ID NO: 7609 - protein, 1083 aa, unidentified
  REGION 1..1083: note = Description of Unknown: Cas Enzyme sequence
MLTFNFPIYSIIYIYFLKRVKGLKKVLGLDIGISSVGWGLIDQETGEIIDAGVRLFEEATRNANEDRRGFRGSRRLKRRRTHRLERAKKLLEQYQLPLTGIGVVDPYEARVKAIYGYVSKDELAAALYHLAKKRGTVLDAPDEEKTTGNVYSTKDQLARNKSLLESKYICEIQLERKSNTHEKMRTHENRFRTEDYVKEAQAILLKQKQVHTEISEEFIQSFIELMEKRRAYFDGPGSEKSPTKYGPYHLDSSGKLRYTSMIERLRGKCTYFPEQLRLPKMSFSADLFNLLSGDLNKIQLNGEFLSFEEKEALVNEFILKGKNLTIPQILKFKGLPENTDVKGYRIDLKMDSPTFTDFKGYKELLKIFKANNLPLSLLENIDFVDGIIEILTAEKSYARRESQLRELLQDYNEELVSRIIASLIESTQFNGYHSLSKKAIDAILDELWHTNKNQMQIFTEKGMDEQRLKRFTNQKNIAFDDEAILSTVAKRAHREAIKIVNIIRKKYGELDTIVVETAREKNSDEKRKQYADFQRKIGKHEKDMVKLLGVKKLSDLRLSPKQLLALKLWESQDGRCIYSSKSISIHDIISNPYLFEIDHIIPISISFDDSQANKVLCYHGENQNKGQKTPYQYFSSGKANQTFDQFKLIVTNLYKSRKITSKKRDYLLEIRDVQNNDELQKQFINRNLVDTQYAMRSFSMTLRSFFKHKEIDTKVLSIKGSFTAAIRRRARINKDREKSYAHHAIDALIVAAIGKLPVLNFYREFNMTEDGIFFNKTTGEVINCDQFFHNKYIQFIRNLLNYESKIKYSHKVDRKVNRTMSNQTIYSTREKDGQVYVLGKNTNIYQLDKNGVAPLLKRLKKNPENFLIAQHNPEIFDLILKIVSEYPNADNPFKAYYDENGYIMKDGKVPVKTLRYLDRSLGVHMNITDKYPATKNDVVLLSIKSLRVDLYKNAEGKYKYIGVPYHWFKKKGKQYVLDMEKYEAEMKKDYKKIDESYEFQLSLYKNDLFSFEKRGVRYERIFRGDNNPRQNKIEVDYIEKKKVEQKEGFLAPSTISNVIKYNVDIIGNTYKVEKENFNKCLQL

SEQ ID NO: 7610 - protein, 978 aa, unidentified
  REGION 1..978: note = Description of Unknown: Cas Enzyme sequence
TRRRRRRLIELKRLLAEGGLPLPGEHPAGAPADLVWQLRRDGLDRALAGEAWARVLLHLAKHRGFKSVSKREGLDNKSDAGKALQGIASLQQAAAGYRTLGEALATAPAFALRKRNTAGDYSHTALRADVEHEAKRLFAEQRRLGNPATGADLERRYLEIAFRQLPLRSSLDMVGQCRFEPAEHRAPKHSPSFERFRFLQTLNNLRIHERGTGLRALSAEERAVALRLFASVQKLTYKALRKRLGLPETARFDGLAATKDPEGKTLGEFTGSVKLQETLGPERFARLMSDGGAMLDAAMAAIVFQSADEQVEAELRKSGLDDESVQAVLERLDLFAGFRGAGHVSALACRRLLPHLEAGHVYSEACRLAGYDHTALGRIDLAGLPNPVVRKVIGECLKQVRVLFREFRTPDRVHVEMARDLGKSREDRQEIYKANDVRRTQRSDHRDQYEELVGQRPNDEELLRFELWLEQDHRCLYTGEYISPAQLKATDNSIQVDHILPYSRSGDDSFRNKALVTAKANQDKRDRSLWEWFGEGDAKRWQELETRVDLLRKANRLHKEKARKLLLKSFAEREEAYRARHLQDTRYIIRVFRLLLEQHWPELRTRADEERRIFTQPGALTALVRRGLGLDEAKRGGRLGDRDHALDAMVVAWTSPAVVKRLTDGAKELELQARAKLVPELVAEPQEKERLRQAILSAAEGVFVSRPESRRGRGPAHGDTLYAFAPNGDGSVTRFQRVAVTKLERKHLERLKDPERSRALKDAAETWLANAERLGFKPGKLERYAAQHPLWMPTRNGDVGPAVRHLTLQLPDRVKGGMTVQRGKSEGHVDVATMVRVDVFARDGKFHLVPIYAWQVADRATWPAPPNRAIKAAAAEKEWDELDQSYEFRFSLYPGALIEAIRLDKNAQVQEHHLGYFRSVDRTNGRVSYSPAANYASTAQERYTTKTLSSFRKFHVDRLGRRFEIVREPRLWHGEVCS

SEQ ID NO: 7611 - protein, 910 aa, unidentified
  REGION 1..910: note = Description of Unknown: Cas Enzyme sequence
MASELVYGFDIGTTSIGSAVVRLDTTAGTGEVVHLGVRIFPEARDPDGIPLNQERRKRRMIRRQLRRRRTRRRDLNTLLAEAGLLPPFSKDKTSPWAVTMAKDPWSLRTRGLAEPLAPHEFGRALYHLAQRRHFRGRDLEKADIGEERDKDEPGADEKAAASRRETDRSGLNASGLTLGAYLATIPERTQRRRHRHFGREDVATEFRALLAAQTPHHPCLVNSSFAAGLEQTIFDQKPVFWRKATLGACRFVPGSELAASASWIAQEKRMLEKLNSLRIDEGNGRPLDDCERTALLALLRRQDSVTWSGIHRHLKLYWRKHDLSEKPRFNLERGGEQGLTGNRLENRLADIMGDRWEADLGLRDRMRREIHARLYNADYGHIGNRIVIRREADRRKERQTARNVLKADFALTDEQADRLAALTFAPGWEPFSTEALEAFLPRLQDGAIFGSLLASPDEEGWRAATFPNRSQPTGAWVERLPTPGNSREEVERQKSVRNPTVLRVQNELRKVVNNLIATYGRPDRIRIEVAREVGKSAHDRKEDLRRNRDREKVRKEAIADLQSKGIAEPRRSDIEKWLLWKECRHICPYSGEEISFSHLFGTTPRFDSEHIWPRWKSLDDSFANKTLCRKDLNAIKSNRTPLELYEGRPDDLAAVVARVRNFDDRYGPGWRKGRRFREAPPEDFAARQLTDTGYAARQAVGFLKMLFPDLGQEGEVKVATPSGRVTAELRRRWGLNNIVSDTGEKTRADHRHHAIDALVAALAHPGYTQRLANWFQARDAAMPQPGPALDPPFPNVRAQAEAWKEKIVVSHRVRRKVSGPLHKDTTYGDAGPAEGTGGIAYRWFVTRKPVEALTRSLLSEDDAWPDPHVRDTVRAWVEAHGGDPKKAFVNGHPTVSEGGAPIRKVRIRVK

SEQ ID NO: 7612 - protein, 1058 aa, unidentified
  REGION 1..1058: note = Description of Unknown: Cas Enzyme sequence
MNGLVFGIDLGIASCGWAVLRHPTPGDPSGAIVAMGSWMFDVPETDKERTPTNQIRRGNRLLRRVIRRRAQRMAEIRRLFAQHGLLAGNEPDALKRAGLDPWELRARGLDKLLSPAEFAVALGHIAKRRGFKSARKGKEANTAGDDQKMLKALEATRERLGRYRTVGEMFGRDADFLDRKRNRDGLFDRTQSRDDLIHEVGKLFEAQRRLGNDAASVALESDFTATAFRQLEMQDSEKLVGMCQFEPQEKRAARFAPSFEKFRLLGKLVNLRITTPDGERPLTPEEIRLATGDLGKTAKLSVKEVRKRIGLPADQRFTAIKPEEEAQDIAARTGEAMHGTKKLRDALGEALWAEMQDKPEQLDRIAHVISFHETADKIGAELRKLGLPTSTADALLDDLSAFSRFKGAGHISAKAARALIPHLEAGMRYDQACEAVGYDHAASRWSKREQVVDKAAFNALVKSMGDEIANPVARKSLTEGLKQLWAMRNRWGLPDAVHIEMARDVGNSLEKRNEIKRGIDKNTAERERQRDEVRELLGIEDVNGDTLLRYRLWKEQAGRCPYTDKAIPATAIIGTDNSHQVDHILPWSRFGDDSYSNKVLCTARANQEKKGQTPFEWIMSSQGEDAWNTFLARIEGNTAFRGAKKRNYVLKNAKEAEERFRTRNLNDTRYAARLLAEAVKLFYPEGDRQEKGGNRRVFTRPGGLTSALRHAWGVESLKKVDGKRVEDARHHALDALVVAAIGEWEVQRLTRSYQEWEQKGLARPLRQVDPPWGDAASFRREVKEAYDNVFVARPERRRARGEGHAATIRQVKERDGALVVYERKAVADLGMEKGKFSKTKALKQLSMLKDRERNVAVSKAIEDWIEGGRPVDNPPLGLPVSKEPDAPRHPILKVRLATEKKPAVDVRGGVADRGEFVRIDVFTLPNKKGEDEFYLVPIYPHEVRGKTPPAAFMTTDGQEKPLTANHVFKMSIYNRTYVEIEKRDGRVVAGYVVSFDRSVAALKIYEHHTLKPVEKSSGVKTLKRFSKYNVDRFGMRSEVKAEVRTWHGVVCTSPIPPD

SEQ ID NO: 7613 - protein, 993 aa, unidentified
  REGION 1..993: note = Description of Unknown: Cas Enzyme sequence
VITEINNDLNKSSGYLGAISDRSKELYFKQLTVGQYLSNQLLSNPHKPIKGQTFYRQDYLDEFEIIWETQAKHHPQLTNELKEEIRDIIIFYQRRLKSQKGLISLCEFESREISVQKNGKLIQKKIGSRVTPKSSPLFQEFKIWQVLNNLEFRNKVTEEIQHPSQEAKQKLFDELNIKGNLSSLQAINTLGYEPKEWEANYIVLEGNKTNKALYNAFLKIMESEGHDFKDFQIKDPDALDVGQIAIEAAKIKEIVTAFFELHHINTDILNFNAETDGKGFEQQPSFQLWHLLYSIDSDVKMYHAKDISLYGNEDIGLKKKLCERFGFKPTHAKILVNISFEEDYGKLSSKAIRKIFPYIKELTYDKACFEAGYRHSASSLTKEEIENRKLQARLIPLKKNELRSPVVEKILNQMINLVNTLIDQENAQRKAQGLTEDFHFDEIRIELGRELKKNAAERAEMSLNINAAKIQHQKIVTILQSEFGLPNPSKKDIIRFKLYEELKNNGYKDLYTNTYIPRELLFSKDIDVDHIIPQMKVFDDSFSNKTIIYRKDNLDKGNKTAYDYIVEKYGLVEATAFEKRINHLFELGKKSKEEGISKAKFQKLQKKETELGDGFIERDLRESQYIAKKAKELLLQVTKRVISTSGEVTARLREDWNLVNLMQELNLPKYRAAGLTEIIQKKDGNIKEQIKDWSKRNDHRHHAMDALTIAFTQHSHIQYLNHLNARKNEAHKMHQHIIGIEKKLTEFFTDDSGKIKRKFKPPIENFRQLAKEHLEKVLVSYKTKNKVFTKNKNTIHTKKGAISSTELTPRGQLHNETIYGKYRYYESKEEKISAKFDQATIQKVSNPLYRQLLLDRLKNNDNDPKKAFSGKNALNKQPIYIDEGKQSFIPEKVKLVWLEEDFSIRKDVTPDNFKDEKSIEKVLDTRIKALLKDRLIAFENDPKKAFTDLDKKPIWVNEDKQLAVKSVKVSAVKNAKALHFKKDHLGNYLLDDN

SEQ ID NO: 7614 - protein, 1053 aa, unidentified
  REGION 1..1053: note = Description of Unknown: Cas Enzyme sequence
MGKVLGLDLGSNSLGWAVIDLDNNTVDGMGVRIFTAGVDSVNQEKEESRNAKRRMKRQVRRQYERRSRRRAALRRYLQKTGLLPTAEAELTKLLSINPYMLRKSALDNRIEPHEMGRIIDHINSRRGFRSNRKASADEEVSGVMYSGSMADSKPGITVIDESIDPRLRRMKSFKSNKQLILNGELGALNGYRTTGEYLASLNTNEVRQRNRFLLREHLEVELDLILGIQAKYHDLLTDEVIDVIKNLVFFQRPLKSARALVGNCRFEIGKKRAHKSHPEYQRFRMLQQVNAFKVFGPGRVLDDDRILKPDERAALINALSNGNSIDTTAKKGTNISKIIGLPGKAEYSFSVDRLDACSTARKLSAILGQDAVISMSREKLHSVWNVLNMAEHTEWLEKHAIEKWGFTPSQAIQISKLKLEEGYAALSLKAIRKILPFLEEGLMYHEACAEAGYHHSRPDGPVQLSNVVPALSNIDIRNPIVMTSYAEMRKVVNLLIKKYGSFDEIHVELARELKKPKSERLQIQKRQKGFRDENEIIRSKLRLEFGIDKPTKSDIERYKLWEEQNHRCMYTGKPISQDMLFSGPVDVDHILPYSRTLDDSRMNKVLCLKDVNIAKGDRTPREACDAGLISYNELRERVEALVRVYKIAKAKSARLFMTTEEMQKLYGENFVERQLNDTRYVGRLTLSKLRYVCENVVVANGLLTSSLRRRWGLNSVVPDLAKEGRAWIDDEAYSNGVKSRADHRHHAVDALVVALTSRSLLQRVATLNARSAGTKIEQHFADGRIRLPDEPIPGLVAIAKRMVDKIVVSHKVNRKSRGQLHEETLYGVAHDSFGVPLTNEDGMPLYVIRKSLHSISSGEAKDIVDPIVRKIVLDRIASYGVDVNGKFTIPNNAFELPLYMKRKDGSRGPRIRSVRIFKASSGMVKLRKNGVFVEPGSNDHIRLFQKAEGEKKRRAEVLTLLEKVGGMRPSRESPEVTYRINEVYCATTNADGIDDQVNLYRVQQMSKADSRLVFRQIAAATINNKSARLIKVPSSVDGFKIVVTEIGEVLTKC

SEQ ID NO: 7615 - protein, 986 aa, unidentified
  REGION 1..986: note = Description of Unknown: Cas Enzyme sequence
VKSLGIDLGIASCGWALIETDDEQGRIIACGARTFDAPETDKERTPTNQLRRQFRGMRRVIRRRRQRMAQLRALFQQNGLLPDAQRDALRFPDLDPWELRVAALDRKLTPQELAVALGHIARHRGFRSNKKTQGNEAGDDGKVLKAAAANQEILAKYRSVAEMFAKDERFARRKRNRDGEYTQSVNRADLEHEVRRIFERQRALGNAQASADFQEEFAELAFNQNPMSDSEDKVGFCPFETKERRAAKRAYSFEVFRFLSRLNALRIGDARQERPLTEAEVAAAMEGFGNQRGMTFARLRKVISLVDSDAFRDVPHDEEGSRDVVNRSAGNGCMQGSATLRAALGEHNWKTLLQRPEKLDEIAFIITFRATPESIERGLVAAGLEPDMLHAIMAAVEKGAFSQFTGAGHISAKACRAIIPGLQRGLVYSEACAAAGYDHSARPVTEIASINNPVARRALGEALKQVKAIIAAHGKPDRIHIEMARDVGKSKEERDKISKGIEDRNKARDKLRAAFNDTVGGEPAGAEDMLRFELWTEQRGWCLYTNQAIPPSAIRAKDNSVQVDHILPWSRFGDDSFINKTLCFAKANQEKKGRTPYEWLKDDHKRWAEFVACVETNKGMKGRKKRNYLLRDAAAVEEKFRSRNLNDTRYACRILMEYLARLYPDDKNRYVFARPGALTDRLRRAWGLQDLKKVLEPDGEKRKHDDRHHALDAIIVAATSESALQVLTRAFKESEDRGSHRDFADFPPPWPGFIEDVRRHFREILVSRAERGRARGEAHAATISQLKQTDDGPVIFERKAVDKLTLKDLERVKDPDRNAALIGALRAWIEAGKPKNTPPFSPKGDPIRKIRLITTDKPAVPVRGGNAERGEMVRVDVFRKANKRGVFEFFLVPIYPHQVADKANWPTPPNRTARAATSEEQWPEITTEHEFIFSIGARTFLEVEKRDGTIIDGYFMGMDRSTAAIHLSAPYSTRVLIRSIGVLGLK

SEQ ID NO: 7616 - protein, 1049 aa, unidentified
  REGION 1..1049: note = Description of Unknown: Cas Enzyme sequence
MAALNYRLGLDLGANSLGWCVYALDDEGEPGRIVRMGSRIFSDGRDPKSLASLAATRRQARQARRRRDRLLKRREKLMHALIEAGLMPSEEAGRKALQALDPYALRAKGLDAALSPHEFGRALYHLCRKRGFKSSRKERGEPGKDKEQEKESGKVNAAIAALKARIEAAGCRTVGEYLAREHEQRRPVRGRQTPDGQYVLYLQRAMVEQEFDALWDAQRPHHPAVLTTQLRDRLKDILLFQRRLRPVLPGRCLFEESEYRLPLCSPLQQKFRILQELNNLRVKDGIGYRALSLDERNAMLAALMATSGLVTFARLAKVAGLGKAAAFNLESDKRKGLKGDAAGAQFGAEGVLGETWQRLPELAQEALAVLAERAEDSAALVAALRALPGDTAPAADILRPRFFEQPWLEALVQVPPLTESQARAIADIRLPEDFGSLSRKALDRIVPELEREIVTYDIAVQRADYASHSQLHTGEIFDRLPYYGVVLRGYTSPMESARVEDERHYGRIPNPTVHIGLNQLRQLVNALIRRYGPPRQIVIELAREFGLSGERRREIEREQAENQKRNEALDAEIMALGLAPNAENRLRLRLWYELGEDDALDRVCIYSGQRIGKAMLFGDEVEVDHILPFSRSLHDGIGNKLLCLRRANRDKRDRTPHEAFGHSPPGYDWAGILERVERHFDENRKPGVRRKAEHFREDAMERFLDGREFLARHLNDTAYLSRAAKHYLSYICHPDQVWVSSGKLTGLLRGRWGLNRMLSGDGAKNRNDHRHHALDAAVIGLCSRSLIQRMSDAAKRAEGRGENRLLESLDPPWPGFRDELRDTLAKVVVSHKPERGREGALHNDTNYGLRGEPDRKGVPLVGRHVPLDSLKGAGDLDGIPDQGLRDRLHALLAPLSSPKDIRAALQAFSSETGIRRVLKQERLSVIPIADRRTDKPYRYVKGDSNHCYDIFRREDGRWDGEVMSTYDAHREPLEQRPTHARNGRPLVMRLHKDDILSMEIDGVSRLLRITRFTEGMIALADHHEANVDARARAKELKYIFKAPSALRAC

SEQ ID NO: 7617 - protein, 1042 aa, unidentified
  REGION 1..1042: note = Description of Unknown: Cas Enzyme sequence
MGVRILGIDLGIASCGWGVIENSEPDGTVVAAGVRTFDAPLVDKTGEPKSAQRRAARGQRRVIRRRRQRMNAVRRLLHQNGLLPDASTDALHEALRRVSPTGTHPPISPWTLRAAAYERSLTSDELAVVLGHIARHRGFRSNSKSEGNANAADETSKMKKAMEATREGLAKYRSFGDMVANDAKFTQRKRNRDKDYSHTAKRSDLEDEVRSIFLVQRRLGNPAAKEALAASFAAVAFFQRPLQDSEKLVGKCPFEPDRMRTARRAPSFELFRYLSRLAHLRISVGRAEQPLTAADIALAAKGFGETKKTITFASLRETLDLDANARFLGIPKDMESKLDVVARTGGAAYGTKTLRDALGGVIWQSLEKTPEKLDRIAEVLSFRQDFDSIRNGLDEIGLEAAVVQHILDEAAKGIFKDFTRPAHISALACRNIIPGLREGMVYSEACARVGYDHAARAAVSLDQINSPVTRKAFGEAIKQIRAVTRAYGPFDFVHIELARDVGKSAEERARLTRGLEERTAVKEKRRNEAAELLGRSVTDDELLRYELAKEQGWKCIYSGDPIDPSGFAANDMRYQVDHILPWSRFGDDSYVNKTLCTVTANQNKRGRTPVEWFEEEKTEADWAIYVARVESLKNTKGRKKRNYLLKTAADIEKKFKARNLTDTQWATRLLADELTRMFPASGGARRVFTRPGAITSKLRRAWGLEGLKKRSGERMPDDRHHAVDALVLAATTESLLNRTTREMQKRENEGRQDDVFHVRQPWPGFRLDVERVVYGEDGSGGVFVSRAERRRARGKAHDATIKQIREVDGARVVYERKAVEKLTEKDLDLIPVPEPYGKAIDPKKLRDEMVAALRAWIGAGQPKDQLPRSPKGDVIRKVRLATNDNVAVEVNGGTVDRGNMARVDVFRKKNNKDKWEFYAVPIYPHQIAKMDAAPDRAVIANKSDREWTLLDDSFEFIWSLNAMSYVEMTKSNGVSIEGYFRGLHRGTGAANLSKHWTLDKIGATDGIGIKTLADFKKFTVDRLGRKFEVSREVRTWRGKACT

SEQ ID NO: 7618 - protein, 1081 aa, unidentified
  REGION 1..1081: note = Description of Unknown: Cas Enzyme sequence
DIGIASVGWSLVDTDNNKIIDIGVRLFESADANNNQERREARSARRTLRRKKYRLRNVEELLSENGFYPPKGFNFNPYELRVKGLNEKLSPEELYVSLFHLAKRRGISYLDEAEDDGKNINESLKINRELSKEMYPCEIQLERLKKYGKVRGLIEIEDGDSTSTLINVFTTNAYKREAIAILEQQKKYYPQIDEKFIKRYTNIITRKREFYIGPGDEKNRTNYGIYKTDGTTIDSVFEELIGKCSIYTDQRRAPASSFTAQEFNLLNDLNNITVGGRKLTEDEKKNIVENILNSNSVRIMNVIKNETGLEDINDIKGFRVNKDGKPEFHTFEIERKIKKFLKDTKINYDEFDIDKKDKLAEALSLSMDFKTLKKNCNKEFPEFSDEDVEMLFSFLQNNKASYAKWHSFSLKIMKEMRKELYSSPKNQMNFLIEKGIKKSVQDSFKDYKYIPVGFLNEEIYNPVVRRSVNQSIRVINAIIKRYGSLEAIVIEMPRETNEKEEKKKINDIQKQNEKEKKEAINRARNEYGFTEKQLYSQKELITKIRLWYQQDGNCIYTGKVISIEDLINNPNIFEIDHIIPKSISLDDSLNNKVLVYSYANQAKGRRTPFGAFYISSKDINYEDIKLRSSKLLENKKISKTKYDLLTFEEDIDKYDVRQKFISRNLNDTRYASRAILNGLQEFMKSKGKDTQVHVVRGKFTYQLRKRWGIEKDRAESFKHHGVDATIVAVSYMLGQSEDTIRNPFLQQLGRYNKKLWKVVSNKEYDKEVYKLPWQGFITDLNKATDKIKYSHKIDTKVNRAIADATLYSTRQVNGEDYIVKKYKNIYDNTVSKSVIKLIKEDLEEFKDPDESKILMRKHDPKTFESIVKIIDEYEGEKPNPFEAYRREHGYIRKYSRKDNGPIIKDIKYLDNRLGEHIELVKTDNLSDSKKVALLSLKPFRTDVYYNKETGDYKNIGIKYNDISFKEGKYVLEDNVYSEMKKERMIDETYEFLFSLHENDIVGIIYKEQPEIEYKYRFLSSKSNNPNRIEVKPIEKKEFKPRRQPTIGRKVLKFNKYYTDILGNMFNAKGEKLKKEFTVDNI

SEQ ID NO: 7619 - protein, 1058 aa, unidentified
  REGION 1..1058: note = Description of Unknown: Cas Enzyme sequence
MSEIILGLDLGVTSIGYCLFDKENNHIITAGSRIFQSGVDSSPVGKESPRNATRREKRQIRRQIFRRSERQTLLMAVLQDLGWLPSEDVLLDIVLQKNPYELRCRALVEAISLEELGRIFIHLSKRRGFKSSRKSSTADEDEDKGILFKGDPKTGKKGISELQDAVDEGNFNTIGAYFASLDPHQRRIRNQYILRNQYIHEFDEIWKSQLKFHPEIDKPTTYESVVQKYCKSRQQGRWQDKNLYDFLKEYVIYFQRSLKSQKGSVGKCTFEPKSSRCPKSALTFQEYRIWDKLNSFRIIGPDRNLVPLTFEEKQKAYQKLSVSKEQTVSQLMKLWKLGDGFTANYDEKIVIKGNVTAHALINVFGINNWAELSEEEKQHRWKIIYDAEDNEWLKKYGIEKWALNEEQAKKLTKVGFEKMYAELSQKAMNKILPFMKNQNLDYAQACVRAGYNHSQVSEIGIVSTILSPFNKKINSPIVSQGLHELRKVVNNLITEYAIKPDIIRVELARELKMSKEKRETILSRNSKNAKENQAIIEDLIQNFQGFNHEADVRTDDITKYKLWKECNNRCPYTGNEINATDLFHRNDKYQIEHILPRSRSFDDSFQNKTLCEKSFNIDRKGNLMPYEMLAQGRIMQSEYDEIMERVKEFSRGGKRNVSKIKKFTLHTIPQDMVAQQLNDTQFLSVAAKDYLKQICANVQPTVGSATSQLRKLWGLNSVLNQVGDVKNRNDHRHHAVDAIVVACTDIKHLQELSKFNKNKKYGLNLERLGYPYPTFRRDVKDAVEGILISHKVKNRPRGQMHDETMAGKVMNSDKSHKTKDGDTNQKFYTTRIALTDLIAAPAKVMKIGDKVVRDTVLQRLYEKGVNVNEKITKIPNDAFIETLWMPNKQGKNIHPIKHVRIHDVASNKIEIRKDTFVDGGNNHHIVIFQKPNGKREGKIVSMYEVMAVRKKNGLPVINMEVGEGNEFIMSLSTNEMVLVDSGDFKTSDINWNNPNYEELTEYLYRVQMITDGKITFRHHLTSVLKDSEGNEIGRLIKTPNSFQGIKVIVNHIGEIKRA

SEQ ID NO: 7620 - protein, 1359 aa, unidentified
  REGION 1..1359: note = Description of Unknown: Cas Enzyme sequence
MKRILGLDLGTTSIGWAFINEAENESETSAIINTGVRITKYDNFSKVDKTGKITESKNPEADFNAGHGLSPNADRTLKRGARRGLQRFKQRRDALLHTFRKINFISSNYVYAETGKQTTFSSYRLRAKSAVEKVSKEELVQVLLMLNKKRGYKSSRKAKTTEEGNAIDGMTIAKELYDTNQTPGQWVYNSLLKGGKFIPDFYRSDLQMELEKIVRFQYQYHLEQLNDKVLEEIQGKTRTATSQYFSNVLNIPLSENKGTREEIKMQHYKWRADGLSSELDIKVIAFVVTEINNQINQSSGYLGAISDRSKELFFNQQTVGQFQYKQLIKNEHVKLKNQVFYRQDYLDEFEKIWETQSRFYPELDEKLKIEVRDITIFFQRKLKSQKHLVGFCEFEKGHKAIPKSAPLFQEFRIWQNLNNIVVKNETTKEPFHLDEDLKKLIAQELLFAESMTDAQMLAFCDLKKGTHTVNFKKIEGNRTNTSLFKAFEKILILEGYDELDFSNLDALDIKTIFKSAFSDLKVNTTLLEFDPTIQGNDFDKQPYYQLWHLLYSAEEDEFLEKSLINKFGFKKNHISFLMNVNLQADYGGLSAKAIKKVLPHLMDGHTYDKACALVGYNHSASLTAAQNNDRILKDTLALLKKNSLRNPVVEKILNQMINVINAIMEDPTMGKPDEIRVELARELKQNNEQRSDMTKAINKSTTEHAEIRKKLHLEFGIARVTRNDIIRYKLWKETGGISLYTGYPIEPSRLFTKDYDIEHIIPKSRLFDDSFSNKTLCERTLNIEKSNKTAYSFLQEKLAPEDFDQFEKRIKSMFGKISRTKQHKLLMADNEIPEGFIDRQLRETQYIAKKAKEILMEVSRTVNATTGSVTDKLREDWELIDVMKELNWDKYHKLGLTKEEEGKNGQRLYKIIDWTKRNDHRHHAMDAITVAFTKPAYIQYLNNLNARTNTDKIGNSIIGIENKYLKRDKNNKLRFIEPMPHFRQEAKKQLESILISYKAKNKVVTNNKNITKKSGGTNQKIQLTPRGQLHKETVYGKQQQYATKEEKVNANFTAQYIKKVAKKEYRDALLKRLAENDNNPKKAFTGKNGLAKTPIYISLKDNIVVPEKVKIVWMEDNYTIRKDVTPDLKLDKVIDIGLKIILQNRLNEFNGDAKKAFVNLDENPIWQNKAKGIAIKRVTISGVSSAQSLHTKKDHFGNEILDENAKPIPVDFVSTGNNHHVAIYRDEKGNLQEEVVSFYDAVVRKNLDLSVINKTHEKGWDFLFTMKQNEYFVFPSDNFIPQEIDLLNPNNYHLISPNMFRVQKFTVKDYFFRHHLETTVEDKKELKDISFKRLGLSGINNIIKIRVNHLGQIVQLGEY

SEQ ID NO: 7621 - protein, 921 aa, unidentified
  REGION 1..921: note = Description of Unknown: Cas Enzyme sequence
ESLINHFAQEVDGIYETVSLEKKLNNIVNGLFRTELMSEGDYHLRENEELDSADESLILNKIIDILGEKTWNETYKDDKKKYLNYVKKHYKEFLQKPIQAKKASFIEQPRIHQRIFNFLQEYYPESVPGDNIKYLWHPSEQEKYLNAENYHKVKNNRKHFFIKESELQSFLRLNQDAETEGISLKLLEDPEPISKGFKNPMALKTLHKLKQLLNYLLQTEKIDPHTRIVVEIARELNNTNYRKALESWQREREKENNNYKKVIEEINEEAGTSYNPEDKKLIRKIRLWEEQERKCMYTGKTINKSNLLNGEHYDIEHTIPASISFDNELKNLTIADKDFNSKIKGKKFPTQLDNYDSSISLNGEILQPINKNIEAIFGKRTTEKKVIKKYGKQKTITAIKWKKINDLEKQLDEYLKKTSYASTKEIKDYFIQKRHLIKFDLDYLKQKLQTFTIEEYKSSWRNSQLRDTQIMTKYAVPYLKTIFNRVEVQKGNVVNSFKEIYKVKLSSEKKNRSVHSHHAVDAAILTLIPKPSYRDEILKKYQLEIDNRTGKTYHENPKDWTNFKVSFIKDIENETLINNLKEHRTLTPTFKKIRKRGKIVRNENGKPRWAKGDSIRGQLHGESFYGAIKRAKRDENNKIIFNDFKKMELQDEIKLVIRKPLLYAKDSSSPGFKNLGEIEKSIVDKDLFKIIESQINNAESFKLALEKGIYMLKKNGERINKMRHIRCFDRLKHSTAVRPHEHDFISNKKYKQTTYAQNGENVFCLYYKGSVKEKEERAISIVGIFDLAKLDIESDKDFIDIPLFNSTKKGKVELPLYAVLKSGQKAIFYKECIEELKDLEEKELSERMYKMYQFEGDGRIKLKHHLISGSNTDIKKEHKEISAMNFDEYSPLLRIRSKGWDFAIEEIDFEMNLDGSMTWKF

SEQ ID NO: 7622 - protein, 1122 aa, unidentified
  REGION 1..1122: note = Description of Unknown: Cas Enzyme sequence
MAKILGLDLGTNSIGWALIDETANKILGIGSRIFPMGVENLGDGDNEISKNAGRTGARGVRRQFFRRRLRKKVLLKALSEKEMCPMTAIDFDNWKQTKQFPSDKLASWFALNPYELRNNALTDKVSLEEIGRIFYHLIQRRGFLSNSRKGGSDDGAIFKGNPKEGKIGIIETQENIQDKTLGSYLFEIYPKENQPFQDGLERIRNRYTTRKMYVDEFEMIWDKQKQFHAVLNDELKQGIGGRKLDGYKEDGILFHQRPLRSQKHLVGNCSLEPTKTKCPLSAIPFEQFRVWQWVNTVEYNGRKISHEEKEKIVLFLYANEKPDFKKIRKAIGKESAEFKFNYKDDDKIVGTHTISNLSNKKYFGNKWFEFSEKEQEDIWHVLYFFDSKSNLKEYAIKNWWFTEDQAITISKFNVKDGYSSLSRKAILNILPFLQMGLTYDVAVVLGGIKNTFGNEWEKLSEEKRNYLTDNIEGIVRSKTKGGFIEIIKGILRDDYGVSDNQMRKLYHHSATIDVAELLEKLPMGKEADKQIQAIRNPIVITALFELRKLVNELIDEHGTLDEIKVEMARDLKISKSQRNTVRRDQKRLERENDRIKEEVLKYTHLSHDNILKFKLWEECKKTCPYTGKAISVTQLFSGEVQIEHIHPWSRSLNDSFANKTLCYADENRKKGDKTPYEFYGSDELNWSGIKERALKLFSDTAAYPKAYQKFKRFVQVKFDDDFSSRQLNDTRYISKEAKDYLVLICKKVNVSPGQMTANLRQKWGLNHILNAENDSKSREDHRHHAIDALVMACGKTSYLQELSRWNRYNRKPELKNFPLPWDGFNFEAEKAVEKILVSHKRIANDVTVRTHKCEKNGKTHVNFGVAARGQLHKETVFGKRDFNGEEAFHVRKAIDSLTTLKQIEKVVDESTRILILERIQELGGFVKDKVPANTFFIVDENGIKKPQIFLPNKNGAPVPILKVRMKENFSGAEKLKENVNQWVNPRNNHHVLIYKDEKGNLKEEVVTFWTVVERKRTGEPVYKLPIDGKESISTLHINDMFLLGLKDDEINWENLDYEELKEHLYRVQKLTSGDYFFRKHKSSTVTDDDYKQIRGFGEGKTGWITFNPIKVKISVSGKIQKL

SEQ ID NO: 7623 - protein, 1516 aa, unidentified
  REGION 1..1516: note = Description of Unknown: Cas Enzyme sequence
MKKILGLDLGTNSIGWALINQDLNKKEGEIIDLGSRIIPMSQDVLGMFGSGVSISQTAERTQKRGVRRLVQRFLLRRERLHRVLNILNFLPEHYSNSIDFENRLGQFKPETEEKLPFFKNKNDKNEFIFKESHSEILGEFRNNFPEIKKVPYDWTIYYLRKKALTSKITKEELAWILLNFNQKRGYYQLRGEDEEIKPNKLEEFHSLTVSDVIFGDQGKDGIWYNVILENGWIYRRQSKVSLNNWIGKTKEFIVTTDINDNGTVKTDKDGKEKRSFRAPKEDDWGLVKKRTEQTIGEDQTVGCYIYENLLKNPSQKIRGSLVRTIERKYYKKELKEILQKQIELNPDLFNETAYQQCINELYANNEAHRDTISKRGFLYLLMEDIILYQRPLKSKVAQISNCQYETRSFFNKEKNELVIQPIKCISKSHPLFQEFRLWQFISNLKIYQKTATDNIDVTNDFIKSENDTLQLFDFLNDKEAVDQDSILKYFLKEKGLKGKDLTVEVDKYRWNMVEDKTYPCNETRSQFLTKITKIDGIDKSFFNFKNSLALWHILYSVSDKIEINQAIKKFITKNNLHSECSDAFVKIKPYKSDYGSYSEKAIKKLLPLMRRGKYWQEDAITTVIKSRIEQIKERLQIINFDDKKIIDVIDDDITQAILKSFIKTTNFQSGLNTYQACYLVYGRHSESNDQDKWSSPQDITWYLDNKNPNGFKQHSLRNPIVEQVITETLRTVKDIWQYYGNGDKDFFDEIHIELGREMKNDSKTRERISSQNSQNENTNMRIKAILQELKEEDIHVRPYSPSQQEILKIYEEGVFGNESRKEKLDEIEKIRRNNKPSKSDIQRYKLWLEQGYISPYTGQTIMLTELFSTKYEIEHIFPQSRFFDDSQSNKVICESEVNKLKDNKTAMEFIIQKSGSIVTLSNGKNVTLFTTDNYKKHIETYFSKNRTKLKNLLSEEIPESFINRQLNDSRYISKVIKMYLSKIVRDDKNGAIEAEATSKNVIPVTGSITSKMKQDWGLNNIWNDLITPRFERLNQITNSLDFGQWENKEGKRVFQITVPDAIAKGFSKKRIDHRHHALDALVIACLSRTHINYLNNLNAKDENDKTTKHELRSKICYKTKPDQNGSYKWLFHKPWETFTENTKEKLNTTVVSFKQNLRVINKSVNKYQSYKDGNGDLRLDKNGNAKKEFITQTKGDNWAIRKPMHAETVSGKVFLKRIKQSHISIANAIEQIELIVVKEVKKQLAAKIKQYPNNIEGLKKHLKAFPVRIDGKAIDKIQIYETIEATATRERNNLDITFDEKKIKKITDTGIQKILLNHLKQEIYQNGIDESGKKIAPQEAAFSEIGIEELNKNIKFLNNGKNHQPIKKVRVFEESKRFPLGQTGNKADKYVEAAKGTNLFFAIYQDEKGKRNYKTIPFNEVIERQKQGLSSALEIDENGNRLLFTLSPNDLVYIPTNDEKENLAHLNFDKLSKEQAERIYKFVSCTSGEGHFVSNNYSKEIISNENGSNNKNERML

SEQ ID NO: 7624 - protein, 1107 aa, unidentified
  REGION 1..1107: note = Description of Unknown: Cas Enzyme sequence
MKFKHIIGLDIGTNSLGWCLLKEFEDGRIEIVKTGVHIFPIGTIVDDVSNKEKTKNEQRRSYRSASRMRYRFKLRRENLKEALEKLGMLPDYSKLFKPHSKAEKKKLPNYLRGQSFDLYKLRADAINPENKIALQEIGRIFMLLNKYRGFKSNAKKLGVTDKEVGKVEDGCKQLQAYINKSGAQTIGEYFFKMHEKAKELYDTDKWHNFNEPVDERAYNQESGEFILFNSNGIRRHHGRYTLRDMYHLEFDKIWAAQKNHYPELFTGSKAEYDEILKKPYQEKITTLKEFKKTNYWHIREYCIYYQRPLKSQRRYISNCQFERGQFEIKPYLIVEDGIEKQKEERHWTKKAKKACPRSHPLFQEFRIWQKLHQVRYSSVVEDTYRKALKNEWLPIVAYYLNENNEISLSKPTKKNQDGYWIGRLLLDNGLIKSTDGYNFFIDEADEDVDGDDKNENKILGNTTYARFKEALGIDLFEKLKNETIEKQEQINESTWRTVTESRLLQLWNIIHQSKDGLFKEDDWLMDILTEPTKWNFSKEQASKVLELGLQPDYASYSSKVLKAILPFMRQGLNEHESLKATGNSYINEDNTVGEKVQLRDKISQLTYQELRNPVVERALSKTVKLVNAILEKYKSEIDRNSLEIRIESTRQFRKPRQERENERRKNADKDKLREQYAAYLTKNKEKLGFKKDIYKHDPIVNKYELWLQMNLNETDEEFINEFKAFSKITRQEDKLKYKLWFECGRRCPYTGQIINFTDCFSSEVEIEHIIPLSRSLDNSFNNKTLTYRATNAAKGGLTPLEYLSKIGGDAIKNFKTNINGKSNAFSDSKKELFFADKIPADFSNNQITNTSYIAKYTRRKMQEVCKNVQFTNGSATSELRSFDWGISNLLDKIRYEEDYKINIDEYYQNFYRIKKEFTNWCKTKHKTSDLKINWYKLSENDDLKQYTAITKNDLLYWDEGIQKFNEFRNKSGKKDRSDHRHHAIDAFVTACCSPKIIKELSAYNAIRESQHIRDRDKIERAFNYEQLKEAIASILVSHSEKQTLIKKRKNRIKTKEGIIEHINYAPQGKLHEESFYAKRNGATVRRVELFDDQRKEKALFTDITKLD

SEQ ID NO: 7625 - protein, 1084 aa, unidentified
  REGION 1..1084: note = Description of Unknown: Cas Enzyme sequence
MANVLGLDIGANSIGWALLDESENAGAVMAMGTRVFPEGVAREKSGAEIPKNEQRRIARGIRRQIARRARRKRVLRAALVQAGLYPQHLDEQVTLGGLDPYILREKAVSERLTPHELGRVLIHLNQRRGFLSNRKSDRGKNAKESSETLQQISALAIAIGENTLGQHLAEIRSHNQHDRLRERRTAREMFVREFDRIWEFQTPFHSTLLTEELKYGATGKLDYPRKPKDLPHRKTNSLLQFVGLHGILFFQRAIYWPKSIVGICSLEKKEKRCEKADRRIQKLRLLQDVNNLRIQDARGKERKLLSGQRAALVEYLSINGELLFEDLKKPLKAVTKTTKKPTKITIEGLKHVLALEPGDLFNLERGKKPKLLGMITDVRLAHKNLFGAAWFERPEDEKNRIVRSIIDDEEHDLRHKALTSWGCDAALVEKLVKLDLGDGRAAFSLVAAEKLLPHLEKGLGLMGNDASDSALHAANYLRDDQKVINQRDNLPAPPDDIRNPLVMQALHEVRKLINAIIAEYGKPDAIHIELAREVQGGTNQRKEYTERIREREARRDVAAKQIQEAGQAVKRRDIDAVLLWKEQQERCFYSGRTISLAQLLSDAVEVDHILPYSRSLDDSLMNKVVCFQDENAAKGNRTPHEWLFEQDHQKYEEILQRAGNLPIEIRNGKRKKIAAENVVIEDFLARQLTDTAYITRQVHQYVRVLGCDVVCTKGQCTSELRRLWGLNDVLRTDGIKQKSRDDHRHHAVDALVIALTNRRRLQQLAHYRGIRIPILKKAAEREAFPVPWEHFRSEAQEKIDEINVSHRPVRRVSGALHEETIYGPTSKPERATEAARPHAKGWIENPGVFVSRVKLEALTLSAVGRIRDERVKELVVERLRSRGIAISVNNNDDDDAAEAKGNIPKSVWDPPLRMIARGEDPSTSTAQIIRKVRVTKTDQTIVPIRENGTKAFVKTGSNHHTCFFKAPGKKPGKPVIVSVTVSMLEAAARLRRREEIIQRVHPTIPSAQFLFSISKGEMVEGTIGGTQGLFRFIKIASTSGQMIFSLHTDARVSNKRKEFSAQPNTLKATKVTVDFLGRIRRAQD

SEQ ID NO: 7626 - protein, 1024 aa, unidentified
  REGION 1..1024: note = Description of Unknown: Cas Enzyme sequence
MAQMRYRLALDLGSTSLGWAMVRLDARNAPCAVIKAGVRLFSDGRNPKDGTSLAVTRRDARAMRRRRDRLLKRKARMQRALIELGFFPAEEAQRKALESLNPYTLRAKGLNEALTPAEFARALFHINQRRGFKSNRRTDKVESDAGALKQAISGLRQALVKDGCRTIGEWLERRRLAGETQRARYRERREITNTGKNKVVKSYDLYIDRAMIEQEFDVLWSKQAELNPAQFLDTARTRLKDVLLFQRKLRPVKPGRCTLIPTLPRAPLALPSSQRARIYQELNHLRVLSASLGEQMLTLQQRDTLAAALDKHSKRSFTQIKKLLGLSGAVQFNFEDPKREELKGNTTNAILGDSKHFGATWFEFSAAQQDAIVQRLIADESEAELIAWLQAETGIDEPRAERIANAGLPDGYGSLSAEALARLLPALRAEVITYDKAVLAAGFEHHSQFSAAASGEILPALPYYGEALQRHVGFGTGAPEDSPERRYGRIANPTVHIGLNQTRLVVNALIQRYGHPSEVIVEVARELKQSQAQRKEENQRQAERQTRNQKYRAEIANHLGISEEHVKTGDLQKLQLWEELNLKNAADRRCPYSGVQIGFAMLFSSEVEIDHVLPFSMTLDDSLNNKTVALRQANRIKGNRTPWQAFGEQAQVGFDYAAILQRAEAVPQGKRYRFAPDGYQQWLRDGDGFLARALTDTRYLSRVAREYLSLICPHGTRVIPGQMTAKLRGKFGLNSVLGLNGEKNRNDHRHHAVDACVVAVTDQGMLQRFAQASASARERQLDRLVEEMPEPWESKGLTGGTYREHVKRAVDRIWVSHKPDHGFEGAMHNDTAYALLGEGRVGVHKTIDGVRTYEEKPLKVIPFTSAKAHARHGLLADGSLRPYKGYLGGSIYCMEIVRNEKGRWESEIISTFQAYQIVKTSGPQRLRHSSLSMSGKPLVMRLLGGDALRLIVDDRLRTMRVVKMTSNGQIFMCELNEANVDARNTNKSDPFAYTSKYAGSLQKAQGRRVTISPIGEVRDLGFRP

SEQ ID NO: 7627 - protein, 1452 aa, unidentified
  REGION 1..1452: note = Description of Unknown: Cas Enzyme sequence
MANKTILGLDLGTNSIGWALIEQNFEDKQGKIFGLGSRIIPMSQDVIDNFGDGKPTKTQTSERTNFRSSRRLRERYLLRRERLHRVLNILGFLPKHFSDQIDFEKKLGQFKSELEPKLVYNNKKFIFQDSFNEMLEDFKTHQPSLIANDKKVPYDWTIYYLRKKALTQKIQKEELAWILLNFNQKRGYYQLRGEEEEENPNKRIEFYSLKVIEVKADEQQKDKDDIWYSMVLENGWIYSRSSKTPLFDWKDKTRDFIVTTDLNDDGEIKRRSFRAPSSDDWTLLKKKTEQDIDQSNKTVGIYIYDSLLQNPHQKIKGKLVRTIERKYYKEELVAILEKQIQVHPELKDDSLFADCIRELYRNNERHQSTLKGQSFLQLFVNDIIFYQRPLRSQKSSIGNCSLEKRKFRDTEGVEQTVALKAIPKSNPVFQEFRVWKWMSDLAIYRKDDDTNVTNQFLPSAENYEELFKELFDRKEIKQETLLKYLIQQAGLKGKSASIEAAKYRWNFVEDKIYPLNETRAILANRLTKVAGLPENFLTKETERHLWHIIYSVTDKIEYEKALLSFARKQQIDEATFLASFKKIPPFKPEYASYSEKAVNKLLPLMRLGKYWNWESIDANSRDRIEKIINGEFDENISARVREKAKLLTEHNHFQALPDWLAKYIVYGRHSEIGDISKWNSVGDLSKYLEGFRQHGLRNPIVEQVVTETLRVIKDIWQRYGNGAKDFFDEIHVELSREMKNTAKDRAKLTDQISENENTNLRLKALLVEMMQQGDVDNVRPYSPAQLEILKIYEDGVLNSDIEVPDDILKISKTAQPTSKELLKYKLWLEQKYRSPYTGEMIPLTRLFTPSYEIEHIIPQSRYFDDSFGNKVICEAAVNKLKDNQLGFEFIKNHHGEKVETGFGSTVKILEESAYQDFVKVHYAKSRGKRAKLLIEEIPEKMIERQLNDTRYISKFISSVLSNIVRADTNDDGLNSKNILPGNGKITSQLRQDWGLNDVWNDLIFPRFERMNELRKTDAFTAYSKVHQKQLPSVPLEFSKGFQKKRIDHRHHALDALVIASTTRNHINLLNNQHANSDIKRYDLQRKLRKFEKAKYFSGKENRNIERDVPKEFLKPWNSFTSDAKMKLETVIVSFKQNLRVINKATNKYESYKDENGNLRIGKDGKPQKGLIPQTKGDSWAIRKSMHKDTVSGKIDLPMIKTKKGRILTATRKSIDTSFDDKIIESITDTGIQKILKNYLSTKEGNTELAFSPEGLEDMNKNIEKYNEGMPHKPIFKVRIFELGSKFPLGQTGNKKDKYAEADKGTNLFFAVYWDEEKKKRNYETVPLNEVIEHQKWRATLTREQQKQTPMIPLNLENGVFLFSLSPNDLVYVPEIHEDTRKSNFKPSGIYKVVSFSGNQCFFVKEEVATSIVNKAEYSTLNKMERSIDGKMIKESCIKIQVDRLGEITSKVF

SEQ ID NO: 7628 - protein, 1008 aa, unidentified
  REGION 1..1008: note = Description of Unknown: Cas Enzyme sequence
VIYHLCKHRGFHWTSKAEEAKADSDSEGGRVKQGLKGTKALMEEKGYRSAAEMILAEFPTAQRNKRGQYDKALSRVLLGQELALLFATQRRLGNPHASERFEALILGNGDQRSGLFWQQRPALSGDALLEMVGHCTFERSEKRAPKASFTAERHVWLTRLNNLRIVDDGRARPLNKAERAIALNLPYQTENFKFKSLKNALVRAGLWTADTRFSGMSYPSPAQIEEGKAKDPEDQVLVKLSAWHELRMAFKREGQDALWQRISMPALEGQPELLDQIAWVLSVFKDGAEVTEQLRKLLLPDPETSVAILERISFDKFSALSLKALRRIVPLMEQGLRYDEAVAQIPEYGHHSQIAKPTGTKHLYLPPFYENERKYNGKSDRVGSMKFREDGNIPRNPVVLRALNQARKVVNALIRLYGSPMAVHIEMARDLSQPMDERNKVKKAQEEFRDRNAKAREDFEKDFGYKLKSAVFEKWILYREQHGQCAYSQQPLDIARVLDDPNYAQIDHALPYSRSYDDSKNNKVLVLTRENQNKGNRTPFEYLTSFPGGEDGERWRNFVAWVQQNKNYRMAKRNRLLRKNYGQEESRGFIDRNLNDTRYICKFFKNYVEEHLQLAPREDGDTNRRCVVVNGQLTAFLRAKWGLTKNREESDRHHALDATVVAACTHSMVKALADHSRRKELAFLQEGFPDPETGEIVNPAAFERGRQHFPEPWAHFRHELQSRLFTDDLAKLKEDMRQLGTYSEEDLSQLRTVFVSRAPQRRNGGAVHKDTIYAQPERLKAKGGVIEKVPLSSLTLKDLDRLVDPHRNVKLYEAIRQRLVAHGGKGDKAFGPGNPLRKPDKNGLPTGPLVHTVKLVRDKQTGISIRGGLAKNDSMLRVDVFAKAGKFHLVPVYVHHRVTGLPNRAIVAFKDEEEWTSIDESFSFLFSLYPNDLVRIKLKKESFIGYYSGTDRSTGAINLWAQDRSSTVGVNGLIRGIGVKTALTVEKLNVDVLGHIYPAPPEVRRGLA

SEQ ID NO: 7629 - protein, 968 aa, unidentified
  REGION 1..968: note = Description of Unknown: Cas Enzyme sequence
KDGSSLAVTRREARSMRRRRDRLLKRKARMMRALIEYSFFPAEEAQRKAMTTLNPFALRAKGLDQALLPAEFGRALFHINQRRGFKSNRKTDKKDNDSGALKTAINKVRATIEAEGCRTVGEWLNKRDVAGLTVRARYHQDKIIKDDGKSKIDKYYDLYIDRAMIEHEFDVLWAKQAELNPALFTETARADLKDVLLHQRPLKPVKPGRCTFMPDEERAPLALPSTQRFRMYQEVNNLRILRDGLKEEPLTLKQRDDLIAALEEHNKRTFTQIKKLLGVGGAVKFNFEDPKREEIKGNTTSAVLGKEEHFGQAWFKFDETKQDAIVLQLVKEENEAKLVRWLQNETGIDEKRAEAIANTGLPEGYGSLCALALGRILPELRRDVVTYDKAVQAAGFDHHSHISSSATGEILLELPYYGEPLQRHVGFGSNDPKDSDEKRYGKIANPTVHIGLNQVRLVVNTLLKRYGHPSEVIVELARDLKQSKDQRDEENKRQTENQKRNKRLREDVARVLGSSEERVKRADIEKMILWKELSFDPADRHCPYSGVQISATMLLSDEVEIEHILPFSQTLDDSLNNKTVALRQANRVKGNRTPWNAFGAQPTAGFDYAGILARAEKMPKAKRYRFAEDGYQRWLKDDAGFLPRALNDTRHMSKVAFEYLKLVCPNTRVIPGRMTAMLRAKFGLNDVLGLNGEKNRNDHRHHAVDACVIAVTDQGLLQRFARASASAREQQLNRLVENMPLPWESYREHVQRAIEAIWVSHKPDHSHEGAMHNDTAYGLRGEGKVSFHKMVGGVRTQIDDNLKVIEITCAKATDRHGLLSNGEPKPYKGYKGDSNYCIEIVRNENEKWEGEVISTFDAYQLVREHGVARLRNPALSVSGKPLVMRLMIDDAVRLDVDGQTRTMRIATLSGNGQMFMAGTSEANVDARNRNKEETFAYVSKYAGSLQKSNARRVGISPIGELRDPGFKG

SEQ ID NO: 7630 - protein, 1017 aa, unidentified
  REGION 1..1017: note = Description of Unknown: Cas Enzyme sequence
PCNETRSLILSKLSKIENIKSNFLSKEVEESLWHILYSVNDKLEIPKALKTFAKKYIPVDNLVDEQVDECVDAFVEQFKKFPPYKNEYGAYSAKAIKKLLPLMRMGKYWSEAAIHEQTKDRISKIITGEYDETIIDRVRDKAINLKEIEDFNGLPLWLTSYIVYDRHSEDGDIKKWKTPQELEAYLKEFKQHSLRNPIVEQIITETLRVVKDIWTIYGNSADNFFDEIHIELGRSMKNNKSDREYITTQMLENENTNLRIKALLAEMLNDIEVENVRPFSPSQQEILRIYEDGVLSSTTIVPDDILKISKTAQPSKNDLIRYKLWLEQKYRSPYTGAIIPLNKLFTTAYEIEHIIPQSRFFDDSFSNKVICETEVNKLKDNKLGLEFIKANRGQIVTLNYGQTVEILSIEAYEQTVNENYAKSRGKLKKLLLEDIPEKMVERQMNDTRYISKMVKNLLSNIVRAEIKDDGTTSVNVLSSNGQITSSLKQDWGLNDVWNSLIAPRFERLNKLTNSSNFGSINEKTQKFLPTVPLELSKGFTKKRIDHRHHALDALVIACATRNHINYLNNQNALEKGKNKDQKQKSREDLKHKLCYKKYNEGSDSNYKWAFKKPWETFTQDTKEQLLSTIVSFKQNLRVINKTVNKHEKWVVKNGIAEKITVTQTKGESWAIRKPMHKDTISGLVRLRFKKTVQLSAALDNWQDIVNADFRRLIKKLIDEKYDKKAMQKHFKACNNLWNDIDIAKVEIYYWDKENVASRVKLDESFNETKIESITDNSIQKILLNHLKSAKYQNIADEKGKAILPETMAFSPDGIDELNKNMQQLNNGKFHQPIFKVRTYEPKGNKFNVGNSGNKKDKFVEAAKGTNLFFAIYTDANGKRNYKTVPFNEVVESQKLSAGLKDKTTSVPAINENGDNLIFQLSPNDLVFIPTQVEIENPNLINLGKLNHDQINRIYKIVSFTGNRLYGIQNNISKAIIDKIEFSQLNKMETSLEKISIKEFCWKLSTNRLGIISIKQKV

SEQ ID NO: 7631 - protein, 1111 aa, unidentified
  REGION 1..1111: note = Description of Unknown: Cas Enzyme sequence
MTQYIFGLDIGIASVGWSVLNDKRIVDLGVRCFDKAETAKEGDPLNLTRRQARLLRRRLFRRAWRLTKLARLLKREGLIDDAKLFAKAPSFTETDTTGKRLMTSAWELRRQGLDRLLNPTEWARVIYHLCKHRGFHWTSKAEEAKADSDSEGGRVKQSLKGNKALMEEKGYRSAAEMILAESPTAQRNKQGQYDKALSRVLLGQELTLLFAKQRQFGNPHASERFQALILGNGDQRSGLFWQQKPAFSGSDLLNMLGRCTFEKSEFRAPKASFSAERHVWLTRLNNLRIVDDGRARPLNEAERALALNLPYQTENVKYKTLKNALVKAGLWAADNRFSGLSYPSPAQIENGNAKDPEDQVLVKLSAWHELRLAFKREGQEALWQRIGTPALDGQPELLDQIAWVLSVYKDGAEITDRLRKLPLPEPETSVAVLEKISFDKFSALSLKALRRIVPLMEKGLRYDEAVAQIPEYGHHSQIVKPDAAKHLYLPPFYKNERKYNGKSDRVGSMQFREDANIPRNPVVLRSLNQARKVVNALIRLYGSPMAVHIEMARDLSRPMDERNKVKKAQEEFRDRNAQAREDFEKDFGYTPKSAVFEKWMLYREQHGQCAYSQQALDIQRVLDDPNYAQIDHALPYSRSYDDSKNNKVLVLTRENQNKGNRTPYEYLTSFPGGEDGERWRNFVAWVQQNKAYRMAKRNRLLRKNYGPDESRGFIDRNLNDTRYICKFFKNYVEQHLQLAPREDGDTNRRCVVVNGQLTAFLRAKWGLTKNREESDRHHALDATVVAACTHSMVKALADYSRTKELAYLRDGIPDADGVIRNPTAIDKGLHRFPEPWPHFRHELQSRLFNDDLAALRDDIQRLGTYSEEDLKSLRTVFVSRAVQRRGTPAIHESTLRSPKYIADQKSAVRLPLVKLTPAKLEEVIEAHGRNKTLVDALRQRLSEHGNDPKKAFASPFYKPSAAGKIAPLVTSVRIVTTQRTGIRLVNAIAELGEMTGVNVYKLKKGYFVDPVYPAPAEARLNNKPHPPDAEYQFSLTKNDFVEIQLGDELCRGYFVMYESDGRMTLRAHDQPQPDKKYFRKGIAGAKLIRKFNVDVLGHIYPAPPEVRRGLA

SEQ ID NO: 7632 - protein, 1065 aa, unidentified
  REGION 1..1065: note = Description of Unknown: Cas Enzyme sequence
LGRTKAIAALTALLGIQIESSNDSGRTLLETRARAAREQIDLSDLIRVFIRLGKRRGYGGEFRPKKEGAKLGEVEGGNHDLKTEMAALAQSKGFETVTLGEFLYQRWLDGKPTKLKIKEPEDKTTEGKNLYALRSQLIAEFEQIWQAQSAFYPILNPLHEGKSLKDTFYHAIFHQRPLKAVGGMVGQCSLEPTLARAPRAQLAFQHFRIEKTLADLRWGAGKRAEKLSAPQKAVIRQLCNEKEVVKFDAIYKALEAEDCQKPETKGLNLDRLSRDEIPGNKTNQVFRKLNLGDEWQALDDRTQIQVINFLADLGSPEQLDDPLWHTRFAKADGTMRQLPHAFVDFVNLVKVHGKFDRLSKMGFEGGRASYSIKALNKLIDWLDTPWWPDGWQGEMRSDEDAAIRVCYPESFNKPAALKDKLDFAPSTGNAVVDGSLRQMRYVLNRMMADLGAQPEQMVVEMARQMSVGVSKRNERESENNKNRTARIKAETEIRDHGVTVTPSRVRRYLLWVEQGKGHCPYCTKPITLSDALNGAETEYEHILPKSLTQVGLKRSEIVLAHRNCNQEKGNNTPYQAWGNDDNRWQVIQIRAKYFADNRQYRKAKLLLLADFEAEVLTDESIDGFADRQFHQTSWIAKEAAQWLQAVCKTPVSISRGELTAMQRRKWKLETVIPQARVEEGLPILDEEMQVISVEDFEKYRDVWEGHKVLDNHGHLDKSRHTDRKLNKRIDHRHHLIDAITIGLTSRSLFQNMARQYKIDSEREARGQKPRLEVGEPPIKNVREIALAAIRECPLSIKPDRYPDGAMFKDNPYGRAYNEKAEQFMLTKRYKLIDLVADLKEKKAKDGAPKKTIEQQARENILSIVSAKIRNIVLVEFEKRLNSGKTIIEAMTEPVYQEAYLSAKTKPLPIKRVVCFTTYSAEEASPIEHPNNRKLVEHPNCKKPVKPLQKFIRDDGYAYMEIVKNENGVAKARLVDIQEGMQEKGKKAPQNITRYYKGDVVEDLTTGLKYRVKKFAAGARENPRSKIIAIRYTESASNIDLVKKAAGRIEFIDDGLLVIRLINQNV

SEQ ID NO: 7633 - protein, 1344 aa, unidentified
  REGION 1..1344: note = Description of Unknown: Cas Enzyme sequence
MEEKNELIVGLDVGSNSVGWAVVQMKGDRLEKLHGMGSRIIPMGPELKEYQEGKRITKNAARRQKRSMRRNHQRYKLRRANLVDGLKVMGAWPEGLGEPAEPDARPMTALQLYALRARAVQDPVSLQELGRILYHMNQRRGYKDIGDLMNEQDGAVTSGEGKDDGKRIEKVFVEEVEVDDEKGKKVKYLVRLADGREGTCTLDVIKDMVGTEQELEVTTKESKGGTRYEFRLALKTDWRKGMESLNEAIDASGLTPGQFFHQQIKHDPFYRIKEQIVLRDTFKDEFNKIWTRQLKKDANPSLAEEQLRDSVVKALIPNNQVEQTKWLKKDLGQFIRDYVIYYQRPLKSQIKDKGICRFEPQKAVMPVSSPIYQLFRIWQQVNNIRLIDRYSKEQELAASERNEVVRHLLQHKDLKADSLLKTIGRKDEPLENNLRANLPGHQTLDKLRPLLKKTDLWGRLLSEAELIKGQQNTLLFRIWHVLYSVPMEADRVAALKALNAIPEDLVGTLAKVRFERKHGAVSARAASRILPLMVCGETYAWSNVHPKDQARIERMLNGEVDEGIRDEVRTWFLNHTSADQFQGLAYWQASSLIYGDHRAAGAKPFEKPDEIKTLSRGFLRNPVVEQVVNETLMVMRDIWSTYGRPTSVRVELARELRQNMQERERTYANNKRRDKDRKAVIETLVREFGRPKPGRKDIERYELWVQQEHRCMYSGRMIEKSQLFDSRDTDVDHIIPRSLFYDDSIQNKVLCRRDENAGAGAKNKQLAAPYMKAKGPGEWEAYVDRVNKLRAGRGKKKYLLAEEVPENFINRQLQETRYIGTKVTELLQPICRVNSTLGIVTDTLKNEWGLDKVFKEMMIPRFERLEGIAKRKLIEEISSRNGHSDWKIEGYDKRIDHRHHALDALVVALTRQGYIQRLSNVNQIVASGEEKEAMKRPTWYPLPHPDLRNLVREQLDRTIPSIKNRQRLLTKTTNHTRFLADPVTGKTELRKQVTGDLRAVRGPLHNEQPMGEVREQRKWPLKDVLNALSEKPDALEALKPVQRGDVDYGKRFLAHEHERALLHAHLSKHDGSVEAMKKALKKDPFVSAKNEHVEHLTVLVSKYSITRNLSPLFTEKMAGKIIDAQLSKRVTQHLAAYGNDPKKAFTAEALLVFNKDQRNPVTKVRCRMDDTTVGDATGRARLVHKGDPNRKQYVEKGENYALAVFVNEESGAREFKVVSFFDAVHRKQKGMDLVDPLPGYRHFLLRKNDMVYVPRPDEDVRSINWEQTDMVGERVMRLTQMSGNRNYFLRASISSVVSFSKEEMEFGSQNAAEFEDRDEPRTKIGSVCIPIQIDRMGRVKPLFD

SEQ ID NO: 7634 - protein, 1005 aa, unidentified
  REGION 1..1005: note = Description of Unknown: Cas Enzyme sequence
MRIIGIDGGIASIGWAVIQDETSILGAGVRTFDPPETDKERTPTNTIRRQKRGQRRVIRRRRQRMAQLRTLFAASGLLASATRDVLRQPGLDPWQLRADGLQRQLTGAELAVALGHIARHRGFRSNSKRDRGSNAASDTSKMLKVIDATRDRLQGRTIGQMFIAEFPNRKRNRDGDFSRSVLRRDLENEVRLLFSAQRRLGQKLASEALEERFASIAFTQRPLQDSESLLGNCPFEPDQKRTSRRSPAFELFRLLSRLNAIALTTGGQEWRLTPDQVAVVSADFGKQKKITYRSLRKSLDLDPRTRFAGVKDEDETRDVVARSGNAAEGTATLRGLLPGAAWEALQQTPDKLDRIAEVLTFRDDPDSIHLGLSEADVDPLILAAILQGVGDGKFANFTGAGHISAKAARRIIPHLARGLVYSEACAEAGYDHTARPEVRIKDVRNPVARKALSEMLKQVRAIVQAYGVPDRIHVELARDIGKGAEERDEITRGIDRRNKEKERVREQLRELLHVEPTGEDLLRFELWNEQNGRCLYSDEAIPCEAIVASNNSVQVDHILPWSRFGDDSFYNKTLCTAAANQAKKGRTPFEWFDQEKTQAAWAEFTARVEGCKGMKGRKKRGCYLRRNAAEVEEGFRNRNLGDTRYATRLFLDLLKRRYPDVLVLARPGALTAKLRRAWGIDDLKKDQAGKRREDDRHHALDAIVLAATSQSMLARLTTAAQRAERSGAPRGFDFAEVREPWEGFRDQARAAVAGVFVSRAERHRARGEAHAATIRQVRERDGKLVVFERKPIDALKLADLERVKDAERNGAIIASLRAWIEAGKPKEAPPRSPKGDAIRKVRLATDGKPAVEVRFGTADRGEMARVDVFAQVDRRGRRQFLLVPIYPHQVADRTNFPRPPCRAVVAYKDEVDWTPIADNAFLFTLHANSLLEVTKPDGEIITGYFKGLHRGTGAIAMAPHHNQRDIRGGIGAKTLLSIRKFHIDRLGCAHEVARETRTWHGVACT

SEQ ID NO: 7635 - protein, 1106 aa, unidentified
  REGION 1..1106: note = Description of Unknown: Cas Enzyme sequence
MNMASRKNAPDLQLAFDVGHSSIGWAVLQNQPQLEVKGCGVVIFRADDCLASTRRQYRRQRRHIRSTRQRIKRMKVLLEHLGVITADQLNKPGCAWPWKLAARVLAGGKTLSWPELWDVLRWYAHNRGYDANRRWSAAEVEAEKEDAEKVQNAHTLMDESGNKTMAETFCAVCGVDPLGVKCSSNPEPAKRFKAKNAAFPRRIVEAEVARILRVHFGKLKGVDEKFAAALFSDWRAIPCADIKLPQRYQGGLLFGQLVPRFDNRIISTCPITGQKVPSRNTPEFLNFRWGMLLANVRVARLADRELKPLTAEERKELDGIMRKEGAMTAKQFTDAVEKVTGAIRHNLATMLMHPDAKEALVLDPVQECVTTEKPIPVKTLFAAVPTRIQKRARGQLRRGKSFTFAALYEASKQAGESVAAFDAAIQQLLDKASGKGRKKDKPLTRDELLAKSLSVRKLSGRAAYARPILAKAFAEVMTGKHPKEEGGCLFVTEQMRQAQLSRSLAKQTNNHLVRHRLLILERLQRDIIKEFADGDKSRVAQIVIEVNRDLREMSGKTAKERAQDLGSRIANHHHVAEKLEKAFAGQKFSGKPIAIGAGLIRKARIAEDLGWTCPYTGQKYEPINLVTRHVDKDHIVPRSQRMSDALEALVITFSAVNKWKGKRTALKFVEDEQGKPVPGAPNLSIVSLARYRDFVESLESFKGHNDDKKRKKHRKELMKVRDYEEGEFTPRDLTQTSQLVRLGAQMLKRAYSEEESQPVIVSMPGSVTGALRNGLKLLGCLSKACPHVLDGTGEVKTKTEIRDITHLHHALDACVLGLSAHFIPNNGSVWELIVKRNLSDAEKEQLRAATHGIFNYTSEGFRVADLSDPLKDQLRKRLAEKRVVQHIPKRMSGLRVEQNIWRVLEIKGNEVIVRQRIRQADGSRKKKEVPEKRVKLLGLVPLNGIGKLSANNGVLVIPDNYGVAILDHAKDKNDRFVIIPWHLVHKRIFKGIAGEKSLLDRNGRRMPRILRNGQIVRVAEGTYKGAWRITSIKNQKTGVKLNLGQPDTVNTEEEVLDLATAKKTRKVRADCRHEASLASIVSGGLQMLTLSLTGYPVQSTETDGKA

SEQ ID NO: 7636 - protein, 1081 aa, unidentified
  REGION 1..1081: note = Description of Unknown: Cas Enzyme sequence
MPESKENSYVLGLDLGPSSVGWALLDSQHRGFVGAGVRVFDSGMDEIKFAKGEQGASNNVQRRMARLHRRQLRRRAARQRDLFVTLQNAGLLPPEPRSGGSEARHAVLMELDRRLGTLWRERVRAENPAVVAPEHVLPYFLRARALDHFLEPFELGRALYHLGQRRGYKSNRREGRKAAAGDAAPAKKKREGTEEEERKKVLAEIQGLEREIAEKGARTLGEFLSRRDPSITRVRRLHTERKMFQEEFEHIWSAQQRHHPQALTPQLKTTLLRLLFFQRPISAGKPGMCELEKDCPRAPIYTLAAQRFRLLQKANDLAIVLPSGEKQFLTVEQRQQVLDKLENEGDLTFPRLRTLLGLPKTARFNLELNDETRLKGNRTNAALRKAFGERWQQFADAERKHFVRLWAEQEDKGELYQLALGEWGLDAEAARALAETEPEDGYSKLSLRAFSRLLPLMETGKPFKTAETELYGDRFSGKETKPLLPPVEKVLPQIPNPAVMRALTEMRKVVNAILREHGKPAQVRVELARDLKRSAKDRQRLMDAMEDQRMRRAKVVKRIEQEAGIPNPSGPDIERGLLFEELSECAYCGNSISFANLFSDARLFDVDHILPHSRFPDNSFANKTLACSTCNALKINRTPFEAFGANAEMWEKLQVRIGQKHKGNRFALGADKRRRFLLEKPEEVEAFSARHLADTRYITKMAARYLEELYGGRDKDVPWEDQRRRCVFASSGTVTATLRKAWGLESLLPRCESCARKRQKCRCDHRHHAVDALVITLSNDAAIRQLSAAAAAGDGRISGRVSSRTLQAPWADFVESLKPAIDGLMVSHRPNHRLPGGMHDETNYSSPKPHNGKQFAHVRKPVHLLTAKQIASGDVIVDKAARLAIQGKLAEVGDPKKLEGDPPCLTTRTGKRVPIRRVRIRTSAAVRPLGKGARERYVALRDNHHIALFSGPDKRGRPAWHGIVVSRLEAMERKRNCQQLIENELPGHERYEFLFSLMGGDMVEMKHPSPQGRQLFVVRTISEAANGRIELDFVRHNDARLVADMKASSDWIRIMRLNDLRELGCRKVMVDALGRVRSANG

SEQ ID NO: 7637 - protein, 1037 aa, unidentified
  REGION 1..1037: note = Description of Unknown: Cas Enzyme sequence
MAYRLGLDLGANSIGWFCLKLDAAGKPCGILDAGARVFSDGRKPKDGTSLAAARRLPRSMRRNRDRYLRRRSNLLNALTRFGLMPAEQAARCEVVCLDPYELRAEALTRRLDPFELGRVIFHLNQRRGFKSNRKADRRGDNEPGLIRTAARDLAARLGKDGHATVGAFLADRHSRREEIRIRLAGAGKTAAYPFYPLREMLEAEFDAIWQAQTGWNPALTTDMRDQLRHIVFFQRPLRDPPVGRCWLESGEPRAFRAMPSAQAYRIAQDLAHLRLSQPGMPGRELGDEERTLLRDHLLRGHNLSFDQVRKRLKLPAETDFNLASMRKQELVGAETAHRLGSKKIIGDSWHRRSREEQDSAVAVMLSAETDESAIAALAALGLEPAAAARAVGVNLPEGTTSLSLKAMRRILPHLDRGLRYNDAVQAAGYPHHSDQRTGECRDRLPYYGELLFERLGTGSGKPEDPTEKRWGRASNPTVHVALNEVRRVVNAIIDRHGAPAEIVIETLRDLGRSAMQKREAEREQKKNQEANDSRRKELAEMGLPVNGGNLMRLRLWEEQGADPKQRVCPYSGTLITPRMALSHEIEEDHILPFALSLDDSAANRVLVTRAANRQKSRRTPFEAFGHTPQWIDIQKNIEALPPNKRWRFAPDAMAKLAADGDFLARHLADSATIARLARIYLDVIAPGKVWSTPGRLTSLVRSKLGLDSETVLGKGGPRKDRTDHRHHAIDAVVVALTDRGLLQRISTAAGRSEEARGRLIDKLGEPWPGFVAEVGGVVRGIVVSHKPDTGWQGALHNDTAYGPLAATAKGEPNVVVRRPLEGLLEWSAEDVKKGVRDPVLAAKIVEALAAPDKPERKAALSALTHAGGRHVRRVRTVERLNNIGEIADRVTHTPYKLVKLNSNHRAEFWRLPSGEVSLAVVSTFDAAQEALARAHGKRPPKDLRPHPAAKLLMRLHKNDVVAVGAGSDRKILRVVKMGSGQVTLAAHNEGGNLKARDKAKDDSFKYLTAGASRLVELQARKVWVDPAGHVHDSGPWK

SEQ ID NO: 7638 - protein, 1074 aa, unidentified
  REGION 1..1074: note = Description of Unknown: Cas Enzyme sequence
DLGSTSIGWCILKIAGNEPSDIIDMGVRIFPDGRDAQSKTPLAVNRRQKRGMRRSLDRRKLRKKRLMDYLLSAGLMPTDRADRKELEKINPYQLRSDALDKKLSLHELGRALFHVCQRRGFKSNRKSDKKEKDSGNMKKSIAELSEKMEGIKARTLGEYLFLLGKTDVQKVNPQSAPIHVPLRVQATQVKGKNVYNLYPSRKMYEDEVSLVLDTQKKHHPELTEGVIAKIKDIIFFQRNLRPQEVGWCRFENGQKRMRKAYPLFQHFRILQEVNNLDLERFGEGEEGLTREQKIKLIKELKKSKDMTFNKIRKLLGLSDGAKFNLEAENRDRLQGDETAYAFSSDKKNECFGKAWLDLSPEKQDSIITKIMEEENEKALVSWLMDNFSVDEQQAENIANVSLDEDFGSLSLKAVEKILPHLEEGYIYSDACQKAGYHHSDFRTGEIFDELPYYGQLLENTVIGGSRNEKDKEQPEKYYGKINNPTVHIALNQLRRLANALIEKYGHPAEIVIELARDLPLGEEGLAELKSEQAKNKKRNDKINEELAKLGVKQNYINRLQYKLWEDLASDPAKRCCPFTGRIIALHQIFSGEFEIEHLLPFSKSFNDSPANKTLSHRDANRLKSNRSPYEAFGDSPLGYNWEEISARASNLPDNKRWRFYPNAWDLVKGKEGDIIARMLVDTQHMARVSKQYLSFICNPDKVWTTPGRLTAMMRDKWGLNDLLGEEDGQKERGDHRHHAIDAFVIACTTRGMLNKISGAANRMYENDALYSKRLKLVEKMPEPFAAYYQRIEDMVENIVISYKPDHGNAHRAITSERPFTVAPLHQETAMGYVGEGAKKGAGVYVTRMFLSQMLAKSDVECIADAKIKERLLEKLAGKEEKSEGWKKALQEFSDEWNIRRLRIHIEKTNDAMVGIRKKGKPDSEPYKYYAMGGNYCAEIFCPSKGKNAGKWDIEIIPDYYAHQKNFVQQWRKDHPTAKLMMRLQIDDMVAYEDDGKTIYTRVKKMSQPGRIYLRPHNVAKEQADKLSWGAFASGLQEKKARKISVDILGYIKDPMGKHDRADHRNNKGRLPSGP

SEQ ID NO: 7639 - protein, 1113 aa, unidentified
  REGION 1..1113: note = Description of Unknown: Cas Enzyme sequence
MKILSLDLGVTSCGYSVLHQIAPNSYSLIDYGVVMRDNPYDGGTQKDRREHHQSRSLIEKKKDRIKAVQKLFDNSGLSYHDKKFYDIWKLRAIDVFERRLENDELFALFRFLAKHRGYKSLKIEDLIAEIEAKEKIGDCDSGEIKIPEDTQKFTETLAYLDAMICKYPDKTAAQVIWELENDRKNPTFRNHGDYRYMIRREYVAKEIDKIVRAQHEFGFFDNKNELIVFIEKLQEIIIEQDAVTLNPDNINNCLIYKDEKCAPVFSYSFDLFQLYKLVNDLKIDGVKITQDKREELLDTMLKSFRTFTCKASYSVKDFKKILGIDDANAKLNNYSESKKVKGKDTPNALLKFNFVHLLKKMDAEIIEVIFNNPLYVTILNEIATHIHMNVNPEMLIKEVGDTFQKHHLDFDDEQIKTFVLQLHKNKSSGTASFSLKALNDLIALMKEEKNESDAKEMLGVSKSEDYSHLLKGIKYLKPQNKQGQLQYEIDENRISNHVVKSLVSWALRVITDLHVKYGPFDSIKVESTRELSQPDDVKREIKKANDSNEKEWNNIKEKYKLHLQNLENSKTYLLKLKLWEQQKELGIYSHKSLGVDDVLSDKTEIEHIVPRACGGSNAEYNKAIDFKDENARKGNKLPLDYLSGDKREVYIQFVKELKETRAINFKKFKNLMAEELKDAFKEAKDDVSLHATSYTEKLLGEILKRYYPFTDTLKENQRVMHISGRATSYLRRILSIDSKSRDTNFHHAEDAIILGVMSKSYLQNISTNFEENYEMTEQNAKENFKKIVPLIDGAVPNEIFAHLRKSYLEDIETNPFYKDLNGNLKVPAFWVSKKPIGTKAHNETIQSKKNLAYYVPISSLLEKVKPNHKMSSDDFYKLFNKEVYEKVQVVWDNPNDYTAKAFAQKRDTVVNILNSSAFVSTKDEKAELDKKLRDIMSQPLHDVNGNEIRRVKRVGEKVSIPIRHGYAGNAPSMLAMRCKAETENRLFTERIDFKDKILLKKNDGTFIDIYNNDLVDIYTFEKKQVILKLTGLLRTFVINAKEDKMLKVKNPKFPIREDAQPKQYNSYVAVKKMCGIKKYKTDATGKVLGFYYLGRVLDDEKELFTKVLSYKAL

SEQ ID NO: 7640 - protein, 1471 aa, unidentified
  REGION 1..1471: note = Description of Unknown: Cas Enzyme sequence
MKKLGIDLGSSSLGWFLREDDKVLNNGVITFNSGMVKDKSGGYTSPTKDRRTARSKRRLIQARKYRKIELLKVLIDYKYVPLTENELDRWSKYEKGKVREFPENEDFKKWLSCDFTYKGGIIYKNPYMLRVAAINGKIDKHELGRALYHLVQRRGYKDIGEADGETKKQIDRRGESGFKTAMNENGGIISKALLNDFLVKGERARNNYPYRAEYEKELIEICKVQGFDINLNISKEYEDDFVRKVRKAIIWQRPLRSQKGNIGKCTLELSKPRCPVSHPIFEVFRTWQYINTIKTVEYIDNKRVVEDLPIDFKRLLFNEVFLKKDNNFKFEDIKKYLDKLFGEKKEYNYLNRGTGKYDSSVSGMPVCKGLIKYFGEKVEEEISIMHTYNIGTDGHKVHKDYSVYDLWHLIFATGKEFLQDFAENKLGIRSDIRIDKNGEEYKVNSIVKFKSNAFSTSYSNLSLKAMCKIIPFLQEGFIYDDAVVLAKIPENVENWEKSKSLIFKVVSQSNIKYNYQKDIIYITNSLIDKYKALGYNENLRINEKFAEHNYQYQLSKDDKSQVKKACVFYFGEKTWEQNQNKEKIIDEVALQYQEFFYDTRRDYRKVPLFTEILKEQLNKENIEIKGKLYHHSNRENLYPKPIYSKKHEKEILDIPFIDSIKNPMFNKAMSILRRLINELLVQEYIDEDGVIQPFIDENTEIIIEVARELNDNNRRIAIERYQNERRNKREKIRQFINEFKEKNKNYSTINTEEKIPLFEMWEEQTFDEALDEKGQKVKNRNTEEIRKENKAIKRYELWLEQKGQCMYTGRMIGISQLFSLDIQEEHTIPRSLLPDNTMTNLSVCYSNYNNDVKNSRIPRECPNYNRNMDISEIGSCTAIEPRLKKWQELRDHYKSLFEINSKPIGNEDENKKNKRIQNKHYYKMHFDYWRDKINRFTADEIKESWVRRQLTDTQMVSKYAREFLKTYFKKVLVQKGSTTADFRKIFGIQGEETKDRSKHTHHCIDAAVLTLIPTNSSKRMQMLKQLYKEEENKGSITRKKPDGLHDFNPQTLIDNIEKETLIVNYQKDKITEPTYRNVRKRGKFQYLKNNAGKYIKDENGEKILLKAKGASVRGDLFQQTFIGKIRSVERDENGKPLRNEKGNWKYKTGSNEFVYVERKPISEVKTEDIIDPDIKRLVKEQRQNGVDDHKIKDHQGKYIRHIRVKTKAGKKVKNRINYKSKHDYKNNFYSAAGEIPYAVFLTKKNDSDPKNPIRNMIPVPIHEVAQTYKEYHKFTPEAYLEKFRPEIKGYQNIKLLKVGQKVFVLKNDDEYDKIKSIEFQIDRMYKITQFSEGNIWLKYHLESRDVPTIKDSTKDIKSNIVYKIEERLGLPEIKEDLSTLDNKKRKKDFEDKMFKFSNLKDYRLNRLVEAIGEEETKKLKVRLDKYKAFSSSIELEGKTPLLKTSKNNWNFLFENYDFTIDITGKIEWIKE

SEQ ID NO: 7641 - protein, 918 aa, unidentified
  REGION 1..918: note = Description of Unknown: Cas Enzyme sequence
MSKILGLDLGTNSIGWAIVDKENDTFSLIDKGVRIFSEGVKTEKGIEMSRAAERTGYRSARKIKYRRKLRKYETLKVLSKNGMCPLLLEEVEEWKNLGFKNYPLNPAFLNWLRTSEEENVNPYSFRDKASKQKVVLFELGRALYHIAQRRGFLSNRLDKSAEGVFEEHNPQIQSFIEDLDAIDFILDELKDYFINLGIIDFAEKGGFKKDLDEGETKLKSLYNSLKAIIKKNENDILKCKEELIARLNKKEDLGKVKGKIKDISQAMLDGNFKTLGQYFFSLYNKGKIRNQYTSREEHYLEEFIIICKTQGIGSINENEKLAEKKFEGLAKDLYKAIFFQRPLKSQKGLIGKCSFETSKSRCAISHPNFEEYRMWNYLNTIKIGTQSEKTLRFLTQNEKLKLVPKFYRKNDFNFEVLAKELIEKGASFGFYKSSKKNDFFYWFNYKPTDSVAACQVSASLKNVIGEDWKSRIFTYKTLNAKKEEVTKSVDYQDLWHLLSVATSDIYLEEYAKDKLGFNDKNAKAFSKIKLKKDFASLSLSAITKILPYIKEGLLYSHAVFMANVQNIVDDEIWKDESQRKYIQTRIAEIVENYTFEKSQLEVINGLIKDSKLKEEYYSKEAESIYKKDLATKLVSFYKNHSIENESDQKNILDNLFPIFIEQLKKYEFIKIQRLDEKVLGFLNGKNEDGEVFCSNEKRLKKLYHPSDIEVFKKKIIKDDFGNEKAVLGSPITSSIKNPMAMRALHQLRKVLNTLIMEGQVDENTRVHIEMARELNDANRRKGIQDYQYENKKFREDAIKEIKVLYFEQCKKVVDPTEEDILRYQLWIEQDKCEIYEQGKNISICDIIGSNPSYDIEHTIPRSISQDNSQMNKTLCSKYFNREVKKQKMPIELSNYFEILPRIAHWKDEVYVIKLNWTF

SEQ ID NO: 7642 - protein, 1279 aa, unidentified
  REGION 1..1279: note = Description of Unknown: Cas Enzyme sequence
VQQGNTLDSSAYSLVVICLSLQIYKNKLYKLIIMEKILGIDLGTNSIGLTLREDNEFTWYGVYTFKKGVGEGKSGEFSFAAERTKHRSSRRLYNARRYRKWETLKVLIEFDFCPLSIENLNNWKHYKKGTGRTFPIDDTLFQQWIKLDFNHDGIPDITSPYQLRKLLINEKLDLSISENRYKIGRALFHIAQRRGFKSSRKSGANEKTAVYKGSNETKTIGRNEYENLIIEQGSLGAAFASLENQNVRIRNRYTLRADYQSEVQKILEVQKIKNESFCENIDKAIFYQRPLRSQKGLIGKCTLEPNKSRCPISHPKFEEYRAWAFLNNIKYRNKDTNKFEPIPLTLKEKLYKEKFFYKSKRDFAFKEIRKFINLNGGKDWELNYGTKMDEISVPSCFVSARLKSVFGENWNTYQKQIIRTNKKGQTESINYSIEDIWHILFNFEDEEYFIEFLTNIIGLEEEQIKELTTLFNSFPIGYANLSLKAINNILPFLREGIIYSESVILAKIPEIIGKKLFEDNKTEVLEAIQNKVEEIRSKKTVVTITNNLIFKYYALDFDQRFAWKNNDYKLTESDFKDIETASKEHFGDKTWKKLDLKLKEEILSEVSVLYQDFFASIKREHIAQPHLVNSVKEFLYQNFNTSTNVLNKIYHPSQIDIYPKKEGQEFLLSPKTAAFKNPMAYKTLYRLKDVMNYLIEKGIVDNETRLVVEIARELNDSNKRWAIEKYQRDRETENNEFASAIAELIKDPEFSGTADPNSNSDTDKFRLWIEQTENPDDIFKVIQNINKDKQLSVYQKDIQKYRLWKEQNCRCMYTGKIIRLTDLFDVNKIDFEHTIPRSKSFDNSLANLTVCYANYNRDIKKNQLPSELPNYSEEWNGFTAIQPRLESWEKKTNELYHQIDFWKFKSRTAMDKSDKDSAIQQKHLRQMQYDYWRNKVERFKQTEISQGFINSQLTDTQIITKYAFHYLKTVFNKVDVIKGSNTASFRKIYGVQSKEESKDRSVHSHHAVDAAVLTLIPSSKKREEILRESYEYEERNYGKQYHEKPFAGFHYSMIEELKKNILINNIADKDQTLTPGRKIVRKRGKVVWIDKENRIPKVAQGDSIRGELHLQTYYGKIKIASKDENGSLLRDEKRNIVYNQVDGKDEIWMVIRKPIDKVNFSSDIVIDESMFSFLKDQLASGVKQTDLVDFQGRKLRHLRCRVKAARGFMNPNNVTVVKEQVYKSDKDYKNFIYTDSGENYIFGLYENSNGREIISINKFEAATYIKALGIPADKKEVFR

SEQ ID NO: 7643 - protein, 1361 aa, unidentified
  REGION 1..1361: note = Description of Unknown: Cas Enzyme sequence
MKKILGVDLGTNSIGLTLRENDVLSWYGVYTFKKGVGEGKTGEFSLAAERTKHRSSRRLYNARRYRKWTTLKVLIEHDFCPMSIESLNNWKYYKKGIGRVFPINDFNGDDLPDFSSPYQLRRLLINEKLDLSIQENRHKIGRALYHIAQRRGFKSSRKQGANEKTAVYKGSSETKTIGRNEYENLIIENGSLGAALAYLEDIGIRVRNRYTLRADYFDEVKKILSFQKISINDFIEQVEKSIFFQRPLRSQKGLVGKCTIESNKSRCPISHPKFEEYRAWSFINNIKYRVDKDIEFEPIPLELKIKLYHEKFFFKSKREFDFREIRKFIQSNGGSNWELNYNQKMDKVSVSSCFVSARLKSVFGENWESFEKEIIRKNKKGEQTIKKYKVDDIWHILFSFEDEEYFEEFMLNTLELDENQVKELTLLFNSFPSGYANLSLKAINNILPFLREGMLYTEAVILAKIPEILGRKVFDSDKEIIFRAIKNEIEHNRHQKKIVSITNNLIFKYYALDFQDRFGWKDTSYKLDQSDLKDIEQAAIEHFGDKTWLKLEEDFKQHVLNEISSNYQEFFASTKREHIKPPHLVNQIKRFLNDNFNLRDKSLDKMYHPSQIDIYPKIDGQQFLLSPKTAAFKNPMAYKTLYKLRDVINYLIETEKIDEETRIVVEIARDLNDSNKRWAINSYQSDREFENREFANAISELIKDPEFVGVANPYSDTDLDKFRLWSEQIENYEDVFKSVSATKDDLQKYRLWKEQNCICLYTGKIIKLTDLFNTNRIDFEHTIPRSKSFDNSMANLTVCYSDYNRNIKNNKIPTELPNYEVDSHGYSAIKPRLKSWNRKLDHLFNQIDIWKKKSKNAKDKAEKDNAIRTRHLWQMEYDYWKNKLDRFTRTEVPQGFVNSQLIDTQIITKYAFHYLKTVFNKVDVIKGTQTAEFRRIFGVQPKDSFKDRGKHYHHAIDAAVLTLIPSVKKRQEILKKAYEYEEINRGKQYHEKPFSGFNHSIIEEIQKNILINNIAERDRVLTPSRKIVRKRGRIVWIDKEKRIPKIAQGDSIRGELHLQSNYGKIKIAANDENGSLKRDENGAIIYNQVDGKDELWMVIRKPIDSVNFRSDIIIDEHLAEHLRNQLNNDVKQNELKDFQGNILRHLRCRVKAARGFMNADNATIVKDQVYKSSKNYKNYIYADSGENYMFGLYENENGRSIVPFNVFESAQYLKYLEDVSQKSLFKSKEPIYIGRGKKVKEAILRHVFMVGQKILFYKNDKEELKDLEKSELSNRFYFVKNLADAKQGLIRFQHHLEARDDKQLIENFPVEEFGQKGKNGFSKFRTDFVAPRYLLSSGNFNFIIEGRDFEFKLDGSINFKY

SEQ ID NO: 7644 - protein, 1122 aa, unidentified
  REGION 1..1122: note = Description of Unknown: Cas Enzyme sequence
MSKILGLDLGTNSIGWALIDDKEDKILGIGSRIFPMGVDNLGDGDNEMSKNASRTGARGVRRQFFRRRLRKKILLKILAKYNMCPLTDEDFENWKRTKQFPSEKLLDWFTLNPYELRHKALSQKLTLEEIGRLFYHLIQRRGFLSNSRKGGKDDGAIFKGKPNEGKIGIDDTLQSIADKTLGSYLYSILPKENEPFQEGLERIRNRYTTRQMYVDEFELIWENQKKFHDVLTDDLKTILGGRKQDGYSNDGVLFHQRPLRSQKHLVGNCSFEPNKTKCPISAIPFELFRIYQWVNTVECNGKKISQEERELLTQVLLSKEKPAFKDLKKAINKQDSYYKFNYKDDDKIVGAYTISNLSNKKYFDKKWFEFSEKEQEDIWHVLYFFDSKDKVKDYALEYWNFNEEQAIAISKFNLKDGYASLSRKAINNILPFLKMGFTYDISVVLGGIKNAFGTSWDTLKNDKRNFLTDNVEDIVRSKITGGFIDTIKELLKKDYELSDKQLKKLYHHSATIDVKTIINKLPVGKEADKQIQAIRNPIVITALFELRKLVNELIEQYGTIDEIKVEMARDLKISKSRRNEIRREQKRLERENDRIKAEVEKYARVSHDNILKYKLWEECKKTCPYTGVQIPIHKLFTGEIQIEHIHPWSRSLNDSFANKTLCWANENRNKGNKTPFEFYGNDEANWITIKERALKLFSDTKEYPKSYQKFKRFVQQKFDDDFTSRQLNDTRYISKEAKNYLSQICNKVRVAPGQMTSNLRHHWGLNSVLNEENEKTREDHRHHAIDALVMACSKTSYLQELSRWNRYDRHHDLNDFPMPWETFRKDAEVAVETILVSHKRLNNVLTIRNHKTDKNGNTYKNVGVAARGQLHKETVFGKRQAPQSDQAFHVRKPIESLTTEKQLEKVVDETIKQLIFKRVHELGGFEKGKIPANTFFIVDENGLKQPKIFLPNKNGSPVPVFKTRMKENFSGAEQLKDNLNQWVNPRNNHHVLIYKDDKGNLKEDVVTFWTVVERKRKGFPIYQLPIDGKEIVTTLHINDMFLLGLNEDEIDWDNLDYNLIKEHLFRVQKLTSGDYFFRGHISSTVNDANYKQIRGFGDGKTGWFTFNPIKVKLSVFGRIEKL

SEQ ID NO: 7645 - protein, 1534 aa, unidentified
  REGION 1..1534: note = Description of Unknown: Cas Enzyme sequence
MKKILGLDLGTNSIGWALVERDFEKDFDNVLGEGSIIGMGSRIIPMSQDVLDKFGQGQSHSQTADRTGYRGVRKLRQRHLLRRERLHRVLNILNALPKHYQEHIDFTSKKGQFLDDIEVKFNYKLNGEDKHEFIFANAFGEMVEEFAANGNDGNIPFDWTIYYLRKKALHEKITLEELAWLLLHFNQKRGYYQLRGEDEAEDDNKLKEFHILKVKEVIDTGDDIKGKKLYSVVFENGWFYDRQVVKTENWIDKTKEFIVTTTLEKDGSPKMDKDGNIKRSFKEVDSEKDWIAIKKRTEQNILSSEKTVGQYIYETLLQNPKQKIRGSLVKTIERKFYKDELNAILTKQIALNPTLQNQDVFKKCVEDLYPNNEAHKEMLEGKGFKYLFVEDIIFYQRPLKSKRSLVDGCKYEFRQFVDKEGVNKTEAIKVIPKSHPLYQEFRVWQFVDNIRIFEKEKIIDGKHYSDWDVTTEYLPGIQERVELFDFFNNRAAIKQSQFLAFYRDEYGKKLDSKRFRWNYVQYTDEANTKEKEYPLNTTRALMITRLSKHKDLDWETFLTQKNEIWLWHILYSITDKKELEKALENETFKMDLPIHVRLEFLNTPPFKKEYGALSEKAIKKLLPLMRMGKYWHYNTIDKNTQSRISKIINGEFDESIRERVRDKAIKLTKEEDFGGLPVWLASYIVYDRLSESGEILHWKNPKDIDAFLKEFRQHSLRNPIVEQVITETLRVVRDIWDYYGNGQRNYFDEIHIELGREMKNTADQRKRLTANINKNQDTNQRIRTLLREFANLNIEGVIPHSPMQQEKLKIFEEDILNAATDLPDDIQKISNSNEPTSKEVEKYRLWMEQKYRSPYTGQIIPLSKLFTSEYEIEHIFPQARYFDNSLSNKIICETEVNRFKDKQTAFEMICNSPGQIINLGQGKNVRLLTVESFQEFVSNNFKAGSKKHKILLSEDIPEQFIARQMNDTRYISKVVKTLLSNIVREKDEQDAIAKNIVPVTGGVTSILKQDWGLNDKWNELIEPRFKRLNELTNSTDFGYFDTKQNFFRISVPAELKRNFNAKRIDHRHHALDALIIACATRNHVGYLNNEHAKSEKKRYDLRDKLRRLEQVQRNGRTFYSAKDFYKPWENFAVEAKNGLEHIVVSFKQNLRVINKTQNKTWQWADDNGSLKKKLVKQSRGDNWAIRKPMHKETVSGAVTIRKTKTVSFSNGLKDWQNLVDKKLKKRIKSLLAKGLDIKAVSKFFNNEPYLINGEPATEVALYYFTENATATRTQLTNKFTRKQLENITDSGIRKILNNHLKNYTNEDGKEDFELAFSQEGIEEMNTNIFVLNGGKAHQPIYKVRIYEEGSKFNVGVIGNKKAKFVEAAKGTNLYFAIYTGKNKKDEEARVYDSIPLNIVIERLKNGDIPVPEKYTDKNGCEYTLLFYLSPNDLVYVPSEVEIDNHSLVNFKSLNRQQVKRIMTVNDFSDYTCYFVPNHIAKPIAPKEVDLRFDSEKQKNIGSFDAKTSKFDGLSIKDRCWKLRTNRLGNVTRIG

SEQ ID NO: 7646 - protein, 1195 aa, unidentified
  REGION 1..1195: note = Description of Unknown: Cas Enzyme sequence
KEQSKNATRRDKRQMRRQFYRKRLRKIKLLQVLIEQEMCPLTVDGLSKWKNWSRIEKGEGRKFPDSEKFIDWIKLNPYDLREKALEEELTFHELGRIFYHLIQRRGFLSNRKGKEDSTIFTTGKPDENILPINDTKAKIGSRTLGGYLNSIAYKDGEPYKIITDENGKEIRVRGRYTVRDMYIDEFEKIWSVQKEFLEIDNKKVEAKRVRELRGTVNNKRNKNKIDHLKTKFGESNVEIKTDDKGKTKVITTEQLSLKEFLAGRIDRVKDEAGEEKLKFKSNESVLFWQRPLRSQKGLLSNCRFEDNLPVIKEDGDFLLKKNGQIQTRSKKPCPISHPEFELFRAYQFVNNISYGKNQKLTPEQKKEVLALINKNDGNFDFSKIPEALKLTYEKFNYGDKQKVAGNPTLKVLRPLFSDDIWDEYYKEIWHCFYFYEDNDRLFEKLKKAFEFKKDIEAVKKVKLKEGYSNVSLKAIRNILPFLEKGYQFDRAAILGGVKNAFGKRWEYFKDFHDNIEKEIISILREDNKDGEAIEKIKEHLALPVFNYGFEKDDPHFLHLYHHSKEVEKQDGKATKIPEVENLRNPIVQQGINETRRLVNYLLKKYRKEFDPEFKFDQIKVEMGRDLRNNKDGRQEMSFRIRENEAKNDDARERLAEYGLQPSRENIQKYLMFKEIEERAGKAQCPYTGKVISVSDLLGRDNAVQIEHIIPFSISLDDSFGNKTLCEANFNREKSEKTPYLFYKENPDPKLWGVTSWEAVEERAFRLLPYRKAKKFTAKREFEKSEFIQRQLNDSRYIAKKSVELLSHICKDVRVMPGQLTAELRHLWGLNNILQPVQNLGEHTFDVDGENSIPHYVVTNETGEVVSIHRKQNIRPATSSNEILVTGNVNKKKFTSKYFKIDMETPDLPDGKYWAKLNVGDNVQVIPKFIDKPESDKQSIVFKGSVEKGYFKNDTYGRMKAETGDGSYWAKFEILNVKFETPQKDKQPKTKRNQVMLFGNVLNGEFKCFIYQCETNLRDAKYWIILDLNPDNVEFFRSVNPKPEVQENKLLITATVDENGVLKADVDKEFQVQTDSPSGKYYVVLDITTHEPELYNIENEPPTPDKGQQLVEGNIWVDKYTGEIKFDPKKNRDDHRHHAIDAITIALTEQGYLQRLSTYNAQRKEKQRQKLDSTEKFPEPWDGFSNDVSRAASAIL

SEQ ID NO: 7647 - protein, 1075 aa, unidentified
  REGION 1..1075: note = Description of Unknown: Cas Enzyme sequence
LIFYEDSDQLAAKLTKRYHLDENTGEKLSKIELVEGYASLSLKAIRNILPFLEMGFRYSTAVVLGGVKNAFGERWERFSFAHDEVIQDVVRLTEKEKHKEYELIEKLKTYLSDTINKYGFIKDDKAFDKLYYPTQAIEKKSLRTRLSEFENLRNPIVQKALFEMRRLINSLLDQYEVRFGEGFRFDRIQVEFGRELKNNKKRRYEMSIRNRDNENKNSVARERLSEYGLRPSRNNITKYLLYEEIAQKNGVVQCPYTGRTISITSLLGNENRFQIEHIVPLSVSLDDSFGNKTLCESNFNREKGELTPFEFYQRNSSSEIWAARSWEEIEQRAYKLLPYPKAKRFTMMKNPGADDFIQRQLNDTRYISKKAAEMLSEICDDVRVLPGQLTAELRRLWGLNHLLRDPLLTAKNISVSKDSELEHFVIFNENGHIKEILPAQNQKPTSGFPTLCLPGHVDEKGVFSEEKRYKQLRYKQSNTNINEGKCWAKVKLSDPLDFTLIYTTRPPLSDRYISLRGQVSKGRFTHDSLKQKIVADVDDGTYWVSIPVKNFHLIATSLDQKPEPGAKEILLFGKVNEGLFSSYIFETATDLPDGRYWLLLETDTTVPQFLKARNIPESKAENEVLVEGVVDDLGKFTSDQDPDFSFKAPTTPGKYFVRFEAIELEGLYPMHNEFPTIEKNEKLAQAYTWVDNETGEIKIDIQKNREDQRHHAIDAIVVAMSELNYLNQLSRYSGKIKDWERGKDDKPIFDLPWPSFSNDAHAAIEQILVSYAQNRKVVSKISKIVHKGGKSHKSSGLAARGRLHREFYYGQHPRPIFHQKNPQTGDLLFEKDKNGNRKYYYHIRKAVNAIQNDKHVDKIVDDGIKQLIINRLKKEYHIDTTKAYKIPPDFFYDKDKKPALFLPNKNGHPVPVKKVRMRESIGNPEQLKDNINQWVNPYNNHHVVIYEDYEGNLQEQVVSLWELVERMNQGLKMVQLPENGKRIVETLQENDMFLIGLPEDIRDNLSSYSYQPALLSPYLYRVQKISSMDYSFRHHLISSVSTGHGELRIVSFKAWNDYKPMRVKLDQKGKISLQL

SEQ ID NO: 7648 - protein, 1024 aa, unidentified
  REGION 1..1024: note = Description of Unknown: Cas Enzyme sequence
MFDDSKIAFQIVPLTALVNPSILEDIVSFMCDGDERMVDQQSATQKRWRLGCDLGTNSIGWAALSLGANGKPDGLLDMGVRIFSDARDPQSRESKAATRREPRSARRNRDRYLQRRAQFLRTLVETGLLPQDKAARHALERMDPWILRARALSEQLEPYEVGRALFHLQQRRGFKSNRLTDKGSDEKGAVESGAAALRADMDDGDAATLGELKGCPRQTIAEENHSLPKGARSPMPLARVRSHSEGAKMVYDYYPLREMIEQEFDAIWQAQARHHPEVMTEDARAALRNALLFQRPLKPQPVGRCTFENEEERAPSALPSVQQLRIYQELNNLRVSARPGAPQIPLTPEERDKLAEIALKKVKLSLRDMRGALGLTDAATFSIEAGQRDFLDGDKTHDIIAKNRKNNTGNWPDWVDLPLAEQDALVEILLGHVAAGRGSHPAVVKTHELAIARITAGLGLPESPARELLEAKDEDTIAAFLVQRYGLEPAHAARIASLRLPDGHGRLSRTAGDKVLAQLIAPDADGRLRTYDRAVVDAGYYHHSLKGTGEVFGHLPYYGVVLQQSVAFGSGDANDIEEKRIGKLANPTVHVALNQLRRVVNALIDRFGPPAEIVVELSRDLPLGAVDLGKLEKTQRDNRKKNEERAEELAKFGQANNYANRMLIRLWEELDATGRKCPFTGKHLSQEMLWSGELEIEHILPFSRTLDDGFNNKVLAVREANRRKSRLSPWEAVEAGIFDRETIEGSLRDLPSAKAWRFGPDAMEQFENEERDFLDRQLNDNKYISRLAAQYLKSLGSDVWVINGRLTADLRHHWGLNSVLAGHNRKPADSEADEVRKNRNDHRHHPVDAFVIACTDRAMVKAAADEARKVEQEFADGKRDHRRLLAGLPDPFDGYLLAVKEAVGRIVVSHKPDHGIAGKLHEATNYGVVQTQAGETRLATRKAITELTPGEVASIGDDRIRRELVALTDGLGDKERKQALLEYSQRTGHKRVRVHKVQASFERIVHGPDSKGKSHTRAVIPGDN

SEQ ID NO: 7649 - protein, 925 aa, unidentified
  REGION 1..925: note = Description of Unknown: Cas Enzyme sequence
MSKTLGIDLGTNSIGMTLRNEDFFEWYGVYTFKKGVGDGKSGEFSLAAERTGNRATRRLYNSRRYRKWETLNVLIENGFCPLSIKKLNNWKHYRKGIGRVFPVEDLNFDSWIKLDFNNDGKPDYTSPYQLRKELITEKLNLNIETDRYKIGRALYHIAQRRGFKSSRKMGANEKTAVYKGSKETGTMGRNAYEKLIDENGSLGAAFAHLEDNGTRIRNRYTLRSDYLNEVIKILDFQGAETKFKETAIKAIFFQRPLRSQKGLVGKCTMEPNKPRCHVSHPKFEAYRAWSFVNNIKYRVSKNEKFQQLPIELRKELIAEKLLIKSNKTYFDKIRNYVVKGNRKNWELNYSERMDTMTVSTSPVSAYLQAAFGDNWESVSIKINKTRTDKKGKIHNILYTIEDVWHLAFSFEDEEYFKEFILKELELDENQIDQLMKLWNALPNGYANLSMKAINNILPFLKEGLIYTEAVFMAKIPEIIGAQLFDDNKEGILEELKNVITNNRNEKRIINITNALIANYKALDSENRFGYKNVSYLLDELDYKDITETCSNHYGQNRWEDLDEDYKNSIIQKVAKTYQKFFKTSKRDYFPQPKLIENLENFLIENFKVSEKKVEKLYHPSMIDIYPSIENQQFLKSPETRAFKNPMAYKTLHKLRHVINHLIEIGKIDAETRIVVEVARDLNNKNKRAAIEDYQRYREYENDEFGIAISELIKDPEFKGSANPNSKTDRDKFRLWTEQIKSKENVLEKITVAKDDIKKYRLWKEQKCICFYTGRTIKVTDLFNNNIIDFEHTIPRSKSFDNSLANLTVCYADYNRNIKKNKIPTELPNFDEEYNGYTSIKPRLKDWEHKVSSLYNKIQTQVKNSKYAVDKDSKDKAIRSRHLLQIEYDYWKDKVDRFTRKDVPAGFKNSQLIDTQIISKYAYHYM

SEQ ID NO: 7650 - protein, 1038 aa, unidentified
  REGION 1..1038: note = Description of Unknown: Cas Enzyme sequence
MPVPYRLGIDIGTNSLGWCALDLDREGRPKGIRKIGVRIFSDGRDPQSGTSLAVDRRMARGARKRRDRFVDRRADLMKALVRHGLMPADAAERKKLGTLDPYELRARGLSEVLHPHHFGRAIFHLNQRRGFKSNRKTDKKQKDADLKGMKGGISKLRQAMGERTLGQYLYGEFRKDRSVRGSGDGAVKAHAAVRARPHVVKGKNEYDLYADRAMYEAEFDRLWRRQTELGAALADPARDEIRDIIFFQRPLKPVDPGKCALDPTDQRAPLALPLAQRFRMLSELNNLEIIAADQSHRPLTLDERDRLLMQLERKAELPFDRMRATLKLDSTFKFNLESEKRKGLKGDLTGIALSKKDRFGPRWWSMRTRHDEIVAVLLDESSEDELVARAVAQWGLDETAARAVADAPLPDGYGRVGRKALEKIVPIMAARVVRYHEAAKEAGYDHARGPDGEVFDTLPYYGKALEHAVAFGSGEPADPDEKRYGKIANPTVHVALNQLRKIANALSAKYGPPAEIVVELARDLPLSKEGKEEKTREQAKNQRENQRRRDELAALSLSANGENVLRMRLWEELGPVHDRRCTYTGEQLSIQRLFSADVEIEHILPFKRTLDNSPANKTVSLRRANRDKGNRSPHEAFHANAAYQWQEILNRALTLPKNKRWRFGADAMERFVGERDFLDRQLVDTQYIARLTREYLTKLSGPNKVWVVTGRLTQMLRGKWGLNSLLSDHNLKNRTDHRHHAIDAFVVGLTDRSMLKRVADSADQNRERLIDDMPDPWDGFRDEVKARLDKVVVAHKPDHGAGGKLHEETAYGLIRDPSKEDGATLVYRKALAGLNENEVGRIRDRELRVKAAAAIASVRGNKVEIAKALAILGNETGIRHVRLTKVESGVVVLSDQNGKPYKAVSPGDIHHVEIFETTNGRWAGEAITVFNANRRGFSPAWRGEAVGTKLVMSVGKGDCIALEDSGLSKVMKIHRLDAIANRFKLAAHLESGNLDKRHIDPDDLFRWAMISYNQLKARKARKVTVDYLGRVHDPGPPK

SEQ ID NO: 7651 - protein, 931 aa, unidentified
  REGION 1..931: note = Description of Unknown: Cas Enzyme sequence
MENQGGKGTILGIDIGPNSIGWALLDTENKKPLGLRAAGVRVFEAGLDKLEQDGRGVSRGAGRREARSTRRRLFRQTQRLKNLAELLQKAGLLPQGNWRNSEERHNLINQLDQEVDTPYHLRARALDEKLKPFELGRALYHLCQRRGFLSNRKAAPKKDEDRGVVKKGISDLQQKIIDSGAHTLGEYLSKLDPHQERIRTKYTSRKMYEEEFEKIWQKQREHYSEILTDDLKKKIYRAIFYQRPLKSQKHLIGYCSLEERRRRASKALLIAQRFRYMEKLNILSINQDGRERKLTPEERKILIEALETEGDLTFTKIKEKLNLPPRKTKINLEGGEETKLPGNRTASKLIEVFDKGRWDKFTEQERDEIVNEMRSINKDETLKKRAMNKNLFWRLDEAAAEKLSQTRLEEGYCNFSRKALEKLLPLVEEGIPTPTARERLYPQSGRKTEPKDLLPPVKGKEFTELRNPIVERALSELRKVVNTVIRTHGKPLEIRLELARDLKRTADQREEAWKRMRKNERERKAAAVKILEEIEIQNPSRNDILKVLLYEECDHICPYTSKPISIAALLGDHPQFDIEHIIPFDRSLDDSFVNKTLCWAEENRKKHNRTPYEAYHGTDKWEGIIDRVKKFKGDMKDEKLRRFMLDEKELEEFLSAFTSRQLNDTRYASVWARGYLGSLYGCKQDDGIDPQGKLRVQVSSGQTTAFFRGAWGLNAMLGDGPGKTREDHRHHAVDALVIALTDTTKVKLLSEAAKRAPLEKRRFFARMEPPWEGFREEARQAVKGLLTSHRVSKRVRGALHEETFYGKPREDDGGKKYVHIRKPVSALSEKDLGQIVDRQIRECVHKKLRELGGGDPKKKFNQPENHPHMESKDGRKIPIHKVRLRYDLTTFPVGDGHRARHVQSESNHHMEVVKDLKTGKWDGYVVSMYEA

SEQ ID NO: 7652 - protein, 1149 aa, unidentified
  REGION 1..1149: note = Description of Unknown: Cas Enzyme sequence
MSRENFKEADKKMSNEKVVLGLDIGIASVGWGLVKLTEEKYTDEKPDGTIEEKYKISDGKIIDTGIRAFQVPQDRQKKSLALQRASARRSRRTTRRKVQRLKRLIGLAKEFNLITDGFNRDGILKPKKGDKESKWDIWLIRKQGLERKLTDTELFRVLYHIAKHRGFYFHTKAEFLPEEDEKKLNKDKKQEPEKSEKEKESQKVKQGLRRIKKMLKDGGYQTVGEMFYEKFKQTNPDSKRKRNAPDKYENSIHRLLLKDEIETIFKKQQELGNSKAKDELKQRYTDDILMKEEGIDEDKLQKMMSRCEFTGGLCAPKESYTNERFILFNRLNTLELIDRQNRDKHLQLDKEPRDKIIALAYKNAGRVTFAQIRTELGLQDKLHITFNLCSYREKNPEYNKKLECEIKNGHLQFDEKHKIPIVDIDTGEVKVLDEEIKKIFKGKKLWPNREKMRVYYSDIRKQSNLSENFRFANLKGYTKSAAELGSDKEYIKQFEKDDTFVEVKGYHEIKKAIEEKCGSEKWGQISGDTTKLDTIAEALTYCKSDKTRTEYLHQHNIADQGVIDAVLTLNMKQLGNFSKEALTNILKYMGSENPMRFNEAKEKCGYGKIDHKKQVILDPYRGFFEKNPVVARVISQTRKLINAIVRKYNDKYPIDQIHIEVATDLANSKERKSQIASGQKRYKDDKEAAAERCREEGLDPEEAQNLLMFRLAEEQNYFCPYTRTKITLCPTGAANEVYIKDCEIDHIIPMSRSFNDSLNNKVLCTQKANQDKRDRIPFEWFEEIHGKDSQRWTEFENTVKKMYGMAYPKRKNLLRERWTEKDKEEFLSRNLNDTRYAARHIADYLRKYFDFSISERDDIKDVSRVKVRSGGVTAFLRYMWGLNKDREASDLHHALDALVVACSTDGHVYLVSNLAKEIERKGKSWYRHFDFIRDKFNPWANIREDIQKTVANVFISRMPRHKATAPAHKDTIFSFKKTPTKNRVIEINAGYAEMDEMVRADVFTDDKGKNYVVPIYAVDIFKNEPLPDKYVPDDGKLPYDQWPNVKDDDLKFKFSIFKDDLVGINDEMYYVSFFEAATANVNVKNIDGSMFPDKKDAQDPYTKKIRYEILSNVVDKIFFGPTAEALRGLFGSFHQPSLRSQIRACRPSG

SEQ ID NO: 7653 - protein, 1508 aa, unidentified
  REGION 1..1508: note = Description of Unknown: Cas Enzyme sequence
MKNILGLDLGTNSIGWALAEQDFEKKKGKILGVGTRIIPMDAAMLGEFEKGNKVSQTADRTKFRSIRRLRERELLRRERLHRVLNILNFLPEHYSTQIDFEKHYGQFKKDTEPKLVYKPNVEGAKAEFIFKKSFAEMMTDFVLNQPELVRNGKKVPYDWTIYYLRKKALTDKIEKEELAWLLLNFNQKRGYFQLRGEDDEDPTKTVQTRIYFATEKIESIIDTGQIYKELKILKIKLSNGETGKYFNKVAPNWLGIEKNIIVTVDTDKDGKDRLEEDGSIKRKFSIPTDEDWEKKWKLIKIKTEKEIKDSNKTVGTYIYDTLLKNPKQKIKGKLVRVIERNFYKTELQQILGKQKEFHPELNNEKLYRACIEELYPNNESHFKNIEKRDFTYLFLNDIIFYQRPLKTKKSLISDCQYETRNYIDPKTKEKQKLKCIAKSHPLFQEFRLWQFIHNLRIYEKDNIVNGTELDITSKFINTEDDYSKLFDWLNDRKEIDEKAFLKYPEFKLKKIAEKYRWNYVEDKTYPCNKTRNLILNKLDKKTKAILTQENEIKIWHLFYSVTTKAEIDNALKANSKRKSKTKSMYDFLIENNFSINEIEELKKIKLAETDYGSYSEKAIKKLLTLMRRGKYWKEENISSDIKNRISSITKRLKTVDFEEIKIENISDDDIPKQVLKSFSKTKDANPLTGLNTYQACYAVYGRHSESGEVMKWHKPSDIENYLKEVFKQNTLRNPVVEQVIKETLKVVADIWKQYGNSAENFFNEIHIELGREMKNPADKRKSMTNQITENENTNLRIKALIAELKNDTNYQNVRPYSPSQQEILKIYEDGVLKSNIEIPDDVEKISKASQPTKSELIRYKLWLEQKYRSPYTGEMIPLSKLFTTAYEIEHIIPQSRYFDDSFSNKVICESEVNKDKDNCTGLEYISDNPGKIIELSFGEKVKLFAVEDYERFVKEHYVKNKIKMRKLLMLDIPDGFIDRQLNDTRYISKVVKNLLSNIVRENGEDATTSKNVIASNGTITSTLKQDWGLNDVWNDLITPRFVRLNELTKTNHFGKLENKEGKKVFQTTVPLELSKGFSKKRIDHRHHALDALVIACASRNHINYLNNEYAKEKQKDSRFDLKNKLCFKKYNDNAKRNYNWVFHKPWSTITEDSREKLQTTIVSFKQNLRVINKTVNWYQHWKKDENGKIIEKEFIKQTKGENWAVRKPLHADTVKGLVKLNFDKENENTASRFPIDDTFNSKVIERITDTGIQKILGNHLKLKNTTNDNGEIVEHPELAFSQDGIDEMNKNIKDLNDGKLHQPIFKVRLFESKGNKFNVGHKGNKKDKYVEAKKGTNLFFAIYQNTNGERNYKSISFEEVIERQKQGALEKRKPIYCSVPETNEQGDKLLFHLSPNDLVYVPTKEEMEDPVLPDFDKLTPSQNNRIYKFVDGSGTTANFVQCQTATTILNFTNKEQQKLGIKYPIQNEFGKGSPQSKHQKTLDGETQIKSVCWKLEVNRVGKIIKVMK

SEQ ID NO: 7654 - protein, 1326 aa, unidentified
  REGION 1..1326: note = Description of Unknown: Cas Enzyme sequence
MHRHILGLDIGSNSVGSAWIDMEKGAIDIGLSVFPAGVDETDEMRGEPKNAKRRMTRRTRITLARRSLRKRELRLELIARGLLPPDAIAFKKLLEDTDPWALRRKGLDHALTPHEFGRVLLHLAQRRGALGLKEPEEGEEGKTEDGKVKAALDATRKQMLAQKARSFGEFVSVLRDERRTQITTPDARKKNGGPREWRTAVRNKGGEFQFHADRAMIRDEFGKLWDKQKGLTGALAKILTNEKGLRTKLDDESGDSLWRHKGLLFGQRRQSWDMGTLGRCVLEPSERCAPIADMHASHYRVVETVNNIKIAESGKAARPLTAEERGKLIALLRGPLGMQPVKKRKGKKGDEEGTDNEAVDAAPKTRPKTTCSVTDIRLALGLCRSAGKASRVRLNIEADEDREINTDWFHRSIVHGGITEPKWAAMTERQRESVNRAILNFDTDREDHAAELRAGAIKWWGCAPAEADALVAGWKTRPPLEKRLNLSRRAVLNMLSIMDKPWPNPEGGTRWVTQIEARKLIAEDSDFKDATTGEPIHPRTRDRYATGAKGLTARDRHYIKRHPDSLPPAPMLTNPVVRKAIHEVRRHIVAHIKKHGRKPDAIVVELAREAKMSAKESDRTLFRNRLRNRIRNDIIETFNLTALKQTQQRAAVERVVLAVQQGQVCPLCGKAGLTPLVAKEGQDCELAHIVPRGIGGGNGLNNMIVAHTKCNRDMGRKTPRELWRERFEVEMNRVERMYAEVERIDRKQVDKASEDKLWACYFNQRDDEAKVANFKKELADIRGFSDRQMADTRYATRQVLAYLADALFDGKGLPERGGDRLIFTTDGGWTGDLRREWGLFQDTHNAKAKGLSNAEEHERKEKKRGDHRHHALDAVVVALTSRSVQVQWEQRLKAADAKGITAEQFDEFCRQNRIDPPAPFKNADDLRERVMAAVFGYGKSERPVSHRAVKRKIIGALHEDFPRGPVLDRRGALTDRFTRKIGILNLDSNHLRMPRPEKEDEAIDRLSERRLRDKGEDEKTARKWARGVVRSPGYKAGVIDPAPGKSGIVRDVALRACLRKCLEGGGLNPDDFTAGQLKKLVEAGGIRQVSGVPIRSVVLLWTMNDPVVMSRWATDHATGKRFMVYNAATGEGDAGAARANIGGNNHHIELRIDDTGKWSGEVVSTFEASKRKLAFFRALRASRVPRFTELKKLPKGESKRYSPLIAAAEKAHPLVDRSDDPNRGGGFVFSLCEGEMVHMLHKATKDPGYFVVAKLDKPNRVVLVPHWDARAAGERKDSAGSKVPDSKRDSFTATPDDFKTLAPPGMAHAVKVRVSPLGDVTILEKD

SEQ ID NO: 7655 - protein, 1134 aa, unidentified
  REGION 1..1134: note = Description of Unknown: Cas Enzyme sequence
MKEPKSMSYILGLDLGANSIGWAILEANQEDGRLKPFRIERAGVRIFEEGVENINTSKEAPRAQHRREMRLMRRQADFRARRHSHLFFILQNAGLLPPSEIAKPEIFKKDTEAERRERNEEKRERREKKSNERDRILRELDKKLIPHWRAKLKSEGASQEELSLLHMRFPYVLRARALKEKLEPYELGRALYHLGQRRGFKSNRKSQPKKNEKPGEVEKGINDLKAKMKEKGAETLGQYFSMCNPEKEQEKIRGPWTHRDMYKEEFGKIWAAQQPHYPDILTDALKERIQSEDLKLQGAIFYQRPLKDQSNLIGFCELEEGERRASRGLLLYQRFRLIKTVNNIRIIQADKSERELSQEEKDKLIKALEKGEGVKATKKLAEGDLSISQAKDILDIGNRAKFNFGEDEEEAFIGNRTAARIRKALGQVGHEWKSFSPENQDAMVDLLMSSRSDDEIAKEAQKNWGLSQEQANNFSKVSLEAGYSRLSKKAIEKMMPFLKKGLDEANAKKEAYPDKATDRVEEFLPPVQAEMPELTNPVVRRALNELRKVMNAIIREYGKPAQIRIEMARDLKKSSIQRGEVWRDNLLQRKKREEIKSAIQNLAECGIADPKGDDITKWLLAEECNWRCPYTEDEEKARINPCKLFRDAEFEVEHIIPLSRCLDDSFVNKTLCRREENRKKHNRTPYEAYQSDPEKYNTILQWVERFKGGDKFKHRKGTDKFFKVADRNIADEKLRRFKMNDQELEEFLKGFTSRHLNDTRYFTTAARKYLSLLYGKVALTRIRFTGGQVTAYIRDVYGLNSILNDGGRKSRKDHCHHAVDALAVALTDDWTVQQLSRWAEIAPIGRRFPRNIQDRPWPGFNDQTKSIRQINASHRVSRKVNGPLHAENECSPPKPGSDGKQYIRVRKALKNLSTKDNDIEDICGENIKRIVKERLAEEGGDPKVFENEANLPFLQSKKEKDGRKIPIKKVHLLKKAESFLLVKDGVQKRYSLSAPDINHHFEIIASKNEKGEEIAWEVAGDRPITRLEAMRRARRNEPIIQQDHGEDNKTKFSLAPGEIIELDDANGGRVLYRIRSISGRNVEMVQINDGRPKTGEEGLKKGGGWKKRSVNELMKLHCQKVIIDPLGNVRRAND

SEQ ID NO: 7656 - protein, 1092 aa, unidentified
  REGION 1..1092: note = Description of Unknown: Cas Enzyme sequence
MQKKSPPYTLGLDIGIASVGAALLILKEKRILALHVRTFDKAETADKGESLNKIRRESRLTRRRIGRRAFRLKRLARLMKRKGIIERASPDTFVTPHLSPWDLRAAGLNRMLEKKEWAAIIYHMVKHRGFQSNRKSEAKADAKIGDMLAGVRQNSTLLKKGEYRSIGELAVQDPAFSGSKRNKGGEYNHTFAREDLTAELDLLFERQGALKNPFAGETFHAEVKKLLLQRRPPLSGDALLKMVGTCTFEKDELRAPKAGYTSERFIWLGKLNNLKIVGDGNPRPLTDEERKAVIELPFETSKLTFNQIRAKLNLTQNQRFNLLSYRNGKKGDDKDPEKKTFFEATFFHKLCKAYSDAGLDSQWERDKANPGGKLDTLGYALTVFKEDSKSREYLRANGVDDAIIEAALTESFEKFIHLSQKALNKILPFMEDGQRYDEAANSAGYNHNQPIPTAERKPSLSAPDRNSIRNPVVYRALNQARKMVNAIIKQYGPPAQVNIELARDLSKSFDERNRIAKEQENFRTEKEGAARDFQRLFQRAPKGPDIMKWRFFKEQIDQCPYCQKALDVNRLFNDNYSQIDHILPSSRSFDDSLNNKVVVHIKCNQDKRNLTPYEFLDGATDGERWRKYSGWVQSNKSIRQAKKNRLLRVNFGAEEAEKFRERNLNDTRYICREFKNMVESNLKWHENSEGNERCLVLSGQLTALLRARWGLLKNREGGDLHHALDAAVIAATNSSLVKRMSDYSRRKELEMVRENCPDPETGETLDVATLRQIVSDFPKPYPHFREELLGRLSATPAEKLRDIQGYDVDLISEVRPIHVSRAPTRRGLGSAHQDTIRSIGGKKKKVTENRWLKKDESAVKTPIDKLRLADLEKIVGADDPRNKKWIDALRERLEPHKAEDGKSNKCAGAKAFAKGQPPLFKPSGDGKTQPQIRNVKLKTTQKSGIQIRGGIANNGDMLRADIFTKEGKFYAVPLYVADAVKKELSDRAVSPKKPENQWPVMDKSYQFLFSLYRNDWVVIRLKNEVREGYYAGLNRSNNSIDLWSHDHKTMLEGNGIRTALGLEKFHVDILGNLYRAKPETRKKIHVVRQTKR

SEQ ID NO: 7657 - protein, 1045 aa, unidentified
  REGION 1..1045: note = Description of Unknown: Cas Enzyme sequence
MAEKISGDFILGLDIGASSVGWAILATDKGKPVKLVRCGARLFDAGMEEGDFAAGKENSRNAARRQARQARKLTNRRWRRQRKLFNLLVKAGLLPPGDPGKVIPELDVTLRANQLAPLLRYSAERRRLEHVLPYRLRAMALTEKLEPFELGRAIYHLAQRRGFLSNRKAPPKKDEKPGEVKAQITQLETKMKEAGAETLGQYFAGLDPEEERIRRRWTSRAMYQAEFKRIWDEQARHHPAILTEELGKHVYRAIFQQRPLKSQSNLIGTCEFERGRKRAPWGLLLAQRFRMLQQVGNTSIVAPNGAQRAFTDDERDRLLSFLQREGDLTFPKTRKLLDLPKGHKFNWEEGGEERFLGNRTNAKLAAVFGERWWKMSEKEREQVVEDVLSIHKDDALERRGARCWGLDADAAAKLGQTALEDGHCALSRQALLKLMPMLEDGVPYSTAVKELYGDRHGDALDCLPPPAPTYPHLRNPMVLRVLAELRKVVNAVLRDHGKPATIRVELARDMRRSKKQRTDAWQKMRQNERDRKKAADRIAKESGAENPSRADVEKVLLAEECGWICPYTGRSISMNDLMGPTPQFDIEHIIPFSRSLDDSFLNKTLCEVKENRDHKRNRTPHEAYAGNAEKWDAIIARVRRFKSSAADAKLRRFQQETTEGLDEFASRQLNDTRYATRQATDYLALLYGELYEKDGRRFIQASKGGMTAYLRNEWQLNTILGDGGAKSRDDHRHHAVDAVAIALTDASTVKMLSDAAERATSEGRRRFGRVEEPWPHFLDDVRQAVEGVSVSHRISRKVNGPMHKETNYGPSKGRDAQGKPESFRERKRLDALSPADMKLIADDRVRQLVEEKLAEFGGDAKKAYGESKNHPCIVTKRGRRIPIHCVRLRKSQAMIEVGQGPRQRYVASESNHHMEIFEVKDKKGKTHWKGRVVSTYEAMRRLATRRPVVDRTPPDGGRFLLSLAHGEIIQLTAPGKPTGLYRVRKVSLAKTGSIEIAAARLTDARLKDEIIKSGEWLRKPPDKLAEMACRKVIVTPLGEVRYAND

SEQ ID NO: 7658 - protein, 998 aa, unidentified
  REGION 1..998: note = Description of Unknown: Cas Enzyme sequence
MARILGLDIGTNSIGWAVIEHTTATPSELAGTGKILGSGARVFTAPVEDKTETPKNQKRREKRGARRIIARRRLRRDDLQDILISAGLLPSGKEERGKLWNSINPYLVRAKGLGEKLTLHEFGRTLFHLNKRRGFKSNRKADRKEKDKDKGKVLGAIKELTENIARSGAHTLGEYLYKKGEAVRIRDQYTHRDMYEDEFNKLWTAQSAFRPELTGELNVKVHKAIFFQRPLKSQKNLVGFCELEKRIWRLPDGRHIDKGPKRAAKSHPLAQRFRALQDITNLKINGRPLSAEQTKAIMAAISGKEKLTWVQVKKAAGLHKETKLNLEETGKKHIPGDYTFHRMAKALGEKWDGLDDVQRENLYTDIETIENEGALLQRLTDGYPGAMPARAWGFSADEADKLAKVELEDGYAAHSLKAIKKLIPHMEAGLTYPSAKIAAGYGGVSGASEGVNFLPEPPQVRNPVVQKALYETRKVVDAIIREFGKPDIIRVELARDAKLPKKVKDDIRKKNHDRRDENEGINEDLKKEFGLANPTREDRDKYRLWVECKRTSPYSGKAISEKQLFSPDVQVEHILPWKRSLDNSYMNKTLCFQNENLEKGDRTPFEAWSHLEQKWGEIEARIENLPEPKRRRFYMTEIPEGFLDSQLTDTRYITKEVCGYLEALGVKVQTNKGLFTSWLRYEWGLASDILPRRKTDEKSGKDRSDHRHHALDAIVIALTGPWMVHVMSRATSTNGRIRIPNFPAPWQGFREEVKETINNIIVSHRATRKIRGALHEETSYGKTSQPGVFVRRKAIASLSPSEVEGIRDARIRQMVEDRIREYGGEIDKALKSEFFIGKTPVKKVRISVKMREDTVFPIKDETGQPYRYVTFGNNHHVEIIKNLKTGKHEGIVVTTMEAARRARIGKEAVIQRDHAPDYEFVMSLSLNEMVRLTVDGVSEIYRVQVLSSSSPMFTLRKHNSADIKDNSTRILKNPGTLMETGAEKVTISPIGEVFLAND

SEQ ID NO: 7659 - protein, 1100 aa, unidentified
  REGION 1..1100: note = Description of Unknown: Cas Enzyme sequence
MTGKQNNLGPLTFGLDIGIASVGWAVMGENRIVDLGVRCFDKAETADKGESLNLARRTARLLRRRLRRRAWRLIKLARRLKREGLITDANFFKKQSPFTQSLWQLRVDALDRRLTDEEWARVIYHLCKHRGFHWISRAEAKAADSDNEGGRVKKGLAGTKRLMQEKSYRTAAEMVVHEFPDAQRNKRGDYSKALSRELLDEEAKKLFQRQRELGNPHTNAELETAILGNGDKKSGLFWAQKPALADKDLLKMLGHCTFEKEEYRAPKASFTAERHVWLTRLNNLRIVVDGKLRPLNEQERHIALPLPYSQASELTYKQLRSALVKGGLADTFRFAGLSYPSKRQEETEKAKDPEAEKLIKLPAWQTLRKTLKDAGLESEWQQISVAALEGKPELLDQIARILSVYKDDTEVEAELRKLDLPSKDKMADALLDIRFDKFSNLSLKALYNILPHMETGLRYDEACEQAGYHHSQLHKVGEGEHKYLPPFYSGRDKDGKLKFNEDMDIPRNPVVLRALNQARKVVNALIKTYGSPHEVHIEMARDLSRPLDERRDIEKAQKEYRERNDRDKASFASEFNIVGTVKGKDFEKWQLYREQQGKCAYSQQPLAPNGDIQRIFDVGATEIDHALPYSRSFDDSKNNRVLVLTRENRNKGNMTPYEYLDGKNNSERWRLFVAFVESNKSYRQAKRNRLLKKDFGEDESKDFMERNLNDTRYICRFFKNYVEQYLQLHADSTAKRCVVLSGQMTSFLRARWGLVKVRGDSDRHHALDAAVVAACSHGMVKRLSDYSRRKELEQVREGFVDVETGEIVNPAMFDKLEQHFPSPWPHFRDELLARLSIDDPATLRVEMEKLGNYPADALEALRPLFVSRAPQRRNGGALHEATLRSPKFIAEGESHTRVDIRKLKLAHLDRIVGASDPRNEGLIEAIRTRLQAHVDDGKKAFATPLFKPTNDGKTAPPVRTVKLKTTQNTGALIGNAVADLGDMLHVNVFQNDKRYFLIPVYGILSDRRINPITAPENADFLFSLTKNDFLEVTLSTETTRGYFVMFESDGRLTLRAHDQPQPDKNYFRKSVSSATKLSKFNVDVLGNIYPAPPEKRRDLA

SEQ ID NO: 7660 - protein, 1012 aa, unidentified
  REGION 1..1012: note = Description of Unknown: Cas Enzyme sequence
MRIFAFDVGTTSVGFAVADYDETAQTGSIIRMGTRIFPEGTTEKKKEPRNQARRKARLARRQLRRRRVRKLELSQVLAQEGLLPAFGGDEWRRVMAADPYVLRAKGLTEKLEPLEVGRALYHVAKRRGFKFPSVPEEPEDPDVEQKGKMAKDDDDDPGIVKGKIETLRMAMGTLTVGAHLARQDKKRGHHTGRDMIRSEFERLWEAQAQHHRERMTATLRQTVIDIVFNQRPTFWRLKTLGRCRLLPGEELCPKGSWIGQQYTLLCDLNSLRIAGMDERELKAKGLQYLQGVAKGSYSALKKAMGLRSVRFNYEVSGGKKDLPGNATEAGLRKVFGDAWERHPSQEAIRREIFGRLWTVRYQKIGNARVEIRPDHDIKAAHELFIEEVRKDWGVTLEQATNLADLPLPTGWLRHSTAAIERMLPHLLDGHVYSEAVNRAFPEQAAAKAAPLDKLPTRSEQLPDWRNPTVTRALTEVRKVVNNLLAVHGKPDLIRIELARDLKLPKKQKLKMIENQGKLEKRHEEARKDLTEKQINPNGENRRRWILWKECGETSPYTGNKISFDALFRRGEFQIDHIHPESRTLNSNFDNLTLCEEEINRDKGNRTPFEYYRNRPQDWQRILNTLQSIKFPDNKLRRFLREDVDELGSEELVERQLRDTSYIAREARAFLEKLGVPVQTSNGRVTAQLRRMWGLETILSPGGGGKNREDHRHHAVDAAAIAFSSPAFIKRLSEYYALERQAAPERFPMPWRSFREDVATAVEKIVVSHRTRRKVSGSLHEATALGDTGRESIERGTTYRFFGKRVSLAAGKNEPGITPSQIGDIVDPEIRRIVKEHVATHGETPKKAFPPFPRLGEGGNSREIQKVRIEIKQQMALMAPVRPGRKTYAKLGDNHHMEIFRTLDGGTLFRIVSRFEAAKRNAAGKPVVDRSDAAGGKFLMSLAPGDTLEFPNPGGAPDYRVVTSVWANGQIVLVDHRSAADTVWKHPTAASLLEAGARKVAVDPIGRVRKARD

SEQ ID NO: 7661 - protein, 1073 aa, unidentified
  REGION 1..1073: note = Description of Unknown: Cas Enzyme sequence
MQTKNLPYTLGLDIGMASVGAALILPAQKRILSLYVRAFDKAETDKEGESLNKIRRESRSTRRRIRRRAHRLLRLARLMKRVGLINEASPNAFTLTHATPWELRAEGLDRLLEPREWATSLYHIVKHRGFQSTRKSEAKADEKAGEMLSGVKHNQALLKETSYRTMGELAARHADFKENKRNKGGSYIHTFLRSDLEDELSKLFEAQRGLGNSFALADFQTKVRELLMARRPALSGNALIDMVGKCTFEKSEYRAPKASYRAERFIWLGKLNNLKIVTGGDARALSDDERRSIIDQPFNSAKLTFKQVRKALKLDPHQRFNLLSYRPDGKGKDKDPEESTFFEPKAFHTLRKAYEKAKLDSEWKRDSSDADRLDALAYALTCYKEDGESREYLAGKGVESPIIEAVLEESFDKFIHLSQKALIKILPSMEAGRRYDDAAKDAGYNHSQPSNDGKKQTYLPPLDRDIIRNPVVYRALNQARKLVNAIVSEYGPPAAVHIELARDLSKPFDERKRIEKEQKQFRENKEKASADFQELFQRTPAKSDLPKWRLFREQSDQCPYCQQALDIDRLFGDYSQVDHALPYSRSFDDSMNNKVLVHTKCNQDKGNRTPHEYLDGANDSPQWQNFSAWVLSIKSIRQAKRNRLLRVNFGKEESAEFRDRNLNDTRYICREFKRMVETQLQWHPDSKAGERCVVLAGQATALLRTRWGLLKERDKGDLHHALDAAVIAATSRSLVKRISDYSRRKELGMVRDTYIDPETGEVLNASALRQIEEHFPNPWPYFRDELLARLSPNPASALENLPSFDKTLIADIRPVRVSRAPTRRGLGPAHQETIRSIREDNQSAIKTPLAELTSKDLENIVGFGRDTALIEAIRSRLEEFNGNGKKAFDPKQPPLRKPSKNPEKAPIVRSVKLLTTQKSGLPVRKGIANNDTMLRADIFTKNKEFYAVPVYVADAAKKELPNKAVVGNTPEEDWPVMDDTYTFLFSLYPNDWVTLRLKKEVREGYYAGLDRGTASINIWLHDRNRTLGKQGLLKSNGIKTALAIEKYHVDLLGNLYRVHKEERQPIYHKRKKE

SEQ ID NO: 7662 - protein, 1042 aa, unidentified
  REGION 1..1042: note = Description of Unknown: Cas Enzyme sequence
MGERILGIDLGIASCGWGVIEIGEPDGKIIATGVRCFDAPLVDKTGEPKSAQRRAARGQRRVIRRRRQRMNKVRKLLHTNRLLPDSSADALRDALRRVSPKGCNPPITPWTLRAAAHDRLLTADELSVVLGHISRHRGFRSNSKSEAGANAADETSKMKKAMEATRDLLAGRTFGQMIATDERFADRKRNRDKDYSHTAKRSDLEVEIRDIFSAQRRFGNAAATDDLANTFSEAAFTQRPLQDSEKLVGKCLFEPDQLRTARRAPSFELFRFLQRLAHLRISVGRVERPLTQEEIALASTGFGETKKTITFGSLRETLDLDPNARFAGVPKDKESKLDVAARTDGAAYGTKTLKDALGDAPWQSLVKTPEKLDRIAEVLSFREDMDSIKKGLDEIGLDERVAKCLLDAATEGTFIKFTKAAHISALACRNIIPGLREGLVYSDACARVGYDHSARPSVQLTEIGSPVTRKAFGEAIKQIRAVARKYGPIVLVHIELARDVGKSAEQRREIQDGIEKRTAEKEKRRGEAAEHLGRAASDDELLRYELAKEQNFKCIYSGDPIEPAGIAANDTRYQVDHILPWSRFGDDSYINKTLCATKANQDKRGRTPFEWFDSEKTEPEWMEYVARVEALKEIKGRKKRNYTLKDAASVEKNFKARNLTDTQWATRLLADELKRMFPPRPEKRAPDGTDERRVFTRPGAITSKLRRAWGLEGLKKVDGARIPDDRHHAVDALVLAATTESLLQGLTRAVQKREREGRQDDIFHCNQPWPGFRIDVKRAVHGENGTGGVFVSRAERRRARGKAHDATIKQIRDIDGEKIVFERKTIEKLTEKDLEKIPVPEPHGKVADPKKLRDELVESLRVWIAAGKPKDKPPRSPKGDIIRKVRVETKDKVAVEINGGTVDRGDMARVDVFRKKNKKGKWEFYVVPIYPHQIATMENPPNRAVIAYKPDDEWTLLDSSFEFLWSLTAMSFVEIVKPNGEFIDGYFRGLHRGTGAANVSAHSTLEKDGANDGIGIKTLSSLRKFTVDRLGRKFEVSREVRT

SEQ ID NO: 7663 - protein, 1090 aa, unidentified
  REGION 1..1090: note = Description of Unknown: Cas Enzyme sequence
MAATTDSDFVLGLDIGVSSVGWALLDRRNQRFVSAGVRIFDSGMDENKFAKGEQGASNNVERRTARLHRRQLRRRAARQRELFVALQDAGLLPAEPRGAAPEARHTLWTDLDGRLTAAWGKRIAAENPSVMAPQHVLPYFLRARALDHRLEPHELGRALYHLGQRRGYKSNRKDDSSPDLQSLEASKNRKKVSAAEDDTKKVLVEIAGLEAEIAASARTLGEFLSRMDPAAARIRTRHTGRAMFEDEFEKIWAAQAPHYPQILTAELKARLHGLLFHQRPISAGKPGMCELEPHCLRAEMCTLAAQRFRLVQKLNDLAVISAGGTREPLTPEQHARVSQRLEEGGDITFVQLRAFLGLPKTAKFNLEVLDEEKKLPGNRTNAVMLRAFGDRWKTLSDSERKRIVRLWADADYPADVERLATEQWSLAPDAARQLASQKSEKGYCKLSLHAISRLLDRMEAGEPFKTAEARLYPNRFSGEKEKDQLPPVAKVLPLIPNPAVLRALTELRKVVNHIIRQYGKPAQVRVELARDLKRSAKDRQRLMDVMEDNRKRRAKVVARIQKEAGIQDPSGRDIEKGLLFEELPECAYCGKTISFANLFSDAPLFDVDHILPRSRFPDNSFSNKTLACNTCNAQKTHRTPYEAFASDPERWPAMVARVSRKKKAGRHDRFALGWDKHQRFLLKTTEELADFSARHLADTRYITKLAARYLEELYGGRDRQVPWEDQNQRCVFASSGMVTATLRKAWGLNAVLPQPEGAKNREEKKRIDHRHHAVDAMVIALSSQARVQQLSAAAAVGDGRIAERVSSRTLQAPWPGFVDSLRPLIEAINVSHRPDHKLSGTLHDETNYGRSRPYNGKDYVHVRKPVHTLSAKNISSDDVIVDRKIREAVQTKLSELGNDPKKLESNPAMLLTRTGRQIRIHNVRIRDMKRTVPLAHGAVALNENHHVWIAARLDNRDREIEWTGDVVSRFEAVEAHGRTKKEKKRTPIVKRDIRTEDGEVLRFKFSLMKGDMVEMDDWKSRERTLFIVNKFSAYSSGAVVISLSRHTDARIQTDMMKTGDFRGLSPETLRKANCRKVIVDALGRVHEAHD

SEQ ID NO: 7664 - protein, 1238 aa, unidentified
  REGION 1..1238: note = Description of Unknown: Cas Enzyme sequence
MNSKGPGTYIAGFDIGSASIGWSAIVVHNEEPRSLLGLGALTFQPGVTNAKNAIERGADESRNKVRRLSRSGRRRIGRRAARLNRLFQLLQQYGLLPATEPPRHGDDPKDSGQARQRTMDALDDRLRAKWKERVCTSARGRNGKQVAADLLPYLLRKHGLYEPLDYEEFGRALMHLAHRRGFLGSRLAESLDETEQQPTAGSERAAEDIIGRDEATDGRRGADKKAGKKGVVQGGIEKLKEEMKAANAKTLGEFFSGLNPHEQRIRARWTAREMYEEEFELLWHKQVRENAKLTPDLYKEVKHIIFYYRPVTWDPETIGYCELEFNPERKQEYTEQEKEELRRAPWSHPDAQRFRLLQRVNDLRIIPNFGALPQQLTDNQRKALTELLQCEGDQTYPALRTALRNMPKGELPKHARFNFEPRSAKRVPPVKGNRTISVMRGYFERWDCHDFKQQQNLICEKWCNVENERELAAFGISVGLSTEAARKWAAEPPEPGRCSLCLTAIRKLLPLMESGLCYRDAVDQVYPERKPKPLPFLPPVKEAIPELRNPAVERALTQLRKLVNSMIRAYDAKPQRIRVELARELRKPRHIRELIWEQGNQAAERRRDAVRRIFQVLQENGRPTKRRDIERLVEKVLLWEECGGRCPYTDEEFNFSSMILHGYYQVEHILPKSRFPFDAFSNKTLAHPDANADKSNNTPWEAYHDKPEQYDRILNRVAHFQGPWAEEKLRRFKMDEEQAKKFAEDFTERQLNDTAYASRLATKYLSTLYGGDVVNGKRVVSVTSGGVTKSLRDAWRLGDALGYDRTDVEVSSPEELFDPQPKNRDDHRHHAVDAAVIVLTTDKQIKKLNDQAAHNRKTIGKEIYKDLPEPWDGFVEELKKRIKTVVVCHRPEHKLQGKLHGDTNYSQPRDANGKPCTDGEYVHLRGKVTDLLADIVRGKKKEVVLDDKPGKPSIIVDPTIRERVKGYLEPMRRYLSEFREWKKEQHGKRKRDIDWSTAPKRPNLIFITKSGRPIPIKRIRMRERLSVRQIGSAPPRFVQLRSNHHIAIVAEFNKRGKEVRWHGRVASLFDTIRELANTPRRMRRGKTVPKIVNTEYEFVRRLDATGRRIGRRFMLPRMEANAQAEDQRVSIVRGKKDAPLLRFKFALLGGDIVELDGETPATRDLWVARAFSQEGPGRLGLVRINDARPKDEMNEKEYWRPMVNELLKRNCVPVAVDLLGNVHYPKWWRLRARAAAAQ

SEQ ID NO: 7665 - protein, 1101 aa, unidentified
  REGION 1..1101: note = Description of Unknown: Cas Enzyme sequence
MPENRTVLGLDIGVASIGWALADIDGKEIQTAGVRIFEAAMDTAKFEAGAEGASHAAARRQARLQRRQLRRRAARHRDLYLALQSAALLPFACDRAENRHDVLNRLDRDLLSLWRPRIRQQAPDISDPDQVLCYYLRARALEEKLGAYELGRALYHLGQRRGFKSNRREGRAVLNKNREGGEPERSEIKAAINGLAAELRATGMTLGQHLAKVNPHATAIRNRKRNDIPPIWTGRSMYEEEFERIWAAQTPHYPGILTEALHNRLHRLMFWQRGISPGKPGRCTFENADRAPRPSLLAQQFRMVQAVNNLRVREGNAAERRLKADERQRLLAILETAITLRGKKRCIELFGLRFADVKEKLNLPPRTKLNLDDEEADSYLRGNRTKALMARAFGEDRWKALGETEQRRVVRKWIHEQSPEKLLTALRQQWGLSSEAAIRLAETEPEDGYAALSHRAMLKLLPAMEGEGLTYAEAVAKLYPRIEKEPLAFLPPVARADLGHIPNPAVMRALTELHKVVNAIIRIHGKPVQIRLELARSLKRNAEQRERDWKANRKRERERKAAADLIRDDLHRKPSRDAIDRVLLYWQCGNVCVYCGNALGGLSEIFSGEAAVEVEHIFPRRCLDDSFSNKVLAHRTCNLKKGDRCPSAAFAASPEWQGILDRVAALDDRGKLERFHATEDDALDFSHRHLADTRYITKLAAEYLEQLYGGRDVGLPWEDRKRRVYASSGVLTAVLRRHWGLEAILKEPGPAANGQGGKARTDHRHHAVDAIVIALTSERMVQQASLDAQSHDRSQGYALPRFFAPPWPTTGDIEERVSLFKSAVQRVLDGIVVSHRLDHKLNGPLHKATYYSPKKGEDVFGRTEVQALTPSDIESENVIVDEKLRLTIRQKLSELDGNPKSLETSLPHLQTRRGPVPIRSVRIRIPGKKAEPVRPGDREPTVFAEGNHHVVVFATQDPKKGLIWYTPGPVTRWEAIRRKSKGFDVIRTSDGPAANFVFCLMAGDMVEMLDKVTGRRELYVLASLSDRDYAFLRHNKSVPSAKGMGLTLGQLRRKMQDAGDRLRISNLDELRVRNCRKVEVDPLGRVHYLKSGKQARGAVAE

SEQ ID NO: 7666 - protein, 1042 aa, unidentified
  REGION 1..1042: note = Description of Unknown: Cas Enzyme sequence
MTGKKNNMGPLTFGLDIGIASVGWAVLGENRIVDLGVRCFDKAETAKEGESLNLARRTARLLRRRLRRRAWRLTKLARTLKREGVIGDVNLLKQSPKKGTPAVQPWQLRVEALDRKLNTEEWARVIYHLCKHRGFHWISRAEEKAAESDSKSEGGKVKQGLAGTKKLMQEKNYRTAAEMVLAKFPEAQRNKQGDYSKALSRVLLAEELKTLFEQQREKFKNPHASVELEVAILGNGDKKSGLFWKQEPALSGEALLNMLGKCTFEKTEYRAPKASFTAERHVWLTRLNNLRIVVDGTTRPLNEEERRIALPLPYQQAGNLTYKQLGSALVKAGCLGKDKFKFAGLSYPSEKQKTEDKAKDPEADKLIKLPAWQELHKTLKDSGLENEWQKISTDALEGKPQLFDQIAWVLSVYKEDNEIATELGKLNLPNKGKMIETLLDIRFDKFSSLSLAALYKILPHMEIGLRYDEACKHAGYHHSQLHQVGEGEHKYLPPFYSGRDKNGRMLFSEDMDIPRNPVVLRALNQARKVMNALIREYGAPHKVHIEMARDLSRPLDERRSIEKEQKEYRELNEKNKALFAQEFSIVGAPKGKDFEKYQLYREQQGKCAYSIEPLDINRLLEAGYVEIDHALPYRRSFDDSKNNKVLVLSRENRNKGNMTPHEYLKGSENSQPWRLFVAFVEGNKAYRQAKRNRLLRQDFGGKEAGEFRERNLNDTRYICKFFKNYVERFLQLAEGSETKRCVVISGSLTSLLRARWGLPTSKEKRAESDRHHAMDAVVIAACGHQIVKRLSTLVSAECWAHKPELGGYVNVETGEMLSTQEFVRKDEVYKLFPRPWPHFRDELLGRLKIDDPSLLRVEMEKLGIYPPEALAALRPLFVSRAPQRRNSGAAHMDTIYTKPRDGHVLMVEDKKAIKIAKDKDEKILRPATTEEKASMAIGRIGVMDKDSKGNYKLTLEKLNDIVDPHRNTRMIEALHKWVESRDEREKVAKAIELSFGRGKEKRKPTDAESAELKHLRALPRKPLKDDPDNGPFTGPIIRAVKV

SEQ ID NO: 7667 - protein, 983 aa, unidentified
  REGION 1..983: note = Description of Unknown: Cas Enzyme sequence
MNDYTLGLDIGSKSIGWVLLQTKEKPSIVDIGVRVFPEGIERDKGAETSKYKSRREARGTRRVIQRRRFRKNRLIRILTQARLLPQDKNQLHDLLLDREINNKQIDKKQRDLHPYKLRAKGLNEKLELFEIGRVLYHLAQRRGFKSNSKNKQREEKNKISEGISDLQKKINAAGCQTLGQYFSTLDPHDQRIRGWYTSRKMYEDEFNLLWKEQSKYHPDVLTGELLKNICDETIFYQRPMRWDPQTIGDCELEKGEKRCPRGDWYARRFRILQDVNNLKIRNRDGSERNLTEKQREIVLGELAIKAEVSFSGLRKKLQKLSGNEGMYETELFNLEEEGRKPKVKGDEFAAAMIKILGNKIWDTMEEYKKIEVNTALLELEDGKFAEKMAKEYNLNQEQIEAILDIDLPSKYMHYSRKAIQKLLPEMEKGFLTTKAVKKVYKEHDAKPKIKDAEQDILDMPPNLRNPLVQVALLEVRKLINSLIAEYGKPNKIVIEMARDVKGSKEERLRLQDNMRENEKVNKNAIKKLKELSYQITADNILKYKLWEECSHICPYTGRSISDIALFGQHPEFQVEHILPHSRSLDNSFMNKTLCEVHENIHVKKKQTPYEAYGHNPEKYEQIKQRIATLPYPKRRKFLQQEKINLDECITRELNDTRYICKEVIKYLKRLGGIKIKGTKGRVTYDLRHSWGLDTILDTSGSAVKNRADHRHHTIDATVTAVTTGEHLHRLAESKCPENNVEFLQPWPHFREELAEKIKHINVSHRPTKKTSGKPHEETSYGLTDEVRQYFQDGKMTKLSPNAWLCKEMLNYIYSRTPAEIFKTVGDLDVIPKDSKNVREAVEKKLTQNGIDVRDRGAEISERVFDEKIYIETKGGKKVPVNKIRVRVPKSNMIIFTDQNGSPYRACPAGVKGGNHHVAIFEQTDEKGETKRIAKIVSRIEAVQRRREHKAVVQKNNGPNTKFICALAINDTVLMPTKNGDMDL

SEQ ID NO: 7668 - protein, 911 aa, unidentified
  REGION 1..911: note = Description of Unknown: Cas Enzyme sequence
MSELTLGLDLGPNSIGWALLDEENQKIVATGVRVFPEGVENFDTKKEKPKNESRRTARGMRRQIARRARRKRKLREALIEAGLFPHDRCEQDALLNQDPYLLRQQGLSEQLTPYELGRVLIHLNQRRGFLSNKKMDRQRKKETKGMLAEINELAAEISNNGHKTLGDYFAHLRADPHCRIRNRHTHRDMYREECQQIWNAQKQYHDELLTDELRDRIDRVIFFQRKMYWPTSVVGLCELEPRQRRCPLADRLAQRFRLLQEVNNLRYIDKETGELCELTLEERTLLLGKLSEKKEMTFDQIRKGLNFGDGIEFNLERGKRTKLLGMITDASLSHKDIFGKGWYEKSEDEKNEIVRALIHDDEEKVHDRAVNELGLTPDAADNLLDVDLPTGYANLSRAAIEKLLPHMERGLLYMSNDDTPSALSEAGYLRPDQIRGRIHDSLPHPPDLANPVVRQALFEVRKLINAIIREYGKPARIHIELAREVKAGPQRRQEMNERRAEREELRSKAADKIREQGISPTRETINKYLLWQEQDKICIYSGRPISVAQLLSSETNVDHILPLSRSLDDSLNNKVVCLKDTNAEKGNRSPYEWLAEARPQRYDEILQRAAKHLPFGKHRKLAQKTLELDTFVARQLVDTAYISKAVAEYIKCIMRHPHDVLCTKGQLTEVLRRNWGLNTVLRHDDLDLKNRADHRHHAVDAIVVALTDRKRLQQLSRIGNGEQLPDPWETFRHDVEEVVNQINVSHRVRRRVSGALHDDTLYGKTQTLGEFVYRKPLEALTLAMIQDIRDPVIKKLVVERLEQHGIDPNGNGSIPASVWAEPLTMPSGVGIRKARLIRRDASILPLRGEAAYVKPGSTHHICLFECCNNGRTELDAVFVSMLEAIRRIQAREPVIQRRHPTVASAKFLFSL

SEQ ID NO: 7669 - protein, 1024 aa, unidentified
  REGION 1..1024: note = Description of Unknown: Cas Enzyme sequence
MTETVWGFDLGTTSIGFAVVRQDPANKTGKIIKTGVRIFPEGRTEKELEPRNQRRREKRMARRQIRRRRERRVELSRRFHALGMLPRFGTDEWRELMSLDPYELRAAGMTRRLELMEAGRALYHLAQRRGFKSARKTIESVSGDEEETGVVKQGISELRQELGGKTLGQHLFQQEEKRGRYLGRDMVMEEFEGLWDVQGKHHPSVMTQELKEEMKGLIFTQRPIFWRSTTLGTCRLEPESRLCLKSSWLGQQFLMLQELNSLRLQGENDPLPPDEVNLLQEQLLLEGGLTWPQCRKLLKETWQQQGTPLRSKFNFEIGGKKKLQGNAVESLLQKALGTAWVGYPHKEKLRQELPELLWELDYRVVGRGKTEKILIRSDEETQDLRKQLLETLKSGFGLKSTVANQLVTEPLPSGWLSHSLKAVSKLVPHLEKGKLYSEACDAAYPGHREVTGEGLDFLPSNQSHLKEIRNPSVRRALNELRKVVNNLIRTYGKPDRIRVELARDLKRPASKREEYQNRMKQNESARDTAAGKIREMGHVVNKLAIDKWILWKECDERCPYTDEPISASALFQEGRFDIEHILPYSRTLDNGFMNKTLCQREFNLLKGNRIPYEPIVQQYGEGGWKSFAQRIRKSRLPDAKQRRLLTQRLEDVHEDDFSERQFRDTAYIAKEARDFLMKLFIKQEERAMPVESSNGMITAQIRHLWGMNTLLGTSGGKNREDHRHHAVDALVVALVSRVMVKKMSDLSQYWLRGTRHQFPMPWETFRTEAQQSINNIIVSHKVQAKVQGKLHAELVYGKVKLAPAVTGGKYEQFSRRVRLADLSKSQIKAIKNDTLKVAWDSGGRIKTLLQDHLGKHKDFKKELPFMKTKSGGKRVIKSIKLIENMQPSLMAELQSEGRTWASKNENHHMVVFEDGDGKVRFEVVSRFDAMKRHSSKLPVVNRYAPPGYHFKMSLLNRDSLLIQTGDEKEEVYVIQSIWNSGQLVLMKHNESEAVPIRKTVGAHLREGMTKIGIDPIGNRMQKND

SEQ ID NO: 7670 - protein, 1024 aa, unidentified
  REGION 1..1024: note = Description of Unknown: Cas Enzyme sequence
MSGMQYRLALDLGSNSLGWAMIRLKDAQPVAIIKAGVRIFSDGRNPKDGTSLAVGRRLARAMRRRRDRLLKRKARMMALLLRFGFFPADAPSRKALEQLNPYELRFRGLDHPLSPAEFARALFHINQRRGFKSNRKTDRADNESGALKQAISALHQQIDSSGTGGKARTVGELLWRRMQAGQGVRARYREQRIETEAGKTRIDKSYDLYIDRSMVEAEFDALWACQARFNPAQFTEEARRELRDCLLHQRLLKPVKPGRCTLLPDEERAPLALPSQQRFRIYQEVNHLRILRENLEEVPLTLEQRDTIVDALERNGRRTFAQIKKMLQLPGSTSFNLEDAKRQELKGNATSATLGKKDHFGPRWFEFSWQQQDEIVMRLLTEENESRLLDWLQSTFGLDEQRAIRIANAGLPEGYGSLSAKALSRILPALQTDVISYDKAVQQAGFQHHSHISHAATTGEVLPSLPYYGEYLPRHVGFGSRNPDDPPEKRFGRIANPTVHIGLNQVRIVVNGLIKRYGHPAEVIIEVARDLKQSQQQRKEQQLQQAQNQKRNERLRLMATELLGVAPSRVKQADIQKLILWEELSDDVAERRCPYSGVQIGAAMVLTDEVEVEHILPFSQTLDDSLNNKTVCMRRANRVKGNRTPWEARADFEAQGWAYDDILRRAERMPRAKRYRFAPDGYARWLKEDKDFLARALNDTRYLSRIAREYLSLICPQATRVIPGHMTALLRAKFGLNDILGLEGEKNRNDHRHHAVDACVIGVTDQSLLQRFAQASASARQKQLDRLVDSMPLPWPTYREHVALAVEHIWVSHKPDHGYEGGFADDTAYRPPHLDPRGLWRTRGIGGSSPNERAADAPMIPVSEPGQTGRRHQPGPDGQTLPYKGYMGGSNYCIEITRAANGKWEGHVISTYEAYRIVKERGLKQLRHPTKGQNGAPLIMRLVKNDCIRIRLQEVEQVMRVVKIATAGTITFAPVNEANVDARNNAKEDPFSYTYKTAGSLKKSEARQVTISPTGELHDPGFRE

SEQ ID NO: 7671 - protein, 911 aa, unidentified
  REGION 1..911: note = Description of Unknown: Cas Enzyme sequence
MAQRRGYKENRITEAQANEDGAIYEGDPASGKIGISAMKEAMGELTLGQYLARLEDSRRERIRNRYTLRSMYLEEFEKIWEEQSKHYPDVLTDELKRRLGDEKTGILFFQRPLKSQKELVRKCKFEFDYVKDKDGKITKRYLKVCPKSSPMFERFRMWQFINTIEMNGRKLIDHPNGEALRQKLVDLFNQKEELKFKDIKKALKATDAVFNYPDDKTIPGNKTIVRLRKIFNYSKKEYVERLSETEKAQWKKLPPTEINRRLNVWEHLSPEEQIQRWHVFYSFDSTDKIIEHAREKGWHLSDKKIDLIKKTRLEQGYANLSYRAIRFVLPYLEKGYIYSEALLLGSIRRVFKQDWLEFAPEEQIKIEQQAVAIIRENKPGKSIDRIKEWLKQEYSRTDRDLERLYHHSDLKNPPGDADELGIPPDVRNPIAKKVLGALRKLVNQIIATYGKPDQIVIELAREMNMSERQKKEIEIINNRNEQINNEVKRLLAEKELPLTKTNIQKWILWEECRHTCPYTGLEIGFEDLFIHARFQIEHIIPRSISLDDSMANKTLCKAETNSEKGNKTPYQFLGNDANKWKEVESRIWQMVKKSETDDQQNKPIIPTSLPYHKAKRFLSEKPPQAEDFISRQLNDTRYMAKEAKKYLAQICKADNIIVAQGGATALLKHYWGLDNIAGVMQSVIPLNEEHISKFNLQDQKEYLAALDPNDQPVQMYEWNANLEDNKDNKKSLERLGRVVQGLVELHSGGKQGKFYIGKNRADHRHHALDAIVLACTQRSYLQKIATLMGEGHSLKELKEKNLFPLPWRNFRADVRAALYETLIVHPQPKQNVVTFSRKYIKKDNKKYLAQGVTAKGALHEESYYGCYKNKKTGEEEYRKRKPLESITTLKQVQKIVDEGVRRQVILRLQEI

SEQ ID NO: 7672 - protein, 1137 aa, unidentified
  REGION 1..1137: note = Description of Unknown: Cas Enzyme sequence
MGDKTPESLTFGFDIGIASVGWCVLGENRIVDLGVRCFDKAETAKEGDPLNLARRSARLMRRRLRRRAWRLVKLARLLKREGLIADTKTVQTPSPKSPWCLRVAGLDVKLDTDEWARVIYHLCKHRGFHWISRAEEKKAEGDKKEGGKVKQGLSDTQRRMTEKGYRSAAEMVMAEFPEAQRNKAGDYGKALSRVLLADELALLFRRQRELGNPHAGAELEAKILGSGDRKSGLFWEQKPPLAGADLLKMLGRCTFEKNEYRAPKASFTAERHVWLTRLNNLRIVVDGITRPLNEAERRIALPLPYKQAGDFTYKQLRAALTKAGLGDFNFAGLAEDKEKDTLVKLPAWQTLRKALKDAGLETEWESMAGAATGGDPTLLDEIARVLSVFKDGAEVEAELRKLNLPGGEKMIETLSEISFDKFHALSLKALRKIIPHMETGLRYDEACVAAGYHHSQLHEAGTGEHKYLPPFYAGRDKDGRMVFAEDMDIPRNPVVLRALNQARKVLNALVHKYGSPAAVHIEMARDLSRPLTGHWTESGKYIEGRRDIEAKQKEYRERNEKDKAAFAAEYGIAAKSREFEKFQLYREQQGKCAYSLKPLDLHRVIHDIGYAEVDHVLPYSRSYDDSKNNKVLVLAEENRNKGNRTPYEYLTTLGGEQGERWRGFVAFVEANKSYRLAKRQRLLRKDFSGKAAEEFRERNLNDTRYICKFFKNYVERHLQLKVGADGTAAKRCVVLNGQTTAFLRARWGLVKVRGDSDRHHALDAAVVAACSHGMVKRLSDYSRRHELDDVRSGFIDPETGVIADIEALRRLERHFPEPWPHFRFELCARLNIDDRDELREALSDLGTYPSEALEALRPLFVSRAPQRRNGGAAHKDTIYGQPERLKAQGGVTQKVPLSSLKLADLDKLIDPHRNEKLYAAIRARLEAHGGKGDKAFPPNNPLRKPDRDGNPTGPIVRTVTMVIDKLSGIPVRGGIAKNDTMLRVDVFRHKKDGKFHLVPVYVHHAVAKELPSRAIVAFKDEKDWTLIDDNFDFCFSAYPNDLLKITQRSGEITLGYYRGCHSGTAAINIALHDRYAYGEKTTSLSFSKKNPDKPIPNDKLGLIEGIGVKMAANLEKFHVDVLGNIYPAPPEHRRGLA

SEQ ID NO: 7673 - protein, 1079 aa, unidentified
  REGION 1..1079: note = Description of Unknown: Cas Enzyme sequence
MARTLGLDIGTNSIGWCIVEDGKDIIAMGSRIFPVGVKEDTYAKSGTEESRNAARRTARGIRRGYARYKLRRAELERILTEHGMMFDKAKSLPTKELYGLRRDALDRRLGLDEIGRIFFLMNQRRGFKSNRKEQAKGDEAKKLSSTKQAMREFEDKMHAAGCRTAGEYVASLFDNQPENWHNENEPRERIREKQRIRRELYQQEFDLIWAKQREYHPAILTEELKRQLRDRVIFFQRKLKSAKHLVSRCRFEPNKHVMPKSHPLFQEFRLLQKLADVRVTYQARVNEPLTLPERRSLALELSKAEKVNVTLIKEWLDYPRSARINDLGDDLKGNTTWSRIRKAVGDDWFERQTEEAKLKLWHTLYFAADEGWIEEYAQRALGMNDEQAKLFAAVNLELDYGSISHKAASRIVPLMRDGHDFATACAEAGYHHSQNELDDPDRPLKDKLTGADIDALRNPLVQMTVNETARLVSAIIKQHGKPDQVRVELLRELKKPKAVREKMRNSMRDKERLRDEYRAFLKAKGVMANPYPSDIKKFELWLELEYSEADVSRLAPDMDLKAFKKFAEAVSPKDREKFQLWLECDRISPYTGKAIPLAKLFTEAYHVEHILPYSRSLDDSFVNKTLCEDAVNDEKGNLTPLEYFEQKRSPEELKAFKQRVKDFSEAKLAKFLATEVKDDFLNSQYTNSAYIGTEVRKLLRKAFKDVRVTNGQLTGLLRNKVWRLNDLLNTAPDQKDRDDHRHHALDALVIACTSQSLVNRISRESQFDYRGVQRAPDIGLPWPNFRLDAARHLNGLLVSYRNGKRLLSAKKNKYTHSKAHDGKPEKVQRTLAVRGPLHEETLYGRITIQNKGSKEETYVVRKALTSLTKVEQLENIVDPVVRKTIQDHVAAHGSLREALKVPVHMPVKQANAGKLIPIKSVRMRVGTEEMIELRPKTYVEPGNNFCIAIYEDAKGKRTFRTVSFFEAAQRARRKEPLYPAEMEGKKLLMALQQRDLVVLYDKHPEEIQWNDAGWMANHLYLVRKFDRNGIIGMVLHKAAKANPERPRETPEGYVAKRTPNTLRGVKVMIDRLGVATPTQ

SEQ ID NO: 7674 - protein, 1451 aa, unidentified
  REGION 1..1451: note = Description of Unknown: Cas Enzyme sequence
MKQENKKTILGLDLGTNSIGWALIEQDFENKSGNILGMGSRIIPMSQDILGEFGKGNSISQTAERTRLRSVRRLRERHLLRRERLHRVLNILGFLPEHYASQIDFEKRLGQFKKEAEPKLAYKDKEFIFKRSFECMLADFRHSQAQILVDEKGAPKLVPYDWTIYYLRKKALTQKIEKEELAWILLNFNQKRGYYQLRGEEEEENPNKLVEFHSLKVVNVLADEIQKGKTDIWYSLILENGWIYRRSSKTPLFDWKDKVRDFIVTTDLNDDGSVKTDKEGNEKRSFRAPGEDDWVLLKKKAEQEIDKSNKTVGAFIYDALLKNPRQKIKGKLIRTIERKFYKDELVQILQKQKEFHPELQSENLYNDCVRELYRNNDAHQVLLNTKDIVHLFLNDIIFYQRPLRSQKSSIGNCTLEYRKYKDQSGTEQIQYLKAIPKSNPYYQEFRIWQWIYNLSIYKKDDDSNVTDEFLKCTDDIEKLFGFLNSRREIEQKNLIKYFLEQKGFKGKMLNAEIEKYRWNFVEDKKYPCNETRALIASHFARVENLSADFFDRNVEQQLWHIIYSVTDKDDYKKALKTFAGKHRLDIVSFVEVFSKFPPFKSEYGSFSEKAVKKLLPLMRTGKFWSWDAIDTKVRERIEKIINGEYDENINDRVREKVIHLKHKDQFQGLQLWLAQYIVYGHHSEAAIAGKWNSSADLEEYLKQFRQHSLRNPIVEQVVTETLRVVKDIWTKYGKGANNFFDEIHIELGREMKNTADERKRLASQMIENENTNLRIKALLAEMMNDAKVENVRPYSPMQQEILKVYEEGVINSAIEIDDDILKISKMAQPSSSDLKRYKLWLEQKYRSPYTGEIIPLNRLFTTEYEIEHIIPQSRYFDDSFNNKVICEAAVNKLKGNQIGLEFIKNHHGEKVPVGFGKSVQIFEVNDYEEFVKRHYAKNRSKRNKLLMEDVPEKMIERQMNDTRYISKFISGILSNIVRAEKNDDGVNSKNVIPVNGKITTELKQDWGLNDVWNELVLPRFERMNQLTNSSQFTSWNENHQKFHPTVPLELSKGFSKKRIDHRHHALDALVIACATRDHVNYMNNEHALRKGKTQDEKQRIRYDLRSNLCYKKHNDGSDKNYKWIFKKPWEKFTTDAREHLERIVVSFKQNLRVINKATNRYEKWVEKDGVKVKEIFEQKGRNWAIRKSMHKDTVSGKVHLQRIKVPKGKIITATRKSLDVSFDLKTIKSITDTGIQKILTNYLLSKGGNPEMAFSPEGIDDMNKNIEKYNDGKKHQPIFKVRVFEIGSKFALGQSGNKKAKYVEAAKGTNLFFAVYLNQDKVRIYETIPLNVVIERQKQGLGAIPEVNENGDRLLFHLSPNDLVYVPSKEDEAQYLDSSQIMNFSLNRIYRVVSFTGSQIFFVRHDVAISILNKQEFSSLNKMERAIDGVMIKESCIKLKVDRLGNIIPAT

SEQ ID NO: 7675 - protein, 1036 aa, unidentified
  REGION 1..1036: note = Description of Unknown: Cas Enzyme sequence
MRYRIGLDLGTNSIGWAVLRLMPDDTPRQVVRLGVRLFPDGRNPKDKQSLAVARRQARQMRRRRDRYLKRRERFMDALIRHGLLPQDSVERQALVNLDPYELRAKGLDEALPLHHLGRALFHLNQRRGFKSNRKVDKAADQEAGKIKGALSQTEAAMQAIGARTAGEWLWLRHKDKRPVRARLNGQGAKASYELYVGRDQVAAEFDRLWEAQRGFHGAHLSDTARDELRDILLHQRELKPVIPGKCTFEPDDRRAPLALPSTQRFRIYQELNHLRILGERYEEIPLTRAQRDKLATDLLRGKKRTFEQMVRALRLPPGTRFNLESDKRTELKGDATAAALGRDDAFGERWHHLSLTEQDAIVERLLEEPSETVLVAELMEHWALPEAHAIRVANLGLPEGYGHLGRKALGKILPELMRDVVTYDAAVAAAGYSSHSDLGGRLNLEELPYYGRVLKRHVAFERDNPRNEVEQYGRLANPTVHIALNQMRGLVNAIIRRYGKPEQIVVEVTRDLKNGLEARKRIEAQQKLRQQDNDRYRRELAGLGLPHNAENIKRLRLWEELNKDDPLNRCCVYTGEQISVTRLFSDDVEIEHLLPFARTLDDSQANQTVSLRRANRFKGNRTPFEAFGASTGGYDWQAILQRAGHLPENKQWRFAENALERFLEGQDFLARQLNDTAYLSRIAKQYLESLFPEDGRNHVWVTPGRLTSLLRGKWGLNRILSDANRKERTDHRHHAVDAAVIAVTDRALLKQVADAAQRATETQLDRIIGEMPLPWQGYRREVKEAVERIRVSYKPDHGVEGRLHNDTAYGLVEHNPKGPSVVVHRVPVTTFGKTEDLKAIRDTELREELHDRLGSLQGKEFQAALARWSEETGVRRVRVMESLEIIPIRDREGHAYKAYKGDSNYAIEIWRDDKGRWRGDVITTFEANQMARKGLIPLPKDVAGNGKPLVMRLCKDDTVLVEEGGRKRIMRVVKFSQSGQIALAELHESGNLKERDADKTDEFKYLLKNPGGLLPLKARRVTIDFLGILHDPGFTP

SEQ ID NO: 7676 - protein, 1535 aa, unidentified
  REGION 1..1535: note = Description of Unknown: Cas Enzyme sequence
QKFERGGQTDTKAAARRQKRGSRRLKHRYKLRRTRLIQVFKLLGWVDESFPLDNPKKIKQRLTEEGIFSFRISDSVPVSDSSYREFYKAFNYSDEQIEKAIEEIHYRKQHGKHKYDDIQLLPEDWVVYFLRKKALSRELTLQELVRIFYVLNQRRGFKSGRKDLKTSSILSYDEFSEIKRKIDTGELAAYKKGLGEEYKTQYVSTTTITSITQLNEEKDSKGNLTFQIEAADKRIHPWKVKRKEKPNWESKEVMLLVEQKINSKGEIKQDSDPKLPKPDDWSLTMISLDNQIDESGKQVGEFLFDKLVEYARSGDVYKIRQNVIRREKYQKELMAIWEKQLQLRRLSGREEELLNTSKLEKIAKTLYRHNEAKQNELKEKGLFHIICNDIIYYQRELKSQKHSISECRYEKRVGIEKNEEGAYINIGIYGLKCCPTSSPVFQEFRMWQDIHNIRILQKEKRENDRIIIDFDVTRNYLNESNKDQLFDLFDSTAEITQQKIFDKLNELNSGVGLNEEEYRINLFANRNKLKGNETKDFFKKVFRKNKWQEGDKLLNNSEQFFKLWHILYSISNSDLEKSRKGIRNALKNNFPQMPDDVVEELCNQEEFEKSYAAYSSCALKKLLSVMRCGKYWSRQSIEQIEIRLSPSKNSEKIKLSERIENIIKNGWDKEFKVDKRTGEIIKVRKFENFEQFSGLPAWIAGYIVYSRHSERENADKYSLDEIKKINVPVMPELQKLKGNPLVKQVVMETIQLVKDICHQYGQPDEIHIELARDLKKNSEQRKTIAAQNDKNLQEKIRVKKLLQELLNDSFDHYDAEGKQINMSFSVKPNPGSPADIEKFRIYKSCATFGWNNKEKKNEDEVEMEKLFKDGKKERIPTKAEIKKYILWLSQKCRSPYTGKIIPLSKLFDETQYEVEHIIPRTLLKYDAMDNLVICETGVNKAKGNRLASIFIKQSNGNCTHGETTYSLLKFEDYQKHCKETFHGKKYKNLLTEEIPDDFIERQINDTRYIGKKLGELLYPFAKSEAGLVFTIGSITSELKKNWGLNKVWKRLVEPRFRRLEELTGKTYVLQNEHDPGDIDFDVPEINDFESKRIDHRHHALDALITAATTREHIRYFNTLSAVDSNEEKRKYQYTLCKAKIRDFKLPWETFTKDAKEKLEATIVTFKSNQKIVSKPFNRYFKWIQNNEGKWEKQQKEQLPNNRWMAVRKSLFNENPLGLIWKKEIRYVKVKEAFRIQIERMQLEHDNEKRKTAAYVYDQAARPIIKNIITKTMEMTGLDITQTEELLVAIEKHYLKKNKNEKNYILEGISFTTIAVAEFVLYKAKRVTVDKTFTEEKINKIPYAEKLPLANKLKTHLQQYGKPAEAFEGEGMEKLTEANNKKPIRTVKVTDGKISKDHLDNLFGKKYYEPAAGSIAYFVIYENEITKKREAMFSIATHIAIKRMREGKPIADVKEGYRLIILQPNDLVYVPTDEEWDKIKAGEQNIIQWENKKAIAERIYKMVSADDAFFIQHHIAKAIIPTILSGDGKTKGEIDW

SEQ ID NO: 7677 - protein, 968 aa, unidentified
  REGION 1..968: note = Description of Unknown: Cas Enzyme sequence
MQEKVLGIDVGGNSIGWALIATDDQSQDFQLLQGGICAFLSAEERGEAKNKDRRDKRLARRQTYRRVTRREILCRTLVHAGLLPVNERERRELLKDGEDRNSYALRTRALNEKLNPYEIGRILMHLVRRRGFLSSRKQNLGELARDPEIQKIIERLEEEEAELSLTTPKKRKREKQQATQTDAQSREEEDESTTLRKGKELQKEMEEAGARTLGEYFYQLLQQGKPIRRRTTLRSMYEDEFDAIWQKQQEYCPNLLTQELKERVRYILFFQRPLKLDPDRLGQCSYEPEEHRAYLALPTIQRWRIWQDLNNLTHRQKDLHDETPLTYEQKSLLFEALEHNQKLTWAQVRKLLSIPRDRIFNLEEEKGKKGKELTGNITSIALRKALGEKWDNLPPEKQDELVQLLVTEQRRRVLYETLQTPEWGFTKEEAIKAISTPLKSGTASVSLTVARKTLPHLKAKEYCPRTVQPDGSEKGCDREGHLWHHALELAGYTFREESPTTGVDKLPLPPEVRNPVVQKALFQLRKVVNAIVKEYGKPNRIRIEFARDLQTSQAKRERIIREQQENERKNREAREKLIKEFGISRPSRDDVIKLRLWEEYPYCPYTGTFISQDMLFSEQVDVEHILPFSRTLDNSYMNKTLCLAEENRNVKHNKTPYEAYGSDEERWKRILKNIENLPKPKQQRFKMTELPEEFYHRQLNDTRYIAKASREYLKQLGVPVEPTKGSVTAILRDAWGLNALLRDVVKEDLGEIPSQEGETETLNTEEETEGETLTPDTPTKLRDDHRHHFVDAFVVALTSPALIKRISDHARTSDIPGKRAPYKGAASIPQKLREELRQTLKKIVVAHAPRRKIEGAFHDETAYGMRDQTGKRTHAYQDTKEGQDVKYVVRKPVDGLTPPEIARIIDGGIRERIIQRILQLVPEGEKESVRSAIEKYQKEGRPKIPQNAKKAIEEAIKKLKPPTPHDPE

SEQ ID NO: 7678 - protein, 1136 aa, unidentified
  REGION 1..1136: note = Description of Unknown: Cas Enzyme sequence
WLKNKDALDEKLEASGKHPGQYFHQELLENPDQPPRFRERVVLRERYKAEFDAIWKRQAQAHPVLTDASVRDRVLEALIPRNTALRAQWVGKDLGTIVRDFVIYYQRPLKSQAKNKGLCRFERKPVAPVSSPVYQLFRIWQQVNNIVLRDKFMREQALTPEQRRLVVGLMMEQSSVTEASLLRALKLSKSGLETNLRADLPGHVALSKLRDVLGDHPVWSQLQADAQHVTGQESTLLFKLWHVLYSIPKQEHRKASVTKLLDLDDATAEELAKVRYERKHGAVSARAASRITQLMACGSAWSSDRWPMSLQRRVQHVIDNRGADDMKPEMREQVAPLTSIEQYQGLQYWVAATVAYGDHRAKEGTKLDSPERIKAMPRGFLRNPTVEQVVNEAMMVVRDIWKEVLNGERPTSFRIELARELRQSIDERQRTDKRNRDRERDRKKVVERLMKEHGKARPTGKDIERFELWEQQKHQCIYSGRTIEASQLFSREADVDHIIPKTLFYDHSLQNKVLCLRTENAAKDNALGAVYMKGKGEKAYDDYVQRITDWNLPFGKRKFLLAEEVPDSFIKRQMNETRYIGTELRKLLERIAPVNTTVGQVTDALKNEWGLTTVYKEVLLPRFKRLGRIVHGDEMSLIQVIHRTNGADHVDYRIEGYDKRIDHRHHALDALVVALTRQKYIQKIAKLKQQGEPLTEEEAKGKLTWWPLPHRDLRRIVKDQLERTIPSIKNRQRLLTKTSNRTAWFDHEAGKVRTGKEGKPQQGRLLAVRGKLHEEQPMGEVRRQERLPIDKVMKRLVEVSLFQEVPVLELVRPIASNDPAYRNRILAHERERAWLEERLAKHNGDTKAALKDWKKAPPMNSKGEPVLALTVLVPYYVSTQPIRGLSLKKLEHLESKFLDHGMAKALTQHLAALKFERKKPLTDDDLNVLNEGRAVPLKAIRMRKSDTPIWNSDGHRRLLRPCDPNGRLHIKLGDNYALAVHVNEATGERSFETISFYDAVHRKRQGMELLERKPGHRTFLLHKKDPVYVPRPGEQLRDIPWDDRNAIGERLYITMKFSGVRTFYLPYSVSSIAPGFEKKRKKNEEEVDTTKSKDRYEFGSHNCTEFHDGDIPRTKIGQTCIPVCIDRLGRVRPLWP

SEQ ID NO: 7679 - protein, 1140 aa, unidentified
  REGION 1..1140: note = Description of Unknown: Cas Enzyme sequence
ISEKISLKELGRVLYHLNQKRGYKSSRTEENKDKKETEYVSEIKNRWEKLKEENKTIGQKFYEELLKNPYYRIKQQVFPREAYIDEYNRIMNKQKEFYPDILTDNLIKHIRDEIIYYQRPLKSQKGLVSTCELEGFWIKNKDGKEIFVGPRVAHRSNPLFQVDKIWESINNISIKNKYNEIFEISLDKKLEIFNYLDKNEKITQKELFKILNIKNNSGWYGNKMLSKGIQGNIVKCLIKNAINNKELEEKWLRFELKINTLNKETYLVNKETGEIISSMNKEEVSADFENEPLYKLWHTIYSIQDIDECKKALIKKFGFDEKTAERLAKIDFSKFSYGNKSIKSIRKILPYLMKGYNYSDAASLAGYNHSFTITKEEITNKSLIDKLPILSKNSLRQPVVEKILNQMIHIVNDIIDDKRGWVTREERLNGQFEIRIELARELKQSREERNETFKNLSKIERENKEIEKRLIELGVRPTRKNIIKYRLFTEISEDKINATCIYTGKKFSLSDALNGNNIDVEHIIPRSLLYDDSQSNKTLTFSEVNQEKDNRTAYDYMKSKGEEAFNQYIERVNKLFQEKIISKSKRDKLLTPSNKIPKDMIERNIRETQFITKKAKEILSQVSKNVWTTTGEVTSILRKLWGYNDIIMNLQLNRIKELVPNPIEEGITEIVNIETNDGQIHKKEVIKNWTKRDDHRHHAIDALVIACTKQGFIQRINTLSAETTRNELYEEVSKQSKEFRDKLTLLEKYLILQRPFSTDEVSKKVSQILVSFKPGKKVATYGKQLIRKNKKTICLKKDILVPRGPLSEESVYGKIKIIEKNKPIKYLFENPHLIFKPYIKELVEERLKQCNNDVKKAIESLKENPIFLDKDKTEILKYATCFKEEYVIKYPLTSITEKDIDYIVDEKIKKLIKNRFENNKKDPFKEPLYLDKENKIQIRTVRMLTGLSAVEILKKDEYNNPISFVKPGNNHHIAIYRDESGNYVPHLCTFWHAVERKKYKLPIIIDNPNQVWEEIEKNSNTFYSQSFLDKLPQKNLVFINSIAQNEMFLLNPDNDNRNERYENYSKILYRVQKIFYNGKQLEIFFRHHLETKIDDTDTSRKVRRFYPVKSINALINLNPHKVIINRLGEIILIKNFFDKK

SEQ ID NO: 7680 - protein, 1110 aa, unidentified
  REGION 1..1110: note = Description of Unknown: Cas Enzyme sequence
RRYDRYQLRRKALTRELMKHGMFDPQLFNLGQLELWRLRAKAVTDKVSLKELGRILYHLNQKRGYKIMRIENDSSNKDTDYVAEIKNRHQEIKEAGITIGQKFFAELQKNQYYRIKQQVFPREAYIEEFEAICKQQQKYYPNVLTDDFIAHLRDDIIYYQRKLKSQKDLVSVCEFEGFWTTTSAGKEIFVGPRVAPRSSPLFQVCKIWETINNITLKNRRGEELKIPVEKKKELFEYLDNNEKLTQSKLFEYLGLDQDDGWYGGKLITKGLQGNLTKVELMKYLRKDSPLLKFELIVKEESEETFLVDRKTGEVLGSETKKIVVPTIESQPLYQLWHTIYSIPDLEECKNALIKRFGLDQDSAEKLARIDFRKSGFGNKSVRAMRKILPYLMDGYKYSDACSYAGYRHSDSLTKGENLQRKLLDAIPLLPRNSLRQPVVEKILNQLINVVNAIMVKYGRPDEIRIELARELKQNKEERNETFLNLKRIERENEEIRKRLQEEYGLPPTRTNIIKWRLFHELSGIEGKVNAVCIYCGKAFGITDALKGSNVDVDHIIPRTLLFDDSQSNKVLAHRSCNETKGNRTAFDFMQSKGSEELDRYLERVNNLYRDKIIGKAKRDKLLMSGDKIPKDFIERQIRETQYIARKAKEILEQVCYNVWSTSGSVTQHLRRVWGWDDVLMNLQLPKYREIGLTEWVTLESNGQKHKKEIIKGWSKRDDHRHHAIDALVIACTQQGFIQRINNLSSRHTREEMLEEVEKQSKAFRRNLSILDAYLVSKRPFTTEEVERKTAEILVSFKAGKKVATFGRQIMKKGGKKIILQKKVIVPRGPLSEESVYGKIKTIERDKPVKYLFENPHLIFKPYIRALVEKRLAEYNHDTQKALASLKKEPIYLDKGKKKKLTYATCFKEEFVIKYPVEKIKPKDVEYIVDERVRNLVQMRLAQYKDREKEAFKETLYFNEKKKIPIRTVRLFTRLSAVAPIKRDDAGNPIGYVLPKNNHHVAIYTDENGKKVEHVCTFWHAVERKKYGFPVIIENPREVWEKILMKNEEYPDSFLQKLPPDKWTFVMSLQQNEMFVLGMNPSDCEAAIEENNTKLLSNYLYRVQKISSRDY

SEQ ID NO: 7681 - protein, 1007 aa, unidentified
  REGION 1..1007: note = Description of Unknown: Cas Enzyme sequence
NLIALWRILYNWVRREYDDVAINVQDYEANPSRYDEYDRNSDNEYDIGSERCRAIKKFFLDRLVEVPDQLVLRVAKVRFKRAYGSLSAKALSNIVPLMRSGKYLSNDNRDVLEQASNRLKSLEKDAAGFLQQIEDGMQVGYDKAFLIKVMNGKLNISKGGFTYSDAISLFYRKHTAAETLPKDSLTDYHEIKTFWQRKKEKPDDQKNYLRNPVVEQITDEVLQLFKSVWKEFRVKPDEVHVELARELKNNAENREQIYNGILANEKENKHVRDRLRELKREQQYHPENTIEIQGTQPSLANIEKYKIWKKQLDKRQFEREPSSSDMERYKLWEEQGLISPYTRKPIPLSRLFSKEYEIDHIIPKSRYFDDSMANKVVCEAAINKDKSNRTPFEYLNANPLQPDVLSWSSFVSLVNNTFYGAKRRYLLADAESFPEGFITRQLKETQYVSVKVTEELGKIVGTRNVKVTTGAVTDYLRNSWGLTEKFKEATENRYRLMEKMAGEENWIERKNDDERKIYRIKLWNKRNDHRHHAIDALVVACTEQRHVHRLNNLNKDLQSWFAEFGLWVKEDRITELIDLKDGEPKEALIKFAELSIDTRKNIGRELHRAFMEKHTKHIKQPEGMQRWFDTFNSLDDFTRNKIIEVIPGFRQIETPWKGFHKDHSIERWIENIVVSHKPNDRLRIQQDDKSISLRIRGPLHEETYYGKGKVYRLQLEKLASKDNLPKFIENKVLSKALKEQLMKHLLESYHGNKEKAFSAEGIKAFNDMRTERGQKPVRAITVLYAMDEGALKPLDKPGYDFGSIAVKTGSNYCLAVVEKEVKGKPKRVFEEISLFDAAQLTKEEVKAGKTNVKSIMRNYFEKVSEKTKGGRLLFTLAQNDLVYLLRPEEVVPLDNQQEGFEDFWKISKRYDRNRIYRVVKFSGGLCYFVPHTLAQELIYKPAKLNEHNSPEDGSTEVKEKVIHEFGSYRDCSPYVFDEAKIDALKAQQSRSGTHKATRIQDSCIKLE

SEQ ID NO: 7682 - protein, 956 aa, unidentified
  REGION 1..956: note = Description of Unknown: Cas Enzyme sequence
QFHAMNAIKNIQPQINPDLQLAFDVGHSSIGWAVLQSVGRMSPRAENSINLLGCGSVVFRADDCLASSRRAYRRQRRHIRSTRQRIARMKILLKYLGVLTEAELDKPGCAWPWKLAAQILQGGKLLTWPELWDVLRWYAHNRGYDGNRRWSNAEIEAQKEDSEKEENARSLMGKHGFQSMAETFCAISGIDPLGKKKSTNLPGDKRPKGQNAAFPREIVENEVRKILETHAGKLKGLDSNLEKVLFSDWRAISCRDLKLPKRFEGGLLFGQLVPRFDNRIISICPISGQKVPSRNCPEFLNFRWAMQLANIRIGKYKDRELRELTPDERSKLDKLIRERGYLTPTELKKSVREFTACERDNLDTMLMHPDAKEALLLDPAQKLITSDDFQPFWKLLPERLQKRLRGQWRRGKVFSLAQIRKQLESLGGVGGFDAELQRQLDAHNSKAKKKEKQLSQGDFLQKHFPPRPLKLDGRAAFARHLLKQACEEIMTGKHPKEEGGCLFISEEIRLQELNRDIAEQTNNHLVRHRLLILERLLKDIIKEYANGKKERTGKITIEVNRDLREMSGKSAKEKAMDLGSRIANHHAVSEKLEEALAGKKINGKPIQITAGLIRKGRVADDLGWTCPYTSQKYEPINLVTRYVDRDHVVPRSQRASDGLDSLVVTFSEINKWKGNRTAWQFVSDEQGKFVPGLPNLSIVSLTRYKQFVEGLESYKGHDDDKRRKKKRKDLMLLPKYEEKEFTPRDLTQTSQLVRLGAQVLRKNLPHLTTGNVTSLPGSVTGTVRKAWKVLGCLSFANPQVLDENGDVKNKTDIRNITHLHHALDACVLGLASHLIPNDGRVWELIVKRNLNGLEKQQLAALGIFDFNAENRFEMRDLDDNVKEQIRQRLAEKRVVQHIPARMDGLRVEQNTWHVVAVKDGEVILKQRIRQPDGTRPEKVTEEKPLKLLGLNPAKGN

SEQ ID NO: 7683 - protein, 1038 aa, unidentified
  REGION 1..1038: note = Description of Unknown: Cas Enzyme sequence
MYQNHAMNIKKEIQNEAKANLQLAFDVGHSSIGWAVLEKAGAQSSDINILGCGSVVFRADDCLVSSRRAYRRQRRHIRSTRQRIARMKILLQHLGVLTKAELDKPGCAWPWKLAAQILQGGKLLAWPELWDVLRWYAHNRGYDGNRRWSAAEADAQSEDSEKEANARTLMGKFGTKSMAETFCAMSGLDPLGKKKSTHLAGDKRPKGQNAAFPREIVEREVRRVLQAHFNKLQNIDADLERTLLGKDNNDKLAWRAIPCSDLKLPKRYEGGLLFGQLVPRFDNRIISTCPISGQKVPTRNCPEFLNFRWAMQLANIRVGKKLDRELHELTTVQRTQIDRKMRERGYLTPGQLKDAVRSITASERDNLETMFMHPDAKEALLVDPVQKLISSDDLHPFWNLLPERLQKRLRGQWRRNKTFTLSQIRQQLESLDGDIGAFDVELQKQLDAQNTKAKKKDKQTTRQELLQKHFPSRPIKMDGRAAYARHLLVQAHADVLAGKPHPKEEGGCLFITEEIRQQQLNRTIADQTNNHLVRHRLIILERLLGDIIKEYAEGKKDRIGKITIEVNRDLREMSGKNAKEKAQDLGLRIANHHHVTGKLEKAFGEESSGKSIPITAGLIRKARIADDLGWRCPYTGIQFEPKDLVTHRVDKDHIVPRSERASDSLDSLAITFSAINKWKGKRTAWQFISDEQGKSVPDLPNLSIVSLTRYKQFVESLETYKGHDDDKRRKKKRKELLLLPKYEEKEFTPRDLTQTSQLVRLGAQVLKRTFTDCEEKPTVVSLPGSVTGTVRKAWRLLGCLSAANPQVLDANGNVKSKTDIRDITHLHHALDACVLGLSSHFIPNNGNVWELIVKRNPNDLEKRQLAALGIFGFGAENRFEMHDLAERLKIQIRQRVAEKRVIQHVPARMDGLRVEQNTWRVITLKDDEVILKQRIRQPDGSRPEKITKEKPVKLLGLSPQTKTGKLAINKGVLIIPDNFGVALDPQPTIISFHKVWPRLQELKKANGGKVPRILRNGQLIQVLRGSRAGIWRVMSTKD

SEQ ID NO: 7684 - protein, 1038 aa, unidentified
  REGION 1..1038: note = Description of Unknown: Cas Enzyme sequence
MQPLLFAFDIGTNSIGSCVFALNERGEPYRIIDIGARIYSDGRDPQSKASLAVARREARAMSRRRDRYLSRRKATLRTLIEYGLMPSDKAAQEALLRETGDRKGAESANPYALRAKALTEKLPPAYVGRALFHLNQRRGFKSNRKTDRKDNDKGKIALGIEELHAEMRKAGAPTYGAWLAMRRQEGHVARLRAGSEAFDEAGYAFYPERSLLEHEFHAIWDAQAPHYPDILTPERRAHLFRVMFYQRPLKKPRIGRCSFNPAEERLAKAHPLFQEFRLYKEVNELEIVHPDLTQHKLDIEQRNALVLELRGKREVSFKGLRKTLKLTPDMVLNKESESREKLKGDEVYSSLADKKRFGPQWGGFSRDRQWQIIQKLQNEENPEALFAWLKTEFGLDGERAEAIANCPLPDGYGRLGETALASMLDEMKAAVIPEAEAAELCGYDHSRLGKEQEEGEAFLPPYQEILARHIPPGSGDLADLDKNGHDLVLSGFKDNLDQPAPFGYDLYKGRITNPTVHIGLNQLRRLVNTLIARHGKPHLVTVELARDLQLSEKQKIEVNRTIAKNTRSAEARSARLVEMNKPDTGYNRLLLKLWEELNQDKPEDRVCIYSGRPISIEMLFSAEVDVDHILPWSQTLDDSQANKILCLKSANRQKRNRAPADVPEWHDRYDEILARAARLPKNKRWRFAADAMEKFEADGGFLARQLTDTQYLSRMALEYLECLYPSEEPDQHGVLGKRNHVLVSPGRLTEMLRRNWGLNNILSDSNLGEMAQEKNRRDHRHHAIDAAVIGVTTRSLLQKISSAAAQLDDVDFENLVNKLVAENKPWESFREDLQRAVNDIVVSHKPDHGTVSRKGYALGRGQTAGRLHNDTAYGITGETDAKGNTIVVRRKPFMSLEPKDIPDIRDKELQAELYDAIGGKTEKKALQDALLRFRQNHPKFKGIRRVRMVESLSVIPIRDKEGRPYKGYKGDANYRYDVWETLDGKWQSEVVSMFDAHQPGWQSAFHQENPTARRVLKLHQNDMVAYEHPKDGYTVARV

SEQ ID NO: 7685 - protein, 908 aa, unidentified
  REGION 1..908: note = Description of Unknown: Cas Enzyme sequence
MKTSDLELAFDVGHSSIGWAVLQNSAGVSPADKTGKGNLSINILGCGAVTYRADDCLASARRGYRRQRRHIRSTRQRIARMKVLLKHLGALTEKELNQPGCAWPWLLASQVLSKGKALTWVELWDVLRWYAHNRGYDGNRRWSAAEAEAQKEDSEKEANARTLMDKHGTRSMAETFCKELEVDLSGKKKSTMKRFKGLNAAFPREIVEREVRTILSAHFGKLKGADADLEKALLTDWRAIPCSEVKLPGRFQGGLLFGQLVPRFDNRIISICPISGEKVPSRNCPEFLNFRWGMQLANVQVARFGEQKLSPLTPKERSELDKQMRAQGGMTAEQFKKAVRNATSAIRDNLDTMLMHPDAKEALLLDPVQKLISSDDLQPFWKLLPERLQKRLRGQWRRGKVFSLADIRDQLRALADASEFDAELQNQLDTKNTRTKKKDGQATREELLRRQFPPKPIKFAGRAAFARNLLKQAYEEVMAGKPHPKMEGGCLFITEEIRQKQLNREIAEQTNNHLLRHRLLILERLLADIIKEYAAADKTRIGKITIEVNRDLREMSGKTAKAKAQDMGLRIANHHAVAEKLETAFDGQRFNGKPIRIGYGLIKMGRVAEDLGWLCPYTGQRFEPIDLVSRRVDKDHIIPRSSRPSDSLDSLVITFSAINKWKGNRTAWQFVEQEQGKAVPDLPNLSIISLTRFKQFVESLETYKGHDDDKRRKKRRKDLMLLQKYEQREFIPSDLTQTSQLVRLGAQVLKRSFADCKKKPVIVSLPGSVTGAVRKSWKVLGCLALANPQVLDENGEVKIKTDIRDITHLHHALDACVLGLASHFIPNNGRIWELIVKRNLRDEEQKELMPLGVFGFGVEKRFGLRDLDDRLKEQIRQRLAEKRVVQHVPARMDGLRVEQNTWRVVAIK

SEQ ID NO: 7686 - protein, 1007 aa, unidentified
  REGION 1..1007: note = Description of Unknown: Cas Enzyme sequence
MRIFGIDGGIASIGWAVLDMDDNDYEHALIVAAGVRTFDPPETDKERTPTNAVRRLHRGQRRVIRRRRQRMAALRGLFHAYGLLPSAGRDALKQPGLDPWTLRAEGLERRLSPAEFAVVLGHIARHRGFRSNAKREAGANAADETSKMKKAIAATQERLGQWQTVGLMFARDPAIGERKRNRGGDFSRSVLRSDQESEVRTLFAAQRRMGSELASEALQDQYADKAFSQLPLQDSEHLLAPCPFEPAEKRTARRGYAFENFRLLSRLATLRLTARGQEWPLNPEQIALAAADFGAQKKLTWRWLRKTLDLDPAVRFAGVAQKDEGNDFVARNGSAAEGTYALREAVGASGWRVLMHNPAQRDRIAEVLTFREEPASIRRGLDEAGVEPLLLNVIMDALEAGRFNAFTGAGHISAKAARALLPPLARGLGYSEACAEVGYDHAARVQVDLKDVRNPVARKALTEMLKQVRALVREYGLPEYMHVELARDIGKGAEERDKITRGIEDRNKRRGRLREELAGILGRDSTLEDLVRYELWKEQNGRCLYTDDPISPESIAAGDNRVQVDHILPWSRFGDDSFMNKTLCTTRANHAKRGRTPYEWFEAEGLDWAAFAARVEGCREMKGRKKGGFYLRKNASEVEEQFRNRNLGDTRYATRLLLDMLARMYPADDRRHVLARPGQLTAKLRRAWAVEDLKKDTNGKRLEDDRHHALDAIVVAATSESMLQALTRAAQEAERQGLPRGFDFDFVPAPEGFRDAARAVMGRIFVSRAERRRVRGEAHAATIKQVREVDGASVVFERKPIERLTLEDLENIPMPEPYGRIADPGKLRDEMVAELRRWIDAGRPKDDLPRSPKRDVIRKVRVRSKDKVAVEVRGGTADRGDMARVDVFAKANKRGKREFYLVPIYPHQAADRENWPKPPCRAPAAHKPEAEWTKIDASFEFCFSLYSNSLVEVVTAKGEVIQGYFKSFGIDGCSMVIACPKNPRINKGSPGSKTLGRVDGFDPDKHT

SEQ ID NO: 7687 - protein, 1027 aa, unidentified
  REGION 1..1027: note = Description of Unknown: Cas Enzyme sequence
MGANSIGWCAIRLGEDNTPCGLLDMGVRIYPDGRNPKDNSSLAAQRRGPRAMRRNRDRYLQRRNKLLNALTRIGLMPADEAGRQAVARLDPYHLRALALREPLSPYELGRVLFHLNQNRGFRSNRKTDRGSNEGGLISDAVARTQDELARTGRLTYGSWLAQRHSQHNFVRIRLAGSGKAAAYPFYPLRAMIEAELDTIWSTQSAWNPLLTPPMGDNLRGIIFHQRDLRPPIVGRCRLESTEPRAARALPTAQRYRIAQDLAHLRLTRPGLPDQPLSSQQRALLANVLYRGRDLTFDQVRTLLKISSETDFNSHENKLVGCVTASRLGHGKKAAIGDAWHGLDLATQDAAVTALLEAETDEQAIEALRLLGIDIDAASRAAKTLLGDGHGSLSAKAMGRILPHLEAGKRYDEAVKAAGYLHHSDHRTGEIRERLPYYGELLFDRIGTGSGEPSDPDEKRLGRAPNPTVHVALNELRRVVNAIIEHHGPPTQIVVETLRDLGRSKKQREAYRDEQKKNQAANDDRRKMLREMGLRENGRNLMRLRLWQEQATDPKNRICPYTGTVITSRTAVSEDIEEDHVLPFAMTLDDSAANRVLVTRQANRNKARRAPYEAFGHTRDWPDMLERAALLPANKRWRFQPDAMAKFAREEDFLARHLTDSATIARWAKDYLEVLAPGKVWSIPGRLTALLRDKLGLRPDVILGRGGARKDRTDHRHHAIDAVVVALTDPGLLKRTTDAAKRAEETGERLVVKMEPPWEGFVADIASRAVHLIVSHKPDIGWQAALHNDTAYGIIKDASEKEANVVVRRPITDLPDKDGKLRFTVRDPALKAKIEATIASAKDPAGRKAALASLTHSGGHPVRRVRTTERQNATQDIRDRRTGKPYKAVKRDGNHRMELWRLPDGSTHLSVISTFAAAQQAEAERLGKKVSDLRPHPAAKLLMRLHKRDMVRLGGTKEGQLMFVAKISEGQLTLAPHNEGGNLRDRNSSPDDPFKYVYLSSGAALAKAGVQKVFVTPDGRVMPGGRKP

SEQ ID NO: 7688 - protein, 1049 aa, unidentified
  REGION 1..1049: note = Description of Unknown: Cas Enzyme sequence
MSTRLGLDIGTNSIGWCLIEDEARIVDIGVRIFADGRDPKSGASLAVDRRMARAMRRRRDRYLGRRSAFLEALIEHGLMPADADEASRVAERDPYELRARALDERLCPFEIGRALFHLNQRRGFKSNRKAERGTKGGEDGKIAIGAKNLDQAIAEAGVDTLGQFLSGLDTKRVRMNSEHQSYDFYPQRRHVEYEFDRIWEAQAEYHPELLSSDARDALHRILFFQRPLKEPEVGLCTFVHTERRLVKAHPLFQQRRLYEEVNQLEITTPGAANRKLTSDERDRLILKLRGVKAARFDSLGKLLRLEPGQSFNKASETRTQLAGDEVFATMSDRKRFGRAWAELGRDRQWAIVKRVVNEEDPDALQDFLIGECGLDEEHATATAKASFPELHGRLGLTATQRILKELQKEVITYDEAVRRAGWHHSDDRTGEVLTQLPYYGEVLTRDIPPGTQDPDDPPEKRWGKITNPTVHIGLRQVEKLVNALIAAHGRPDQIVVELARELKLNEKDREGHNSRIRKDTAAAIARSEKLQVEGFPDTGANRLLLRIWEELNPANPLDRRCPYCGEQIGIRQLFSSEADIDHVIPYSRSLDDSVGNKIVAHRHCNRAKGDRTPFEKWGHDETRWAAISDQVARLHRSKQWRFAPDAIERVSRDGGFLARQLTDTQYLSRLAGKYLRNLYPVKEEGRVDVLPGRMTAMLRRLWGLNSLLPDHNFVENEHSNAPKNRLDHRHHAIDAAVAAVTTLGLMQDIARAAARAEDKGLDRLFEDLKQPWDGFREDLGERLSGVTVSHRSDHGRKGRPARNRDVTAGRLHNDTAYGFTGGTTADGRTPIVVHRVPLASLMPGDIADAQRVPDAALREALNEVTRELTGKAFEQALARFAQEHPVFKGIRRVRVREPLNVIPIHGKNGRAYKAYKGDANARFDVWRLPNGKWTADIVSMFDAHQAERQDRRPHPAAKKVLSLRQNDMLAIERDGLVPQIVRVVKFSATGSITLAPNNEAGALKARDAAPADVDPFKYIYSSGNGLKGLRARQVRVDPLGRVFDPGPRE

SEQ ID NO: 7689 - protein, 1077 aa, unidentified
  REGION 1..1077: note = Description of Unknown: Cas Enzyme sequence
MLRQCETAIAPPSYSLGLELGASTVGWALIELDAFGSPIGLIRTGVRVFAPGVDGAQSEIEAGRDRPSSWARKIARTNRRLLRRRAYRKQRLFELLQESGLLPRTNGAESIPHAIERHTILLELDRSLFQKWRLTEYGSRFDERPMYVLRRLALDVVLQPYEIGRILFHLCQRRGFRSNAKERSKRSYGRIGPVHAGVDEWRRCLEEVQARTVGEYFCEIGVHPLNERVRGRWLAREMLEQEFEAIWRKQTIYHPELLTAELYRKIRHTLLVDRPNRKGTLQVGSCELEGGNHRRAPWATLEANRMRLLESIGHLRIVDWETQEFFAVSQQQREALYELLDQRGNLSLDQLRKGLKLRPHLRLYNDRAGQKKVPGNRINQIMISAFGPRWGLFSEQEQTQIVDEWRTIPSEKSLIRRGVETWGLDQTSATRWAHSVPETGYCKFSRKAIRKLMPLQLKGYRFEEAVNTIYGDRKNDADVLESLPPLEVHSNLAQAARNRRLLQRIGLDHIVVPGLERTLTEMRKLVNSLIREYGMPNEIHFELRRELKMYRIERLALETKIKMRERSRRRAEARLAQECGILKPSREQLEIALLFVECGGVCPYSGKAIPFPDLFSEMPRFRLQHIIPRHLFPDESFQNKVVCWTAGQEDSSRPLTPFERFGASREQWTELVHRVETWKPGNPNKLHRIMIRSEEQLQEFIAMQISDLRQASVQTARYLGLLYGHITQGQPRVFANTGVLTATLRRTWRLDFFSRDRELDETSSVRIDYRRHAMNAIITALTRHALRVVQACSRSAPTPNALPLPWKGFVTDVSTEMKRILVSHRPDHKLAGEMHDESFYSPPYLENGSSFVHVRKPVSKLSPKEIADIVDPIIRRAVLEKAQSLHGDLSRCERDQDWPMQIEKSGKSRPIKRVRVRKSLRVKEIGSGERRRYVAAKGKHHVSVFAVGSAEREAKWVFKPVSLFEAMERKKEGKTIVEKTDREVPEMRFKFSLMGGDTVEAHRGCFHDLGSCRPEVFVVRTIQGNGQLGLVEIANAQTWRENVATKKWLLVRAEGLRKLDCRKVRVDVLGRIHPAND

SEQ ID NO: 7690 - protein, 1065 aa, unidentified
  REGION 1..1065: note = Description of Unknown: Cas Enzyme sequence
RCDLEPTERRVPQADMYASRFLVVETVNNLKVVEHNREPRSLTPAERAKILEFLSGPLGPIKVGKLKGRPKQSVSVADLREVMEWGPATKTSPVRFNIEADEDRLINTDWFSREIVHGAVSCEKWARLPERTRDGVNRAILKFDPDDPQDADRLLRGVRQWADLNEAQATALVEAWKRRPKPDAKRLNMSRRAARNLLVLMDRPEPWPDPNRPGELRWLTPIEARKLIAGDGDFIDLTTGKPLDDATRRRYATGAKGATARDRHYCRKHLLTRNGELILDPDGVPLAEPPPAPLISNPVVRKAIHEVRRHLIEYMTTFGRKPDEIHVELSREAKMGKKDADAALFRNRLRNRIRRDIINQFELDPLSSTQQRTAVDRVILCVQQNGVCPLCGNQVVKTHLTPRMAADGEDCELAHVIPKASGGHNGLGNVVLAHTKCNRDMARQTPRQFWDVTLKVGFEAGMRWVEGIYREVRRPKSSEIKSATGVALWSCYFSGKPGRRGPTFDELKLEQFKKDVKDIKEMTQRQDAATKYAARQVMAYLSDAIYEGQGLPERGGPRRIYATDGLWTSRLRREWGLFFDPHHARAKGLPVEAEHARKEKNRGDHRHHAIDAVVIALCTREVQLDWEEREKRADRDGVNTADEVAMEAYRRNHPLPLPPPFSSREDLQRAVRLAVFGDGTVDRPVCHRPVKRKLTGHLHKATQYGPVVETWQQNGKTYQEVVEGRVTVRQPILGEAPTDFLKPAHLRMPRLETENEAIGRIARRLRIGKQGLPVAQAISAARKLVRNKAFTPMKVDPKPEKGGLVRDIGTRRCLRQLLERWGLIPDSYSKADLKRAIDDNGPPTFDSGVPIKGVVLLWSNTDPVAIRRTAFDHASGTRRKLDDLRTYRLYDSQNNHHIEIRVAQSRNGRASWSGEVVTAFEAAQRKLARLRAFRTAPIPGRSARRKLSPDERSRLTPVIRTIELAHPLVDRTDNDAKGGRFVMSLCEGEMLYMRDKRAPEKLGYFVVAKLDKPQGIVLVPHWDARSATARKDAEGKKVPESEREQFPIAPADLAALAPPERQHAN

SEQ ID NO: 7691 - protein, 959 aa, unidentified
  REGION 1..959: note = Description of Unknown: Cas Enzyme sequence
MDDTYRQSYRLGIDVGSNSLGWFIVWLNEQGEATGLGPGGVRIYADGRDPKSKESNAADRRVARGMRRRRDRYLKRRADLMALLVTHGLMPKEEAARKALEALDPYELRAKALDEKLPLHHIGRALFHLDQRRGFLSNRKTEKRDNEAGAIKVAAGRLQDYMRTSGARTLGEFFHGRHGERAPVRARNRGTGVKAEYDFYPTRQLLLDEFEKVWAAQAKHHAEMAEDARAAIHHTIFFQRPLKQPPVGKCSLDPAKDKDDADGFRCPWSHPLAQRFRIWQEVRNLAVAETGKPKRDLTKEEGDKIALALFQNNKLSFDKIRALLKLPEVAKFNLESEKRKELAGDETAAKLAHKSLFGKTWRGFDLARQIEIVTKLEQEEKENVLIAWLMANAGLDAATAERVASAILPESHCRLGLRAIEKIFPYMEAGKNYPDAAKAAGYDHAQLPDGVLSPNGRLPYYGEWLQDDVLGSGDPRDTSDRRWGRFPNPTVHIGLGQLRRVVNTLIHECGPPAEIAVEMTRAFKLSPDQLAKLEKEQADNQRKNEGRAAEIRKLGQAVNARNLLKMRLWEEQNLADPLDRRCPYTGEIISIAKLLSEDVDIDHLIPFSDSWDDNAANKVVCMRYANRAKGNQTPFEAFGKGPTVDGRPYDWNDIALRAASLPKGKRWRFDPDARHRFDAQGGFQARQLNETGWLARVAKHYLAAVTNPYKIHVLPGKLTAMIRGKWGHNKLLPDHNYSSAKNRMDHRHHAIDALVAALTDRKLLHKMSSAYDDERQKIEIPVPWETLREDLDAKLKAMTVSHKPDHGVQAQLHEDTAYGLLERPDREGEGNLVYRKGFLDLNEKEIGRIRDIRLREMVEKHVTSEKAAGKDLKAALQFFAARTDIPGLPHGIRHVRLTKAEKPEYLVTIRDKAGEPYKAYSAGENAFVDIFELPDGKWDGEAMTIFQANQKGSTPRWQT

SEQ ID NO: 7692 - protein, 1042 aa, unidentified
  REGION 1..1042: note = Description of Unknown: Cas Enzyme sequence
MGERHRILGVDLGIASCGWGVIESAEPDGKVVATGVRTFDAPLVDKTGEPKSAQRRAARGQRRVIRRRRQRMNAVRKLLHQNGLLPDASPNALHEALRRVSPKGTHPPISPWTLRAAAYERALTKDELAIVLGHIARHRGFKSNSKSEGSANAADETSKMKKAMETTREGLAKYRSFGDMLANDEKFKDRKRNRDKDYSHTAKRSDLEDEVRTIFSAQQRLGNPAAIDELATSFATIAFFQRPLQDSEKLVGKCPFEPNQMRTARRAPSFELFRYLSRLAHLRISVGRVERALTPDEIAAAAKGFGEAKKTITFASLRETLDLDPNARFAGIPKDKESKLDVAARTGGAAYGTKTLRDALGEAPWQSLAKTPEKLDHIAEILSFREDFGSIRKGLHEIGLDTAVGEHLLAEAAKGTFKDFARAAHISALACRNIIPGLREALSYADACARVGYDHAARAAVSLDSINSPVTRKAFGEAIKQIRAVDREYGPFDFVHIELARDVGKSAEERAKLTAGLEERTAEKEKRRGEAAELLGQPVTDDELLRYELAKEQGWKCIYSGDPIDPTGFAANETRYQVDHILPWSRFGDDSYLNKTLCTVTANQHKRGRTPFEWFEADKTEAEWMIYVARVEGLKEVKGRKKRNYVLKTAADIEEKFKARNLTDTQWVTRLLADELTRMFPAPEGKRRIFTRPGAITSKLRRAWGLEGLKKVDGERVPDDRHHAVDALVLAATTESLLNRMTREVQRREKEGRQDDIFHVQQPWSGFRLDVERAVHGNNGSGGVFVSRAERRRARGKAHDATIKQIRELNGEKTVYERKAIERLTDKDLDLIPVPEPYGKAADPKKLRDDMVEALREWIAAGKPKDKLPRSPKGDVIRKVRVATKDKVEVQVNGGTVDRGDMARVDVFRKKNKKGKWEFYVVPIYPHQIATMEKPPSKFVRSATDENNWFSIDPSFEFAWSLQPMNYLEMAKSNGELIEGYYRSLDRATGAINLSPMQTNDEVIRSIGIKTLSSFQKFTIDRLGRKFEVSREMRTWRGKACI

SEQ ID NO: 7693 - protein, 1066 aa, unidentified
  REGION 1..1066: note = Description of Unknown: Cas Enzyme sequence
MKTRDIELAFDVGHSSVGWAVLVKGGQVDITGCGAVVFRADDCLASSRRAYRRQRRHIRSTKQRIGRIKMLLKHLGVLTDDELNRPGCAWPWKLAARTLQSEKPLTWLELWDVLRWYAHNRGYDGNRRWSAAEAEAEAQKEDSEKEANARTLMAKHGVRSMAETFCRELGVDPLGKTKSSMKRFKGLNAAFPREIVEAEVCKILRTCLSKLNKVDANFEKTLILDWRTIACPDLRLPKRYEGGLLFGQLVPRFDNRIISICPKSGQKVPSRNCPEFFGFRWAMQLANIRVGNGGDRELQPLNADHRRALDKRMRERGYLTPKELKDTVRNLTSCQRDNLDTMLIHPDAKEALLFDAIQRLVTSDELQPFWELLPERLQKRLRGQWRRGKVFTLVEIRRQLEALGDSSAFDTELERQVDAHNSKSKKKDSQITREVLLQRHFPSKPLKLVGRAAFARPLLKQAYDDVLAGKPHPKEEGGCLFITDQMREAQLNRSIADQTNNHLVRHRLLILERLLADMIKEYAGDNKNRVARITIEVNRDLRDMSGKTAKEKAQDLGRRIANHHAVAEKLEKAFAEEHVRQAITAGLIRKARVAEDLGWRCPYTGHLYEPKHLLNRNYVDKDHIVPRSQRASDGLDSLVMTFSEINKWKGNRTAWQFVSDEQGKAVPNLPNLSIMSLTRYREFVDGLEAYRGHEDDKRRKKKRKELLLLPKYEEKEFTPRDLTQTSQLVRLGAQALRKIFADCAKKPVIVSLPGSVTGAVRKAWKVLGCLALANPEVRDENGEIRTKTEIRNITHLHHALDACLLGLASHFIPNSGHIWELIVKRNLNEAEKRELMTLGVFAFTPEKRFEMRDLDDRIKEQIRQRLAEKRVVQHIPARMDGLRVEQNTWRVVAVKSGEAVLRQRIRQPDGSRPEKVTEEKPGKLLGLSPTNGPGKLAKNKGVLVIPDNFGVALEPKPTIVPFHKVWPRLQELKNLNGGKTPRIIRNGQIIRVPNGKNFKGVWKVFSAKNNAAGMALDIGSPDVVRLKNKTEGHKINVRLATLIQDGLEVIKTPLTGIAVCPTTSSA

SEQ ID NO: 7694 - protein, 889 aa, unidentified
  REGION 1..889: note = Description of Unknown: Cas Enzyme sequence
VRQGTTFLHKASLLIPADFAETKTAATRRRMWRTRQAHKAREKWLEDVWQAAGMKVLRGRQTRRDALTKKWIEPVPGDKLLEQEFAESGDNTCYTSCLLRIKLLRGEKLEHWQVFKALRSAIQKRGYDRIPWAERDASRVGVSVEELEKKDPNYVAALNQWKNFQTKVPADFHFPCFYDAWKMGLWNPAEPQKLTLRLTHEAQSTRNIRFDRAVVQAEIVKLANQAATQIEAVGSTFERIQKEGWTHTDPMTGIKRHFPVTAKTFGDFLCHGPTGVAYASYFPHHRDQNKVRMGSADDWMGALGQKIPRFDNRILNDCVLIPRFHVCKADIRKDVKTGKLITDSLLSAQVTMLMKLKNTLVAADKGQRKLTVDEIRRIFEVTSVDTQQVKSDAEEWPQKVAACFKLTAADWSRAKGIKELGLRPLPGHEELKAPKHSGRSAFSRPALRLLKDLILSGKNPSQFYHEQIAGLNGNTDGKKGLIPVDLKFLADMGDSWNDLHIPTQKLDALAARHTENGKLDIENAVADLLADINDPVVRHRLNVFSDRLYYLRRKFGEPKEVVLEFVREDFMGPKRKNELLQFQRNREKARKEAREKAVEAGAEEKSAALKYELFKGQGSLCLYCGIPFAATKLDEYEIDHIVPRTKNGPDAMVNFVLAHRECNQAKEEQTPFQWWHSGTSSKKAPISWDGYKKLVDSHATNLRNKKVQLLLREDAPDLVQRYTALAETAWVSKLAQTIVSLLFGWKNGNDGESRKRVTVISGGLTGRIRRKYRLNSILNPCPDGEDSYLWEEKCDKNRQDDRHHALDAMVISFLPSWARDPKKEGFFRFPEGVHGNFFAQEIATVNPRNIAFEKPVFEETFYGVRTISGQRFIVGRENLAGLAIKSVSE

SEQ ID NO: 7695 - protein, 1105 aa, unidentified
  REGION 1..1105: note = Description of Unknown: Cas Enzyme sequence
MKESSERRYRLGIDVGSNSLGWFVVWLDGEGQATRLGPGGVRIYPDGRDPQSKTSNAVDRRVARGARRRRDRYLKRRTSLMSLLVTHGLMPGEEAARKALEKLDPYALRAKALDETLPAHHIGRALFQINQRRGFLSNRKTEKPDGESGVIKLAARRLQQRMTESSANTLGEFFYRRRSSRDTEAQGDAIRAELKRLGKADLKGNARKKAWAKIRKRVFPNSLIAKAPEPVRARNHGTGNKAEYDFYPTRQLLLEEFDAIWKCQAPHHPSMNEKTRAAIHNAIFFQRPLKQPPVGKCSLDPATSNDDAEGFRCPWAHPLAQRFRIWQEVRNLAIVETGKPSRPLDKEDGDRIALALFQNAKLSFDKLRGVLKLPPEARFNLESEKRDHLKGDETAAALSAKKYFGKTWRSFDLERQIEIVTRLLDETDEQTLIEWLVDNAGTDEKTADRLASAFLPDSHSRLGLRAIRKILPYMESGLNYADAAKAAGYDHALLPTGELSLNGRLPYYGEWLPDDVLGSGDPRDKGDKRWGRFPNPTVHIGLGQLRRVVNALIAEHGAPAEIAVEMTRAFKLSPKMLAEVEKVQAENQRKNEKRADEIRKLGQVVNARNLLKFRLWEEQNPYDPLDRGCPYTGEVINIAKLLSDEIDIDHLIPFSDSWDDSGANKVVCMRYANRAKGKRTPYEAFGNSPMIDGRRYEWDAISLRAAAMKGKDWRFGPDARQRYDRQGGFQARQLNETGWLARVGKHYLAAVTDPYKIHVLPGKLTAMIRGKWGLNDLLPDHNYSDAKNRKDHRHHAIDAMVAALTDRKLLHKMSSAYDDERQKIEIPVPWPTLRADLEAKLKAMTVSHKPDHGVQGQLHEDTAYGSVKEPVKEDGANLVYRKSFMAMNEKEIDRIRDRRLRGLVQAHVAREKREGKDLKAALQSFGERRDIPGLPNGIRHVRLTKSEKVEYLVALSDKSGKPYKAYSAGENAFVDIFEMPDGKWAGESMSVFQANQEDAKLRWREKYPNARFVMRVFKGDLISLDYRGQRTVMVAHRLDAAANRFKLAPHNETGNLDERHNEADDPFRWLMASYNTLKGKNAERVRVDELGRLWRVKPEEAERSL

SEQ ID NO: 7696 - protein, 1086 aa, unidentified
  REGION 1..1086: note = Description of Unknown: Cas Enzyme sequence
MEISAAPARYVLGLDIGASSVGWACLRLRDRRPHGIIATGVRLFDAGMSGTSRDFSRGREESHAVARRKGRLIRRQFRRRASRRWEVFRLLQNAGLLPSEPVAERGALSDYIARLDQSLAADYCQKGDHRSAQLLVYRIRARAAREPVEAFALGRALLHLAKRRGFNSNLRGAPKDEEDTGVVKPAIRSLANDLVTGNFTLGGFLATQDPFEKGLPNKGIRKRWTGREMYLDEFERIWQIQAPHHAQQLTEALRKKLRKAIFFQRPLRSAKGLVGKCSLEPKKRRLAAAHPLAQEVRMLQFINHVRVRKRGELDRPLDDAERERAIAALQQRGRMKLADFRNTVGLPKGNSLNFAGDDDEHARGMGTVAELRGILGPRWDSLGEADQERLFYEVLSFNKRDALVRRLKGHWGFDDHQAELLADVTLEQGYANHSRQALLKLQEYLSKKDLELGRWPTYTEAKLMAYPNAHAAEVAFDRLPPVVGHVPNVRSPAIIRALTEVRKVVNELIDRFGKPELVRIELARDLKRSKKERKRVEEIIREQTAKRRKALAAVRAEFDNYPEKRGYDRGIEMYLLAEECNWVCPYTGEEIHSVGDLIGSATRFDVEHIYPRRYLDDSFGNKTLCLHEENRNVKRDRLPAVAYADDPARYREILARVKKFKGPAAAKKLARFQVPQVDEEFASRQLNDTRYAGVAAADYLGLLYGGRNDANGRQRVSTLTGGLTAALRGQWRLNQILGIDDEKNRADHRQHAVDAVVAACTDMGTVTALQTAAAAAWQQGKPRGLPQIDPPWAGLLDETRRSVRSILVSHRQSRRLNGPLHADTNYAIVAGEGSAKSKVRKPLSGLSETEINGDSIVDSEVRRLVRSKYAELKERFGSGKKPIELFNSLANHPFLENRDGTKTPIHSVRVWAEKKAFAVRPGDPTRNVAATQGSNFCSRIRAVVDKEGNEIGWTDQLVNRLEAMRMRNQDQQVDPLEKFALFANEHVLMPDKQGEWQLYRVLSLSKENYEIRLHHDGRDSSEVRKSKDRPSIRSGALSERRFRKVSVSPTGRLTDPLTGVEIDISTLERWTPPKQTRRKGRKKKDR

SEQ ID NO: 7697 - protein, 940 aa, unidentified
  REGION 1..940: note = Description of Unknown: Cas Enzyme sequence
MVKHNFPYRLGLDVGSNSLGWFVVRLDGAGRTVGLGPGGVRIYPDGRDPQSKSSKAVTRRVARGARRRRDRYLKRRTNVMSLLVAHGLMPADLTERKALAALDPFELRARALDQESPAYHVGRALFHLNQRRGFLSNRKTEKDDSESGAIKEAATRLQAAIEAAGARTLGEFLHWRHRERAPVRARNRSTGAKAEYEFYPTRQMVFAEFNAIWDKQAEYHPAMTPAARAAIASGINGIFYQRPLKQPPVGKCALDPAHDGDDAEGFRCPWAHPLAQRFRIWQEVRNLAIEGAGRKPLQLGKDNCDKIALALFQNNKVSFDKIRGLLKLPSEARFNFESDKRAELKGDETAAKLSHKAMFGKAWRGFSLPRQIEIVERLLAEEDEARMVAWLSAEARLDHTAAMRVARAFLPDGHCRLGLRAIKKILPFMEAGEKYSDAAKAAGYDHAKLPTGEISATGYLPYYGEWLPDDVVGSGDPHDTKEKRWGRFPNPTVHIGLGQLRRVVNALIREYGPPAEIVVEMTRDFKLSPRQVSEIEKGQADNQKRNDARRTDLVKLGQQVNARNLLKMRLWEELNPKDPLDRCCPYTGEKISIQRLLSEEVDIDHLIPFQESWDDSAANKTVCMRYANRAKRKQTPFEAFGNSPEIDGYHYDWEQISACAAGLPKNKSWRFRPDALVRFGETEGFQARQLNETGWLARSAKQYLAAVTAPNKIWVSPGKLTALIRGKWGLNNLLPDHNYGGAKNRKDHRHHAIDAMVAALSDRSLLQRMASAYDEERERIEVPMPWPTLRDDLDAKLKALAVSHRPDHGLAGQLHEDTAYGAVKDPAKEGANLVYRKDFRTLNENEIERIRDRRLRDRVKAHVASEKAAGKDLKSALQSFAGRNDLPGLPHGIRHVRLLKPEKPEYLVTLRDKAGKPYKSYSAGENAFVDIVEGADGRWL

SEQ ID NO: 7698 - protein, 979 aa, unidentified
  REGION 1..979: note = Description of Unknown: Cas Enzyme sequence
MTQLRTNSYTLGLDLGVSSLGWALLDASGRRFVSAGVRIFDSGMDENKFAKGEQGCSNNVDRRRARLHRRQLRRRAARQRELFITLQDAGLLSAEPRGGIPETRHALLQDLDRRLAESWGERIQADNPFIVAPQQVLPYFLRARALDHPLQADELGRALYHLGQRRGYKSNRREGRKLEDEQTREAKRKKQATAEQDEKRKVLAEISGLEVELAASGARTLGEFLSRQDPAAARIRTRHTARKMFEQEFEAIWLAQQPYHPECLTAELKQRVYKLLFHQRPISGGKRGMCELEKDCQRADMYTLAAQRFRLLQKVNDLLIVHADGARRELSPEQRRLLAQRLQEAGDMTFEQVRTLFGLPKKTKFNLAANGDRKLHGNRTNAAMLRAFGQRWGTFSEAERKHKVRRWAEGEHAEELQTIAIEEWDLDSAAAHQLANTEPEDGYCKLSLHAISKLLPAMEQGEAFKTAEAKIYGNRFAGREAQDSLPPVEDVLPQIPNPAVMRALTELRKVVNAIVREHGKPAQVRVELARDLKRSAKDRQRLTDIMEENRKRRAKVIARIQREAGINNPSGPSIEKGLLFEDLQECAYCGRTINFQNLFSDTPQFDVDHVLPHSRFPDNSYANKVLACNTCNDRKRNRTPYEAFGSDPEVWEKLVARVARRRGTGKQERFLLGGDKRKRLLLQTSEEVEEFSARHLADTRYISKLAARYLEELYGGRDQEVPWEDQRRRCVFASSGMVTATLRKAWGLNSLVPEAPGASKEGGPEKERCDHRHHAIDAMVVALSSQGAIQQLSAAAAAGDGRILGRISSRALQAPWPNFVDSIRPVFESLNPSHRPDHRLSGPLHDETNYSPPRAFHGKEYVHLRRPIHSLSAKDINSDHLIVDRKVKEFVQAKLADLGGDPKKLEHDPAVLITRTGKRVPIRKVRVREAKSVTRIAASPHARYVATNDNHHVAILAGLDAGGSEKRWDGELVTRLEAM

SEQ ID NO: 7699 - protein, 1118 aa, unidentified
  REGION 1..1118: note = Description of Unknown: Cas Enzyme sequence
SVIFPADDCLASERRGFRRQRRHIRATKQRIARMRRLLGHLGVLADKELETPGCAWPWLLAARVLRGGKQLTWTELWDVLRWYAHNRGYDGNKGWSKHDMASTEDSEKEQRAGELLADFGKKHGRPGTMAEVFCDKLGVDPLGAVKSSMRRVRNLGAAFPREGVEAEVERVLRAHVGVLPQVDDQLINALMRDHTALPSPNRPPPARYGQRLSDGSLSPGGLLFGQLVPRFDNRIIARCPITFERVYQAVKAETGDEEKAKNEAEKLAKVPSVDCVEFSRYRWGMQLANVQVATGDARKTRLLTDAERRALNIEMEKHGYLTPGDFKKAVRVLTNKAPDNLDRTLALPDADRALVLDPVRRYTHTHSLVSALWPVLPERLQKRLTGRWRRGHAITVAEMLDACGEARAAAQAVCEKHLDAQNTKRRQKDEALTRDALLRTPLRVPPPNGRAPYTRGVMREVVEFIFATDRHPMDARRSAQEKDGPLYRSEAIRQAQLQRALDGQTNNHLVRHRLKLLERLHADILKAYAGDDRARIGGITIEVNRDVRELSGKTAQEQATLQRRQLDHFKGVAKKLAEDYDGLGVHVGPGLIRKGRIAEDLGWTCPYTGKPYDALDLLHRRVDKDHIIPRTDRASDSLDSLVITFSEINKMKGKRTAVRFVEEFQGQPVQGLPQVMIKSLSAYLKDVEALEVFKGHDDDQRRKKNRKRLLLLSDYVEKEFTPGDLTQTSQLVRLGAQALQKHYVGAKKPPVITSLPGSVTGAVRKSWKLLGCLAAANPLVLNPDDLDEDQRPKVHTKTEIRGITHLHHALDACVLAFASHFLPRNGGAWELLVKRRLNAEEQHRAHALFGSHIGITQDGELRLGDLQPALKDQICERLKERRVVQHLPADLSGLRCKETVWRVFDPADPHRNSRRLARWLAEKKVAVPAPDGKMVLIICRKRRTADATAEESAGGKVFRETKTWRWAYDIKDKSALLGLAPEGDPASAKLERIKAVKVLGDNFGLALDPEPTLIRPHKVWHQLNSLRSRNGGKTPRVIRRGSLIRVREKTARSDYHGVWMVRGVYSKQRGGLMLDLSPADYVEYRRVPRAFEGVLVATLLKAGLEVVKAPLCGLPPGS

SEQ ID NO: 7700 - protein, 1052 aa, unidentified
  REGION 1..1052: note = Description of Unknown: Cas Enzyme sequence
MQYRLALTLGSSFLGWCALETVDHTPVRILDTGVRVFPDGRDSQTGEPLAVGRRYARRMRRNLDRTKLRRKRLIKFMIESGLMPADEKARKELQSTDPYELRTKALDDKIPLHHLGRALFHISQRRGFKSNRRADRGDDASSNMKEAIKDLHRKLLATRSRTLGEYLYNQHREKHSVRVRRRMLNNKAEYSFFTGRKMYEREVDAILAVQKKHHAQLSEKVCEGLRDIIFYERPLKPYPVGKCRFENSEPRARLALPLARRFRIWQEVNDLEIEDLADGARPLELEDRKKIVAALLCCRKKTFGQIRKLLGLESGCRFNLESEDRNELRGDITSALLSDDKCFGPGWRELSDDQQENLLTLLFTEPDPEALRQALMTEWGLTSEQAEEVLSKTASEDDDRVGISNGYGPFSKKAVLKMMPWLEQGHKFHEAARLAGYRPSESPAGERHHHLPYYGQALPDSVISGSYDDKDKQFPERYYGRVNDPSLHIGLNQMRKLVNAVIEVYGAPDEIVVGIARDLKQPRGEIARKQGRNRKDIDRINKELEILNVEKTYRNRMLFSLWEDLAKEPQLRCCPFSGKPVAMTDIFEGDFEDEHLLPFSRSYDDRRTNKVLSSREWNRRKGGKTPFEAFGHTDEWPQILARAENLPRDQKWRFREAAWEKLEGKDGVQGRLLNDSHHMAKWARQYLSFLLDSEKRESCVWTVAGQLTPLLRQTWGLNDLLEDRPENRADHRHHSLDALMIGCTDRRVLETVSEAARKLEENECLRGKRHELVSGLPEPFAGFRQQLDEHLKRMVISYKPDHGGADKAIHAQRPYTVAALHRQTAYGLVRILGEETISFATRVPVEHLSTADIESVIDAEIRTKLLAAVEGLKAGGKEWKQALERAAAPGGIMKNGIRRIRVRCHKTNGTMIGIVQPHERGSHDAQPFKFYELSGNYCAEIFCTGKGKKAGQWQCEVISNYHAHQKDFIPKWRKDDPTARLIMRLQKNDMVAYENEGTEVVCKVKKLAVGRYATGKAYRSNRPLVNTLPIRGAFSQCQPGRARRLRQKTVCA

SEQ ID NO: 7701 - protein, 1117 aa, unidentified
  REGION 1..1117: note = Description of Unknown: Cas Enzyme sequence
MKKILGLDLGSSSIGWAFITANDNGEAHEIINMGVRLVPLSPDEKNEFESGNTITKNRSRTLKRTMRRGYDRYQARKNNLKAELERINMMPDNALLLNLSSIELYGLRNKALNEQISLTQLGRLLWHLNQKRGYKSLRGTEGDAEGGKKVTDYEQEINDRYSYIKQGGITVGQFLYEQIQQNQFARIKQQVFPRHAYIEEFDAIMQAQQQFYPHVLTDALIEKLRDRIIFYQRPLKSQKGLVSVCEFAGKKHTDPATGKVTIIGPKVAPRSSPLFEVCKIWESINNISLEDRFKNERPITLEEKQELFQELDNKGKLSEAELFKILGVKKSEYTTDALLRKKGIQGNMTKAAIVKIIGDDSVYERWLQFSLAIVEKVDEETGEVKEEISSDFEQQPLYKLWHLLYSVKEKEPLLKRLMNLGFDEETAKELIKLDFTKGGFGNKSARAIRKILPDLMNGEQYSDAMAFAGINHSNSKTKQQAADLGTIDKLEPLAKNSLRQPVVEKILNQLINVMNAIIADPAMGKPDEIRIELARELKQSREERNRTFMNNNRRDREHKIIAGKLEEMGRKASRKNIERYKLWQEFQCLSAYGPYNPEKQINFTQAFGGNYDIDHIIPQSRLFDDSFSNKVFSSRAQNADKGSRTAFDYMKSLGDETFNAYIAKVEDLYRNDKISRTKRDRLLMSAEDIPKEFINRQLNETRYIVRKAKEILAPLLKHKEHDIVCTNGSVTAFLRRNWGWEDVLINLNWDKYPDTVKKHETDVNGRRYKVIEGWSKRDDNRHHAMDALTIACTNRAVIKRMNDLNQLANSDTVNDEGLKAYSQKIKTFPTKDVQHWISKILISIKPGKKVVSQSKNKVKGQITLAPRGPLSEETVYGRIKAKGKDEYVVKYKLGIDFKVKDLEYIVDGGLRKVIEKRLAVFNNDPKQAFKDLDNNPVYFNEEKKIPVKSIRMFTNLSAVQAMNFNDAGEPIGFVKPGNNHHIAIYENEKGKRLERVVTFWDAVVRRREGLDVIDKEPADGTKFVASIQQNEMFIFNMNRDEIEEAVSQRNYTLISKNLFRARKLSTGIYWFNHHLETQPKDTLEDKKNGRCIQAALSSMTGIKVRVNHLGAITKIGE

SEQ ID NO: 7702 - protein, 1095 aa, unidentified
  REGION 1..1095: note = Description of Unknown: Cas Enzyme sequence
MGEDANLHLGFDVGHSSIGWAVLEKTGRQPSDIDILGCGAVIFRADDCLASSRRAYRRQRRHIRSTRHRIARIKTVLKHLGVLAEKELNEPGCAWPWLLAARVLRGGQLLTWRELWDVLRWYAHNRGYDGNRRWSAGEAEAEKEDSEKEANARSLMGEYGTRSMAETFCAISGLDPLGKKKSTNLPGDKRPKGRNAAFPRETVEGEVRTVLGAHVGKLKHVEENLVKLLLSAWGAIPCPGLRLPNRYQGGLLFGQLVPRFDNRIISECPISGHKVPSRNCREFLSFRWGMQLANIKVGKISDRELQPLKAKDRAELDGQMRKRGYLTAKELKDAVRTITGCQRDNLDTMLMHPDAKEALLLDPVQKLVTSDELQPFWMLLPERLQKRLRGQWRRGKFFSLAQIREMLATDGDTDSFDAELQRQLDARNTNAKKKDAQLNRDDLLRRQFPHKSLRLDGRAAFARPLLEKAYADVLAGKVHPKEPGGCLFITEQMRDAQLNRAIAEQTNNHLVRHRLLILERLLADIVKEYAGGQKTRIAKITIEVNRDLREMSGRTAKEKAMDLGSRVANHHAVAAKIEKAFAEEQDGRIPITAGLIRKARVAEDLGWRCPYSGAGYEPKDLVTRRVDKDHIVPRSLRPSDGLDSLVVTFSEVNKWKGNRTAWQFVNEEQGKTVPGLANLSIVSLTRYKQFVDGLESFKGHDDDKRRKKKRKELLLLPKYEEKEFTPRDLTQTSQLVRLGAQVLRKNLPHLTTGNVTSLPGSVTGAVRKAWKVLGCLSLANRQVLDKNGDVKSKTEIRDITHLHHALDACVLGLTSHFIPNNGAVWGLIVKRNLNEFEQRQLEALDIFGFNAENRFEMHDLDNKLKEQIRQRLAEKRVVQHIPARMDGLRVEQNTWGVAKRNADGTVSIRQRIRQSDGTRKKKEVPEKDVKLLGLHPISATGKLAKNNGVLVIPENFGVAILDHCEDEKDASVIIPWHLVYVRIFKEINGEPSLIKRNGGNMPRILRNGHVIQIKKGTYRGIWKITSIKNQKTGVKLNLGQTDTVNTEEQVTDPISGKMMRKVRQDCRHEASLRSIIDSGLHALELPFTGFRVGDA

SEQ ID NO: 7703 - protein, 1040 aa, unidentified
  REGION 1..1040: note = Description of Unknown: Cas Enzyme sequence
IRFTDETNRASLIADKVYPIFYVASRDFKLKSIDTALRKIGGWITSVKGSDPDPDRKKYKLENTKLISAGILYQMQSLLGEDWKEKYGWRDGLENRPKACPYSVEDIWHVLFTFDDREKLRLFAKEKLHLEEEVAEKFSKLKLIQGYAPLSLSAIKKILPYLRQGYLYSHAVYLANVNKVLGQNEIRADMAKTIAESIEGIFVKAGTEKLLNAAVNSLISEQLNSNTRFGMDQCYALDQDDTKDINLKLEETFGKKSWERKTEEEKNGAYDFVAKHYLSFLQKPIQYTKERLFLKGAPLHDKIFEHLQETYGVPDSRKCLLWHPSEQENYRSAARINGIPQLDSPVPISRGFKNPMALKTLHKMKHLVNHLLLTGKIDEDTRVVVEIARELNDANKRKAIEKWQRERERQNDEYRARISELNEEFHLGLDLFSKTLIDKYRLWIEQNKQCLYTGEIINCKDLFDGTKYDFEHTIPASMSFDNELKNLTIANSRYNREVKANRFPSQLPNYSDTASGMQPILGNIEFMKKKVGELESLYDEWLNKAKFASTKNIKDACIQRKHFIRMDLDYWRYKLHTFTLTEYKAGWRNSQLRDTQVVTKFALPYLKTVFERVEVEKGSVVADFRKIYKISPANEGKDRDQHSHHAKDAAVLTLIPPAAIRDKILFRYNQGKELQSNAVIHEQVQDWRNFDPKFILSIGDDVLINFQAQQRALTQTYKNVRKRGRQQYVKQKDPCGHVKYKLDEKGERIPLKAKGDSIRGQLHKESMFGVINKNDEKWLVERYSISQFTSISDCRNIVDDAIRKIVQAELEKRVAAGESFEKAKFREIPFPSGKAVIKKVRCRVAAGRGYLSPEKALEISRRTHLSRHTYKQVAYAQNEENILCLYYENGMDRGFRIVGLFELAQLKLKAFSELEKEKYYQTLELGKGKNKHELPLVHIITTGMKAIIWLGKKEELRDLPHQEILRRLFRIYKFNEKPSATVYMQHHLEARPNEELGTGDSEIDLNEYQPRLALSAGNFKCALEGKDFTVNIDGEIHWKF

SEQ ID NO: 7704 - protein, 1017 aa, unidentified
  REGION 1..1017: note = Description of Unknown: Cas Enzyme sequence
MSAALEQQKYVLGLDLGSASLGWALIALNDADDPVSLIRAGVRIFEPGVDGTSIEIEQGKDQSKAVERRTARLHRRQLRRRAARQRDLFRVLQRHSLLPAPETLVGSPEEQRHSVLNELDQQLTQKWQSTYQGKRFAELPLYYLRKMALDERLETHEIGRILFHLIQRRGFLSNRRENKQNPDQKKELGQVKAEIHSLEQEIQNAGARTLGEFFAGLDPHAQKVRRRWTARKMFQDEFEKIWEAQTAHRPELLTQELHDKIAHLLFFQRPIAAQTHLIGKCELETGKQRAPWAAMEAQRFRILQKVNDLRLINPGSLISEPLTEEGRQRLYHLLDREGDQTFKAIRKYLSFFAEVQFNLEKGDEKRLRGNRTQAAMRKVFGKRWDTIGEGKQHQIIENWRNSESDEVLIREAMEQWSLDAAAATLLSEQTPEPGYCAVSLAAISKLLPLMASGKSFKEAETELYGARFSGGTIFETLPEVRKQLESLRNPAVERSLTELRKVVNAIVREYGKPHEIRIELARELKKPRRERIEATKKNRNRQREREDVAVRILRECGLSNPSRRDIEKARLHEECGGYCPYTGRHIPFSTLFDNSEFDVEHIIPRSRYPDDSFQNKTLCYLPENRDVKKGQTPWEAYGKDEQRWAEIMTRVSSWKNRGKMARFAIQTEESLGDFSARQMNDTRYASVLASRFLGALYGGRDLVDAEKVRQVIFASSGAVTATLRSSWGLEAILREIVPTEPGESRGKPRTDHRHHAIDAITIALTRPKVIQSMALAASLEPWQRDSRAWRKIESPWRDFVLSIRPHIEQMLVSHRPEHKMSGELHKGTNYPPPHNYKGKPTVHTRCALSALSAADIADDEVIVDPAVRDAVRAKLEKLGGNPKLFDRPENAPCLESRDGRFIPIRKVRIREAKKPILVGTGVRERYVASGGIHHIGLFVVRDARRREVWESEVVQITDAYERHREHLPVVCRTHDAEEAAFLFSLMKDDTVELGKMGLGAFIESRSLRLQARSPSSP

SEQ ID NO: 7705 - protein, 1070 aa, unidentified
  REGION 1..1070: note = Description of Unknown: Cas Enzyme sequence
MRVLGLDGGIASIGWALIEIDNEIVAGAAKGQIIGAGTWMFDPPEDKGQSGTKLRSAERRLFRGQRHVIRRRRQRMNMLRGLFVQYGLLPTSNRDSLKIPGFDPWRLRVAALERELTAAELAVALGHIARHRGFKSNAKGAAANADDRGKVLKASAETQEKLTKYGTSARMLIEDDSFVVRETIRRDGSSERVRRFRNREGDYSRSLLRDDLESEVRAIFRAQRRLRSGFATAELEREFLETAFFQRPLQDSEAMIGRCPFEPSQKRAAKRSPSFELFRYLSRLNTLTLVNGRETRRLTPEELGKAVSDFGATAKISFYGLRQKLGLAPAITFDGVKADEERKRDVVARSGEAAAGTARLRKLIAGHHGEMAWHALADRPAILDAAAQVISFRDDLDSIAKGLDEIAIEPAVRATLLKAASDGELDLFTGAGHISTKAARAIIPGLLQGLTYDKACALVGFDHTTSRERQAFDVGVTGKEALARILKEERISRELIGSPTARKALIEMVKQVKAVIEDYGLPDGIHIELARDVGKSIEERDEIERGIEKRNKQKDRMRLLFADKVGRPPQDGPRGAEELLRFELWEQQNGRCLYSDDYISPEQIVAGDGSVQVDHILPWSRFGDDSFHNKTLCTAKANQEKKGQTPFEWFKSSKSEAEWDAFVARVRAIPFMKGMKRRNYLLKDAREVEERFRARNLNDTRWACRLLAEALRQALPDAKDENGKLRRRVFARPGALTNLFRRAWGLQWIKKDKAGKRIPDDRHHALDAIIVAATTESMLNRATREVQEIETKGLCYDLRKNIGQPWPGFLEQVLAAIETVFVARAERRRARGKAHDATIRQIGERDGAELVFERKKVGDLKLPDLDRIKDKDRNAALVANLKAWIEAGKPAGAPPLSPKGDPISKVRLETAKAKRIDLVVREGQVDRGEMARVDVFSKEGPKGAPLYRFVPIYPDQIAKLAYPPDRAVTRGKQTSDWELMDETWRFFAALNPFCFIQLIDEDGVFRAGYFRRLNINDACLILSASHDSTAESGKIGTRRLLGFKKFAVDRLGRAFEVGPETRTWHGEACT

SEQ ID NO: 7706 - protein, 1348 aa, unidentified
  REGION 1..1348: note = Description of Unknown: Cas Enzyme sequence
MAKILGIDLGTNSIGWAVVEKENGSEFNLIKKGVRIFQEGVKIDKGIESSKASERTEFRSARRNKYRRKLRKIEVLKALSEYGYCPELSKQELDDWRYKKIYPSNKAFREWQKTDEVSNKNPYYFRALAVGEKFDLSNENDRFRLGRAFYHMAQRRGFLSNRLDSTPENEKSTVKKTISEINKAKGDKTLGQYFFEKYERREKIRDTYTHREEHYLDEFKRICEFQNLPESFYKKLHNAIFYQRPLKSQKGSVGKCVFETSKPRCPISRPEFEEYRMMCFINNIKVKTPDDEKMRELTPDEKLNIRPAFFRKSKETFDFADIAKIIAPKNQYKFYKDRNKNTEDWLFNYPIRTTVSGCPVSARFKEIFSNEILSDDYLFLKDEKGLLSKRVIDAWHALFSFDSVDKLFEFAMKTLHLEEDKAITYSKIHLKQDYASLSLKAIRNIVPFLNEGLIYSHAVFLANMKSALPKGVWQNEDNQKIINTEIKQIIKTQREEKEIVEIVNDIIKKNRDEDAVWSEEAKPLLLKDIFEKIEKYYGAKKYAAFPNDKRDRIEKKAVMLFEENMKKNMGRGQFATISTIDERLKQFITDNFEIDEAKLSKLYHPSAIEVYKPAKKGEDGKTYLGSPIVSSIKNPMAMRALHQLRKVVNELIRNEIIDQNTRIHIEMARDLKNANERAAVQQWQNERERNRKEYAKKIKEHFEENNINREPNDDEILKYELWEEQNHICIYTGDSIGIDEFLGGNPKYDIEHTIPRSLSFDNSLANKTLCQNSFNRSIKRNKIPQELKNISEILERIDHWREKYENLDKQIQIQVKKAKNAFDKAQKDNAIQARHKLTLERDYWRNKYQRFTMKDVPEGFKNSQIVDTGIITKFSRLYLNTIFNKVYTVKGSTVADFRKMWGIQKEYIKKERINHIHHCIDAIVIACITKENYENLAHFYHNWEENNIAGIDSKPEVDKPWDTFTEDLKNVENEVLISHYTADVLPKQSKKILRKRGKKQYNKQGQPIYQQGDTARGSLHQQTFYGAIAHDKDGKVNLDSEVNIIPKYVVRKALDTLEDNSIKNIVDAKVKSIIETDRKTEKALKSEIEKLKKQITKADEQEEEIIKANIESIQNQIYQLYHLPNKNGKPIPIKKVRIYSNVTNPLHFDKKQRDKTNGKPKPYKEEFNVANDSNYLMAIYEGKDAKENTIRDFELINNIDAAAYFKLTSRKMLNPQGIKHLEGLIPQTKETKKVETKLKSLLKIGKMVILWEKTPDEVLNLNTEELSRRLYKIVGLSEQIIQRKYNYATIVMRHNKVAQSASDLKTYDGAFNTKEEYIAQRKMNHNQFNALVEGIDFNINPLGEIQWL

SEQ ID NO: 7707 - protein, 1062 aa, unidentified
  REGION 1..1062: note = Description of Unknown: Cas Enzyme sequence
MALVFGLDIGIASIGWAAIDEEQAIPLLGLGSRIFVSAEVPKTGESLALPRRLARGMRRRIRRRAHRMWRIRKLFLRNGLADDAVLADLHETTVDDLTPWLLRADGLNAKLNQRDWARVLLHIAKHRGFKSNRKSEAGDKEGGKLLMGVTGNAKLLKDKNYRTIGEMVWKDEKFAVHKRNKGGDYSHTVARDDLLLEITALFEAQRHFGHGNATEAFEIEYTKIFASQRPVDDGEIADMVGECTFELGEKRAAKATHSAERFVLLSRLNNLMLIEAGERRVLDAEQRKVIETMAYKSVSVKYKQIRKALDLPEAIRFNLVQYKSGEIDKTEDIIFAELKAYHKMRSAITNACGELAWGSLTNQPGKLDAIATALTWYKSDDKIREILAPEQLEPALLDAVLALSFDKAVALSLKALRNINPFLAQGLRYDEACTEAGYDHSVPSEAQPQQFLPIIDVDEVRNPVVLRALTQARKVINAMIRRYGSPAQINIELARELSQPYSERKDIEGKQKEFQAEKERTVKQFNGTFGRDPRGDEFTKFRLWREYNYCAYSGVYLEPSRLLEEGYAEIDHILPYSRSMDDSLNNKVLCTSKANRDKSNKTPYEYLNGASLSLQWHQYKVRIETHKAFRQAKRNRLLRVDFDEAAEQEFRERNLNDTRYIARFLQEFLKLNLQFSPSDNKIKVQTRNGAVTSFLRAHWGLLKVRADGDLHHALDATVVACTTQAFVKRISDYSRKKELWASDKKSGDNSRNLEIVDTDTGEITATNFQQKDAKDFPIPWLGFRADVKDALTEVFVSRAPTRKVSGKAHDDKIRSTKKLMSDSITSSKMNLADFKIDSKKYKTTEALIKLLDGIPEKETRNANLYQALKKRIETGGKEPFANHFYLGKNGEESDDAFGRLIKAIKLERTTKTGVLVRGGLADNGEMLRVDVFTKAGKFYLVPIYLADRVGGVLPNKAIKQATLEQDWPEMDETYAFAFSLCNNDLILIADKKGEDDAFLRGYFKGAHRGTGNINIEGHDRSWKKEGVGVQNIGIFKKLQVDVLGNVFEVKKELRHGLAESTD

SEQ ID NO: 7708 - protein, 1516 aa, unidentified
  REGION 1..1516: note = Description of Unknown: Cas Enzyme sequence
MKKILGLDLGTNSIGWSLITQDIENKTGRIDAIGSRIIPMSQEVIGEFDKGNSVSQTAARTDFRGIRRLRERTLLRRERLHRVLNILNFLPEHFSSTLDKYGKFDKNAEPKLAYKEIEENKFEFIFRKAYSEMLEDFKKNQPQLLINKKGEAANIPYDWTIYYLRKKALFNKIEKEELAWLLLHFNQKRGYYQLRGEDEETKENKIEEFYNLKISDVIVREKGKKDGEIWYDVILENGWIYKRSSKISLNDWKGKYRDFIVTTEINDDGSIRTDKDGKEKRSFRAPKDDDWGLLKKKTESDILKTNKTVGAFIYDSLLQTPNQKVKGKLVRTIERKFYKEELERIIKTQIQHHNELQDETLYNNCLEVLYVNNEDFRNSIAKKDFNYLFIENIIFYQRPLKSKKSEISDCSFESRRYKDKDGNWVVKPLKCISRSHPLFQEFRLWQWIQNLKIYEREKFVNGKLQSDVDVTSELLNNEDDYVALFEFLNDRKEVNQKSLLAYFGKHVKISKYRWNFIDDEKKSYPCNETRTQIAKRLSNVENIKGNFLTKEKEIELWHILYSVTDKLEVEKALITFAIKNNLDEKSCVENFRKYPLIKREYGSYSEKAIKKLLPLMRMGKYWDFASIHPQTKDRIEKITNSEFDETIRNRVREKAINLTDISHFKALPLWLVSYIVYNRHSESGDNTKWKSSNDLKKYLNEFKQHSLRNPIVEQVITETLRVVNDIWTQYGEGKENFFDEIHIELGREMKNNAADRKAITENNTQNESTNLRIKAILAELAKPEYEVENVRPYSPSQQDLLKIYEDGVLNSGIEIDEEILKISKSSQPTSKEILKYKLWLEQKYRSPYTGMVIPLNKLFTTAFEIEHIIPQSIYFDDSFSNKIICESEVNKLKDNQFGYEFIANHGTTKVALNGGGEVEIFTKEQYEDFIKLNYGNNKSKMRKLLLEDVPEKMIERQLNDTRYISKIVKNILSNIVRADKDDDGVTSKNILSSNGNITGILKQDWGMNDVWNDLITPRFERLNTLTNSQNFGIWANKSGHRVFQTQVPLELQKGFNKKRIDHRHHALDALIIACATRNHINYLNNQSALGKGKKKDEKLNDRQDLRRILCFKTKPDANGNYKWKFTKPWETITQDVKEKLETTIISFKQNLRVINKTVNYYQKFDNGKKVHVKQEKGENWAIRKAMHKDTVSGQVQIQKIKEVSLSNAIDNWQNIAENKSLRTKISELITEGNDKKKISKFFKDLDFKWNEIDISRVKLYYYDIDQVASRVNLNDSFNKAKIETITDTGIQKILLTHLEDYNIDKDGKIIEQPELAFSPEGIEEMNKNILDLNNGKPHQPILKVRTYEPKGNKFNVGHNGNRKRKFVEAAKGTNLYFAIYQDENGKRSYDTIGLNIVIERLKQGLSPVPEKDNHRILFWLSPNDLVYVPTEDEIASKGLIDLKNITKEHIGRIYKIVSFTGNRLYAIPYFVSQPIVDKLEYSQLNKMEVTLDKRSLKDFCLKMVPDRLGSIKKIVK

SEQ ID NO: 7709 - protein, 1061 aa, unidentified
  REGION 1..1061: note = Description of Unknown: Cas Enzyme sequence
MATMRYRLALDLGTTSLGWAMVRLNAENKPCAIIKAGVRIFSDGRNPKDGSSLAVTRREARAMRRRRDRLLKRKARMTHTLIAHGFFPADEVQRKELVTLNPYALRAKGLDEALAPAEFARALFHINQRRGFKSNRKTDKKDNDSGALKQAILGLRAQLDPLGADSKSRTVGELLHRRYTNTAIPPEQRTVRARYREARVPREDGKTKINKSYDLYIDRAMIETEFDVLWAKQAELNPAQFTPRARDELKDALLHQRPLKPVKPGRCTLMPEEERAPLALPSTQRFRMYQEVNNLRILREGLKEEPLTLAQRNTLVQAMERKSKLTFTAMKTLLKTGGAVQFNFEDPKRQEFKGNTTSAILGDKRHFGDTWFAFDETKQDAIVLQLVKEENEAKLVRWLQDETGIDEVHAEAIANAALPEGYGSLCSQALASILPELRRDVVTYDKAVLAAGFEHHSNISPAVTGEILPELPYYGIPLQRHVGFGSGKPEDTDEKRYGKIANPTVHIGLNQVRLVVNALIKRYGHPSEVIVELARDLKQSKDHSQSSGEPYREKPGCSCQRCVTAQQASNQRRNVRLRADIAGVLNISPERVRTADIQKMILWEELSDNVADRRCPYSGVQISAAMLFSEQVEIEHILPFSETLDDSLNNKTVAMRQANRVKGNRTPRQARSDFEAQGWQYASMLERAKQMPKAKRYRFGEDGYALWLKDDAGFLARALNDTRHLSKVAREYLSLICPQNTRVIPGRMTAMLRAKFGLNDVLSLQGEKNRNDHRHHAVDACVIAVTDQGLLQRFAQASASARERQLNRLVENMPFPWGTDQGHEYYNSVKRAIEPICVSHKPDHGHEGEMFDATIYSASGESRSAAKTRSVIPFQPRTGSLSAIQRHGVVNGAPRAYKGLLSNSNYCIEIFRTEAGEWESEVLRTFDAYKVVAGCASLAEGIKRLRNPRFSARNYPLIARLMINDYIRAEIDGESTVLQILKINSSGSVTFVKPNETNISARYTLKLAAQKAQRDGQPYDASALNDVFFQKALSAQSLKDAKARRVTISPIGELHDPGFKE

SEQ ID NO: 7710 - protein, 1169 aa, unidentified
  REGION 1..1169: note = Description of Unknown: Cas Enzyme sequence
MNIISKKVLGLRITINSIGFYLNKIFIENEQTIFEEIASNSIIFSEYIKAADRKSFRSGRRRNERNSRRKEIVRKLLCDFNFANKSIITQPIEYFNNLSKNQNPYILKQSAVQGKSLTKDEFTFALYTTISRRGYSNQFNTKDTKNDGVINGAISKNKAIYLENNLAIPSLVLWNKKIELENDGFINVSIRNKKDNYNNSLDRELWQEELEKLLESQKNNSELFEDKEKYETFKNKLLHGVNENSLGIFEQRPLKSMEDMVGYCSFYNAYHQNSQKRVAKAHISSIEFTLRQRIENSILGNLIFNDKTGDIFTPTKKDIENTIEFWLKNTLTQTINTRNIFDKAGLKNIKIKIADKQDDTILDIKLHTQLLEIFRNANIDIFEKHKALYTKILEKIHYFVNKEQIVKEIKKVDIENILDDVTVEKLSNVNKGNKGFYASFSLFFIDEILQKLRAGESYQNSLTQLGYFKKYLDITPYDYLPPLNPSSDDIKWLEKNVKNFKVEHLFYQPLISPNVKRVISILRKLINDLIKKYGKIDEIIIETARELNTKTEEEQIKDSQANSRKEIKEAEKLLEAYKYESTNKNIERTILYIEQRAKCLYSGNPMTLEEALDEIQTEVEHFIPRSKIWINLNKNKILVFKKHNQNKIDKHPIIYLKSKTAWEDFQHRVNEHISNKSKVFWLTNEDNINKNWEKGNLEYKFLNDNKSASKIIANYLEHYLFPKQNKHGKGWETNSNIIRVTGKAISELKRLWGIDKIQPKNEDDKKDRDTNYHHTIDALVISLLNQSSKKALNDFFKQNEKGLKIEVILENLRISFPKTKDGMSLVDFVKEKIRKYENDEIYVCHMMKKRDNIVGFKNGNIKLYWDKEKEIFCQIDKKEVNLKSILLKKEGQNIKERTDKEVEVKIDELITFLNLPKQNNIKEALLDYKEKLLQAKTKLGNIEKQIRILEKDKEFLNTIENKQIELLLKEKEAQIYLLNEPCYFLTKKKQKQIIRNIAIKSKNTSKVDTIIIIDKMRTNRLRRLTKVTYDEIKNNKIPFVAKLNDSTLNLNLFNTIKGQVIGLNYFSSIKGDIKTKIDNSKICLIENFENKITISKGDLIEIEDIQKRTKKYYVFNGGGNITNGNNKIELKSINKKNNKRLFVTLNINNIARKIFMNYTGVISYVDFKK

SEQ ID NO: 7711 - protein, 1500 aa, unidentified
  REGION 1..1500: note = Description of Unknown: Cas Enzyme sequence
MTKNILGLDLGTNSIGWALIKQDFENKQGEILGMGSRIIPMSQDILGDFGKGNSVSQTAERTKYRSVRRLRERFLLRRERLHRVLKVLNFLPEHYASQIDFEKRFGKFKVETEPKLAWKNIDGQFSFLFQNSFNEMLEEFKAAGQDLKIPYDWTIYYLRKKALSHKIEKQELAWILLNFNQKRGYFQLRGEDEDVSEKREYVLSLKIVEIEKGEVDKKNNKKYWYSLTLENGWVYSATFTSEPQWLNVEKDFLVTEELDENGEIKIVKDKRSDISGKEKRRITPLPTFEEIDLMSKKDQDKIYKKIKAKTEITISNTGKTVGTYIYETLLNNPKQKIKGKLVRTIERKFYKDELRQILEKQKEFHQELQNDDLYNDCIRELYRNNEAHQLTLSKKGFVHLLMDDLIFYQRPLRSQKSSVSNCTLEFREYKKYKLDEKGNKIKDENGKFLYEKDENGKDKKYKDFLKVIPKSNPYYQEFRLWQWMYNLNIYRKDDEANVTKDFLNSTEDFENLFEFLNNRKEVEQKPLLKFLLEQKDFKGKLLTAEIEKYRWNYVEDKKYPCNETKTMISSRLDKVENISDNFLTREVEQKIWHIIYSVNDKMEYEKALKSFAGKNNLDENSFFEAFKKFPPFKSEYGSFSEKAIKKLLPLMRLGKYWNEDEIVKHSDIYFKNIENLLGDLSNRDKNISEEDKEKWSKSINLKLQEELKDFQTAEIALFQGLRLHIAQYLVYGKHSEGKDNKKFESADDLEEFLKDFKQHSLRNPIVEQVITETLRVVKDIWLKYGNGVKDFFDEIHIELGKEMKLPADDRKKLTNQITENENTNLRIKALLAEMMNDSSVENVRPFSPMQQEILKIYEDGVLNSGIEIEDEYLKISKTAQPSSADLKRYKLWLEQKYKSPYTGQIIPLNKLFTPEYEIEHIIPQSRYFDDSFSNKIICESAVNKLKDNFIGLEFIKKLGGTVVECGNGKSVKVLKQDEYEDFVKKHYANNRGKRNKLLLEDIPEKMIERQMNDTRHISKYISGVLSNIVRVEDGSDEGVNSKNIVPGNGKITTQLKQDWGLNDVWNDLILPRFERMNQLTNSTDFTAWNENHQKFLPTVPIEFSKGFSKKRIDHRHHALDALVIACATKDHVNLLNNQSAKSDTKRYDLKKKLMKFEKVVYHHTQTGNKIEREIPKQFLKPWENFTVDAKHNLESTIVSFKQNLRVINKATNYYEKYVEKDGTKNKGRVEQTRTNWAIRKPMHKDTVSGKVDLPWVKVPKGKILTATRKSLDTSFDLKSIGSITDTGIQKILRNYLEFKGSPELAFSPEGIEDLNKNIEKYNDGKPHQPISKVRVFELGSKFQVGQTGNKKDKYVEAAKGTNLFFAVYEDKNNKRSYETIPLNEVIERQKQGLSVVDLKGTNDFYLCPNDLVYIPSDDELENINNIDFKNIAKEKNERIYKVVSFSGSQIFFVRQDIATSIVNKAELSTLNKMERAMDGSMIKENCVKLNVDRLGNISKA

SEQ ID NO: 7712 - protein, 1205 aa, unidentified
  REGION 1..1205: note = Description of Unknown: Cas Enzyme sequence
DFYRSDLQTELDKVWNFQKQYYPEILTDELKKQLQGKGQKATWATLKEPFSLVGEKQTGTAQEKKLEKYLWRSNATSKQFDLEKLAIVLQEINGNLHNSSGYLGAISDRSKKLYFNNQTVGEYLYQQLQENPHTKLKNQVFYRQDYLDEFEKIWETQAKFHPELNKELKEEIRDIVIFYQRKLKSQKGLISFCEFENREITTKDGKKKTVGLKVAPKSSPLFQEFKIWQILNNIEIKNNEGKRFLDLEEKERIFEEVNIKGTVSGQKALEIIDFKPKEVKINYKNIEGNNTNKSFYEAFLKILEIEGYDVFELLKIKHEDDLKLSDLEVSALEIKNMIKQIFEANNIKTSILDFNPELEGKDFEKQDAYQLWHLLYSYEGDDSPSGNETLYRLLQEKFGFKIEHSQILATISFSPDYGSLSTKAMRKIFTYIKEHKFSDACILANYNHSKNSLTKEDLANRILKDKLEVLPKNSLRNPVVEKILNQMINLVNEVIKQYGKPDEIRIELARELKKNAEERANMTSEINKATLLHQKYTETLQKEFGIKVPSRNDIIRYKLYLELEKNGFKDFYTDKKIEKENLFTDKYDIDHIIPQSRFFDDSFSNKVLVPRDANLRKSNATAIDFMENEGKEKLEKFINIITDLHKNGAISKAKFEKLQKNGTDIGDGFVERDLRDTQYIAKKAKEILFGITNSIVSTSGSITDKLREDWGLINIMKELNIEKYRSLGLVEMVENSKGEEKERIIDWSKRNDHRHHAMDALTVAFTTHNHVQYLNFLNARANENHKEHKNIVGIENNITELVEKKNGKKERKFVSPLPNFRKIAKNQLEEILISHKAKNKVVTKNKNKIKGKEKPQETLTPRGQLHKETIYGSAKFLQTKQEKITAKFDEVTIDKVQNEAYRNALLQRLKEFGGDPKKAFSGKNAINKNSIYLDENKTEKLPETVTLEWYEVGYTIRKAVNPDNFKDFKNLEKVTDKGIQEILINRLKEFNGNSKEAFSDLEKNPIWLNKEKRIAIKTVTITGISNAEALHHKKDHLGKEILDDEGKKIPVDFVSTGNNHHVAIYEDENGNLQEKVVSFYEAVERVNQKLPIIDKDFNASLGWKFLFSMKQNEMFLFPSEDFNPKEIDLFDEKNLKKISRNMFRVQKFGSLLSGFWFRHHLETNVEVNTKLKDSTYKVIQSANNLKCIVKIRLNHLGKIVQVGEY

SEQ ID NO: 7713 - protein, 1451 aa, unidentified
  REGION 1..1451: note = Description of Unknown: Cas Enzyme sequence
MAKILGLDLGTNSIGWAIVDKEGNEFSLVDKGVRIFSEGVKSEKGIESSRAAERTGYRSARKIKFRRKLRKYETLKVLSKNGMCPLSLDEVEAWRKSGFKQYPLNPEFLKWLRTDDDNNINPYVFRDKASKDKVTLYELGRAFYHLAQRRGFLSNRLDQSAEGVIELHAPNIESRIEETTTINDLKIEIQEYFDGLDILDKNAKELDEGEKKLKSLYNALDKIIKANEFEKAKTEIIARLNRKEDQGAVKQEIGEISQAIKDGGFETLGQYFFSLYNKGKIRNHYTARESHYLNEFEKICEVQNLSSINKNENIPEKRYSGLAKELYRAIFFQRPLKSQKGLIGKCSLDKTKSRCAISHPDFEAYRMWSYLNTIKIKTPQDEQMRFLTIEEKQQLIPKFFRKKDNFNFEDLSKELTPKGYTPDFYKSSSAKASSYIFNYKAKDSVAGCVVSASLKNVFGEEWNTKTWTYETKNSKGKFVKREVDYKDLWHLLTVSTSDAYLEEYAMEKLGLDEKRAKSYSKIRLKKDFASLSLSAINKILPYLKQGLLYSHAVFMANIEKIVDENIWKNPEERLYIQNRIAEIIENNSFENSKLEIVNGLIKDCKVNNCYYSIEAESSYKADLVKKVSSFFKEIENQKEIVEDLFPVFIEQLKKYEYISVKRLDEKVLEFLKGENEDGEIYCSNPNKLNKLFHPSDIDVFKKKVIEDEFGNKKVVLGSPLISSIKNPMAMRALHQLRKVLNTLIIEGLVDEKTRVHIELARELNDANKRKAIQDFQKENQSKRAEIALKIKEDYKAATQKDIEPTGDDILRYQLWEEQNGMEIYEASINNGISKKIGIHQIIGENPDYDIEHTVPRSISQDNSLMNKTLCSKKFNRDIKKKQMPIELNNYELILPYVDHWRFEADKLSWEIEQLSRGIKAAATKDAKDKKIRRRHFLTLKRDYLKGKYDRFVWKEPKVGFKNSQIPDTGIITKYSRAYLNSYFTRVESVKGGMVAEFRKIWGIQGSYSKDGKKYYVEKDRSKHTHHTIDAITIACMTKDKYDVLAKAWTDEDNENLPLARKLLADSKPWSTFTEDIKKIEEEILVSHHTPDNVKKQSKKIIRVRGKKQYLAEITKDENGKKVPQKDENGKIIYKLNSEGKRIPRVQQGDTVRGSLHQDSIYGAIKNPLNQEEIRYVIRKDIESIKATDVENIVDEVVKEKVKEAIANKVLLISSNPQQKNKIADNQKVWMNEEKGIPIQKVRLYANSVKNPLHIKEHSALSKSRHEHKQKVYGQNDENYAMAIYELDGKREFELINNFTLAKLQKTGEGFYPLFKEKEVKGKKTQIPIAKSNNRNLVLKRGQQVVFYDKETEQLNDITDVIDFSGRIYIVEGLSIQRIKSGGNQFDYGVIMFRYYKEARKADEIKNDKYKPDGVFRLGENKPTRKMNHNQFNAFVEGIDFKVLPSGKIQKL

SEQ ID NO: 7714 - protein, 1071 aa, unidentified
  REGION 1..1071: note = Description of Unknown: Cas Enzyme sequence
FLTDEVVHQLRNEIIYYQRKLKSQKGLVSVCEFEGFEKTVFDKEKDKNKTVFVGPKVAPKTSPLFQLCRIWEVVNTITLKIKNPEGSKYKWGEKIPTLEEKELIAEYLFKNDNLSFTKLIEILNLKKDDVYVNKQILKGIKGNETYASIHKILGDNDLLNFDVSIIPTEKTSIIVDKQTGEILEERAGLELDASLERQPLYQLWHTIYSLKDLEECRNALTKRFGFDEEISEKLSKIDFNKQAFGNKSNKAMRKILPFLMEGYDYSQSCSLAGYNHSNSLTKDEREQQKTIDRLELLTKNSLRQPIVEKILNQMINVVNAIIEQYGKPSETRVELARELKQSKDERNDADLQNSKNKKLNEEIGKRLTELGLPATKRYIQKYKFIFPSLSKNLKEAKVNNQCIYCGESFNLTEALSGDAYDVDHIVPKALLFDDSQTNKVLVHRKCNATKTNQTAYDYMATKGDEAVRIYAERVDDWFNRGIISYSKMQRLKVSHKEYLERKKLGKETETDKKLWENFIDRQLRDTQYISRKAREILQKVCNNVTTTEGGVTAKLRNLWGWDDVLMNLQMPKYKELGQTVTKEWTSEHGKRKHQKEEIENWTKRDDHRHHAIDALVVACTKQGFIQRINTLNSSETKDLMQREIKEAKKLLGENYNEKEFEQDNEFVKNHKERLSQLDDYLRLQKPIKFDTKYVEKEADKILISFKAGKKVATVTKFKATGKNKDTGVIVPRGALHEQSVYGKIKVIEKDKHLKYLFENSNKIVDTKIKNLVETRLTENENNSKTALSSLKKNPIYLNDEKTNILEKASCYNEATVLKYKLQSLKASQADDIVDEKVKFLVKERLTQFNNKEKEAFKDTLWFNKEKQIPIKTVRLFARPDANNLQAIKKDENGKEIGFVVMGNNHHIAIYEDKDNKFIQHSCTFWHAVERKKHRIPTVIKNSSDVWNELLNKELPESFLNKLPTDNLNLKFSMQQNEMFILGLSQEEFDEAIQKSDKPSLSKHLYLVWSISNNDYWFRHHLETKNSELKNIPTAKEAKRYFRFKSVGAIVGVNPIKVRLNHLGEITKIGEY

SEQ ID NO: 7715 - protein, 1265 aa, unidentified
  REGION 1..1265: note = Description of Unknown: Cas Enzyme sequence
MTKNILGLDLGTNSIGWALIEVDENNIPIRIIAMGSRIIPLTTSDKEEFQRGLSITKNQSRTVSRTQRKGYDRKQLKKSDLKKLLIKYNIFPSEELLKLPMLDLWKLRNDAANPNENISAEQLGRIFYMLNQKRGYKSARSEANADKKDTDYVQAVKGRYAQLKDKNQTIGQFFYDGLHNASFGNSYFRVKEEVYPREAYIEEFDTIINAQKDKHNFLTDEVVHQLRNEIIYYQRKLKSQKGLVSVCEFEGFEKTVFDKEKDKNKTVFVGPKVAPKTSPLFQLCRIWEVVNNITLKIKNPEGSKYKWGEKIPTLEEKEIIADYLFKNENLSFTKLLEILNLKKDDVYVNKQILKGIKGNETYASIHKILGDNDLLNFDVSIIPTEKTSILVDKQTGEILEERAGLELDASLEKEPLYQLWHTIYSLKDLDECKNALIKRFGFNEEIAEKLSKIDFNKQAFGNKSNKAMRKILPFLMEGYDYSQSCSLAGYNHSNSLTKDEREQQVTLDKLELLPKNSLRQPIVEKILNQMINIVNAIIEQYGKPSEIRVELARELKQSKDERNDADLQNSKNKKLNEEIGKRLTELGLPATKRYIQKYKFIFPSLSKNLKEAKVNNQCIYCGENFNLTEALSGDAYDVDHIVPKALLFDDSQTNKVLVHRKCNSTKTNQTAYDYMATKGDEAVRVYAERVDDWFSRGIISYSKMQRLKVSHKEYLERKKLGKETETDKKLWENFIDRQLRDTQYISRKAREILQKVCNNVTTTEGGVTAKLRNLWGWDDVLMNLQMPKYKELGQTVTKEWTSEHGKRKHQKEEIENWTKRDDHRHHAIDALVVACTKQGFIQRINTLNSSDTKDLMIKEVEEAKIEFNEKTTLLEKYLKTQKPFTTENVMKEADKILVSFKAGKKVATITKFKATGKNKDTGVIVPRGALHKEYVYGKIKIIEKDKHPKYIFENPESIVNPKIRNLVIDRLKEFKDDNKLALSSLKKNPIYLDVNKEQILEKADCYVEVTVKKYDLNTLNLKQIDDIVDERIKQIVKEKVKECNNNLKEAFKETIWFNEKKQIPILTVRLFARPNADSIVPIKKDPNGKEIGFVDTQNNHHIGIYEDKENKLVQHSCTFWHAVERKKYKIPSVIKNSSDVWNDLLNKEIPESFLNKLPADKLNLKFSMQQNEMFILGLSQEEFDEAIKNNDKPLLSKHLYLVWSITEGDYWFRHHLETKNSELKKTEGAKEGKRFYRLSTKGFIDLNPIKVKLNHLGEITKIGEY

SEQ ID NO: 7716 - protein, 1117 aa, unidentified
  REGION 1..1117: note = Description of Unknown: Cas Enzyme sequence
LQLIRGENRRARNSKENNSIRRKKIVNILLKYKFIDKNEIKNINTNLPKSKVKREIIVKVANYLFEDKKNANNILELRYKALNEKLSTIQLARLLYSMNNHRGVSYEDTRSSKNIPEKKLEEFSKKDINEYADGSSDKLLYGLLNFKNAFINSSKYQTVGEFLYKEYKEKFRNSPKRFKDTKQSDFMFVIPRKNIVDELNFIFKKQKEFKNEVINDDFIKEYLEAFEWEEDSPAYDELVANCSIKENEKAASKYLVESQFYIYLEKLYNLSYKTKDEYRYKNLDIETIVKIIKHINTKTIKYSKLRELIEKELNLQDVMFKGVSDYSKYFIDLTIFVNLASILSFPINILELFKDIEAKELFNKVVNILAYEPKISQKEKKLEELKIVDEKIVDKLLEIKIKGNLSYCKEVLEQICNGMLSGLIPHYAKEEVQKAYPKKPIIKGHLLPPLLDTDFPIKNNQVVVRALSQMRLVINDTLKHYRKVYENPNWFFDKVVIETAREFLNKEQVKKYDDRAKENEKLNKQAIEFCEKYGKAYPTKEEILKARLFLQQDGLELYPSEYNISTNSANFNKIDAQRLFDEAYCEIDHTLPISRSLDDSFSNKTLVLSSTNQNKGNKTPYEFLNKELFEIMEDSLNKKINILGYKKVSNLTNKEFKELDGFIARDLNDTRMITKYAGLYIQNYLAFPKNDKIKRRVFANNGKITSLLRKSWGIGAKNRNNHLHHGEDAILIALSDNSLIKNISTYYGIQTELEKLDFSKDGFDKLFKNNKNIKEYIVTELKKEDIDIENIDFSKISKKEISSKIFRIIAQKSYPREDFLDIFRKAIHSAIVTHQERVKINGQIHKDTLEKLSKKTNDDVVLVRGGFATNGEFIRYDVFKSDNKIEFKRIAPKYCNKKVELLPQANDNSAKFMFSIYKNGLLKVDFIKDDELFNIKGIFSKIDADAKGILTYIYLNSVRNTEDNLFISFVSGFLNSTIYDDAIIGDDRKKIEELLKKNKIKITDSVRDKDTIKSKIVDFMNIVKSNTELVIGFNIIRNNNILNSIHNDLSEYLYKKDLKYDVIINIDGKPATPILKIKLPIDDKKTNLPKMVNIIKLKTDTFGNEEIIENEKREPLI

SEQ ID NO: 7717 - protein, 1212 aa, unidentified
  REGION 1..1212: note = Description of Unknown: Cas Enzyme sequence
MKKILGLDLGSSSIGWSFIEENKEKSKIKRMGVRIIPLGSDEKDQFTKGQAISINKDRTLKRTARKTNHRYKIRREKLLSTLEVMGMLPTVDQILKISSLTLYELRSNAVDNKIELTNLGRVLLHLNQKRGYKSSRHTEEEEDGKKLSDYLSELKGRKDLIEHEGITIGQYFYKLLKEDPFYRIKENVFPRECYVQEFDTIWDKQSTFYPDILTNEKKNIIRNEIIFYQRRLKSQKKLVSECSFEKHHKVAPKTSPLFQVEKIWESIHTISIRDKYNQPFLISQEQKLAIFNYLDNSEKITKTNLLRLLQLKTSDNWQVNEQIEKTGIQGNITKSKLIKVFKELNIERPELLQFNLKTLTAVNHLTGEVKEYEIVSPEFEQEPLYQLWHVIYSLDEPQLLIQTLMKKFELSKEQAEALNKVDFKKPGFGNKSAKAIRKLLPGLMNGLDYSKAASSVGYNHSNSITKEQNEERLLTENLKHYAKNSLRQPVVEKVLNQLINLINNILEDPELGRPDEIRIELSRELRQSKDERNEAYSRNIKTDKEHKAIIERINNEFPGLPVSRKMLEKYKLFIQQDGICMYSGKKMELSRVLRGEGIDVDHIIPQSRLFDDSFQNKVLSYQEENKKKDNNTAYDYMKAKSEDDFSQFIERVARLKEDKKITRSKHDKLLMKGIEIPDDFINRQLNETRFISKESVKLLKNICRNVYATSGSVTEFLRREWGYNEVLKQLNWKKYEKAGLVKDDKIEGWSKRDDHRHHAIDALVVACTNQGYIQKLNNLNSQKVRDEMASYVKGKAEANWQARKSLLEQFVQTQQPFTTQEVKEAVSNILISLKAGKKVASGSVNKKAGNQKTLTPRGQLHKEQVYGKIRKYAAKKTPLNGRFNQTELISNPVEKKLVAERLLQFNGDPKKAFKDLDKNPIWLDEAKTKSITEVTLWEDHFVYKYTLDQNFKEKDVDFIVDVKIREKVRERFKQKAGTGEHPLKNLENEPIWLHEEKKIPIKSVRCFTGLNDLVPLHIAENGNTKPNRFKTENSKPVDFVSTRNNHHIAIYQDADGKLHETTVSLWEAVERKKLGIPVIINNPSATWDYVLEKGIDNQALLNNMPLNDWTYYMCIQQNELFVLNFEMNELNKAIKNNKYELISPKLYRVQKISSKDYFFRHHLETKLEKDSSEEKMSIEIGKMIRVKSLIRLKELNPIKVQINSIGSIKIVL

SEQ ID NO: 7718 - protein, 954 aa, unidentified
  REGION 1..954: note = Description of Unknown: Cas Enzyme sequence
MARILGLDLGTNSIGWALIDDVQNKILGIGSRIFPMGVENLGEGEGREISKNAGRTGARGVRRQFFRRRLRKKILLKALSENNMCPMVASDFEDWKKTKEFPSEKLANWFALNPYELRQKALNEKLSLEEIGRIFYHLIQRRGFLSNSRKGGTDDGTIFKGNPKEGKIGITETQESIQDKTLGSYLFEIYPKENQPFQGGLERIRNRYTTRKMYVDEFELIWNKQSQFHSELTYELKTKFGGRKLDNYPEDGILFHQRPLRSQKHLVGNCAFEPTKTKCPISAIPFEQFRVWQWVNTVEYNGKKISQEEKEKIVDFLYANEKPEFKKIRKAIGKESAEFKFNYNDDDKIVGTHTISNLSNKKYFGKKWFEFSEKEQEDIWHVLYFFDSKSNLKQYAIKNWNFTEEQAKAISNFNTSDKNKKNGFASLSRKAISNILPFLKLGFTYDVAVVLGGIKNVFGASWNNLSDEKRNYLIDNVEGIVRSKTKGGFIDIIKDILRNDYNISDHQLRKLYHHSATIDVSELLEKLPLGSKADKEIQSIKNPIVITALFELRKLVNELIDEHGKIDEIKVEMTRDLKVSKSERYKTRRNQQRLERENDRVKAEVLKYEKSLSHDNILKFKLWEECKRTCPYTGLSIPINELFTNKWQIEHIHPWSKSLNDSFSNKTLCLGTENIKKGNKTPFEFYGSDEANWSAIKERALKLFSDTKEYPNAYQKFKRFVQQKFDDDFSSRQLNDTRYISKEAKNYLSKVCKNVMVSPGQATSNLRQKWGLNHILNDENAKTREDHRHHAIDALVMACTKLSYVQELSKWNRYNRTYDLKQFPLPWETFNYDAEKAVEKILISHKKVSNDITIRYKTVEKNGKKHTNKGVAARGQLHKETVFGKRIFNGEEAFHVRKPIESIETAKQIDKVVDETTRLLILKRVNELGGFVKDKVPANTFFVADENGVKQPQI

SEQ ID NO: 7719 - protein, 944 aa, unidentified
  REGION 1..944: note = Description of Unknown: Cas Enzyme sequence
SYLQTNLSLKLGVGRKDKNGNIPLDIMDILEISNKKNFEFIDSENSDDKILNGNKTLFAIYSICGEEKYNDLKNTNKLEKLWHILYMAKDDEWLKDILIWKWNFNSEIADNLISMGLEDGFGNYSTKVLKKIIPFMQNGSDEHDALILASYLKASDEVKDEIILKRKIKSLVNNELRNPVVEKAVGETIRLVNTLLKEYQIDQENFSIHIESTREFKKPKQQREEMRRANTDTDKRRIEYANFLNEKRDEGKLKFARQIQKNDSIIQKFELWLELGADKEEEQFDEFEKIVKRKDREKHTLWLECNRICPYTGKIINLTKLFSSDIEIEHIIPYSRSLDDSFMNKTVTFSEINKEKANQTAYEYIKGKGEVEFKKYKSRISFFDKNKREDKFLLEKVSADFSSNQLTNTSYIAKYVRTKLQEVCNDVQFTNGAATAELRKNDWKLGSLLDKVRYDEEYNTDIDKTIQEFRLYRNDYIAYLKRKANSTDIQKIDWKNLTPEITADYEAETKNPLYEWKSEIDKFDEFRSAKGKKDRSDHRHHLLDAIITALTTRRIIQKLSTLNALREKKGFSMYDDYGNVTREEINLPIEIDKIKFALNNVLIYHKPEQKLLTTKTNRIKLKKKNNDDLNFIKQKTFAPRGSLVGDNFYGKLKLPRLQGFDKDTVYVKRANLNPTNFPTISALDKIVDKKVKKILQLRLEKHNDKGEKAFSEEELMKNPVYMYSINEYPNGLPENPLSKKGKLLPVIKKVRVANKNTRNLIQLTAFEKDENNTKKIINENRYAEADGNYIMALYEHKKTDSKGKVTVKRDFEIVSFYQAVKRKTNKEKLYSDEKEQKDGTFFSLMKSCPFLKKDDFVVMYEKDENEIDWKNNNDLKNRLYKVTELGLNPTGDGYAVIKLVKHNKQKTVKDSYTRDGDFLKRSETIKAIKVKINNLGKIVKKYND

SEQ ID NO: 7720 - protein, 1022 aa, unidentified
  REGION 1..1022: note = Description of Unknown: Cas Enzyme sequence
KKNGEPKFEYQDIPLNGSLKQWLFDELQNKKEVSAKGFYAKLEKEGHIVKNQSFLNGIHRDAKFKGNETLIFLKKQLGEWFEKLNLDNTKNLISFWGLLYNSKGNEYDLESERCIEIKKYLTQNIDTIDFLDKLTVRFAKIKFARVYGSLSLKAIENILPLMRAGKYFESNFPEGIHKNIVKIINENQDDPFLKSLQDHLEKYQIELLQQGGMGNSFATILIYGKHTAQSFTGEDIQTPNEITFIPQGELRNPLAEQMINETLKMVKEIWASTNEKPSEIRIELARELKNSAEERGKISKANEDNRKINERVKQRLIELNKEISLGNIERYRLWSMQASEPFPTPTSFKEPTPSEIEKMRLWEEQKCISPYTGRPIPLSKLFDKGLYDIDHIIPKSRYFDDSLGNKVVCERGVNIDKGNRTAWEYFEVGSISENILSKENFSNHVNQFFHGKKRKSLLATKIPQDPIARQLKDTQYIATRVREELSKVVGSENVHTTTGGVTDYLRHHWGLTEKFKEITKTRFQTALTLIKDEEKKSNTKWSKRIDHRHHAMDALVVACTEPAHVHRLNNLNKELQDWLRINKDRVLKNFNGNDDELMDAFVNLSNESREKLMEEIKGFRNFDHPWKTFSIEAQKALEQIIVSHKPKEKLLIQKMQKGKDAYVKEMLRIRGKLHDATLYGLSSGKEAYKIKLSKLAGKQFATEKTIEKIIDPVLKESLKNHLHKYKGVKADAFSAEGINEFNKDRKVPVYGFKIYYKDQAEKFNISKLATKKVDGKLISEILERIIDDDIKNKIISHLDSFGGDNKSAFSKKGIEAFNKAFVKPISTIKLKSTQNDAEEEMDLSLLQLSRKTSYNDKLMISTGSNYAFAVLEKEGKRHYDEISFFHATKIVNEDFKKGSKNVNEIVSKYFENKNENSKLLYLLKQDEVVYLPSQDETAILDENHTDYYSFWNNKIERAKNVYLVVKFSGNRIYFLKHDIANVIANKLEFGSQNCYEKVNGVSIKEYCIKLKVDRLGNINPMK

SEQ ID NO: 7721 - protein, 930 aa, unidentified
  REGION 1..930: note = Description of Unknown: Cas Enzyme sequence
MKILGLDIGTNSIGWSFIENDIQNHTGTILGIGSRIIPMEGREKDFEAGTSSSKAAERRRTRGARRLLQRYKIRRTRLIKVLKSLNWFPENFPTDFKELENFNINELVPFNDKTIEEAKKVIGVINKRGEETLLTDWIVYYLRTKGLTQKISLQELARVIYHFNQRRGFKSSRKDNKDIGDSEEVKFPIREKNVEILKINSIIESTEKSRYGKIYVLNTTSSNGNSIEGTTIRRNKPDWLNKEIELEITKIISKSGDIRIELRLPDRTDWEKMKIALEKDIFESGLHPGEYHLSHLINDRNYRIKERIIDRSFYKNEFEAIWNEQMKHHPELSDKSKLQSVIDELYIHNEPKRKELLNKSLFKIINDDIIYYQRDLKSQKHLVSDCRYERKSYTGKSGKQQAFKVVSKSHPVFQEFRIWQDIHNLRIIRLEQKLPNGKTIFDIDETEIYLNFEAKAKLFKLFDSKSTVSISAILKELSSKEITLSEKTHRLNYPEDKEFKGNETKAVFRKVFKRHSYIEEGEALMNDKVRFELLWHIIYSLNDEKQIYSALTKKKNKKNIENKFQFDAELAKHIAKIPEFPSQFASYSYKAINKLLPLMRCGSSFWNEGNINLETQSRIEKIINGEFDENINVKTRDEIAKRNFKYIEDFQGLTTFLSCYLVYGRHSEKENENKYEAPSEIKTIEQGELRNPIVEQITNETLQVVRDIWNQYGRPDEIHIELARDLKKNKKERQEITSQNLKNEADRKRIIAILKKLDNTNPDSINDMEKLRLWEETSNWDARNSFPKFSKEPTSSEIEKYKLWGEQNHISPYTGKVIPLSKLFSNDYQIEHIIPRARLFDDSFGNKTICEAWVNSFKDKSTAMEIINEYGGRELEHHGKKFKLLAPDEFIQHIKQHFKGKKKWHFLSESIPEGFIERQLNDTRYIGKKL

SEQ ID NO: 7722 - protein, 1054 aa, unidentified
  REGION 1..1054: note = Description of Unknown: Cas Enzyme sequence
MGTNSIGWCLFILDEQGRPVGIRDIGVRIFSDGRDPKSGASLAVDRRDARAMRRRRDRYIRRRSALLEALIDTGLMPVDSQDAKALVGCDPYALRAAALDGALNPHLLGRALFHLNQRRGFKSNRKAERKAGDEKEGGKIAGGAKALDLAMQEAGARTYGEFLAGRDAKRVRMRAEGDGYDFYPERRHLETEFDAIWAAQAAHHPALLTDAVRDRLRRIIFFQRPLKAPKVGGCTFFNEEERLPKAHPIFQERRLYEEVNQLEITKAGAPSRKLSLDQRDKIILKLKSAKTASFSGMSRLLKLADGESFNKASENRTGLIGDEIFASFSDKKCFGDRWAHFEPGVQWSIIEKVAEEEDPVRLHEWLMTTHGVTVEQAEAIGRVRLPDGHCRLGETASRRILAELKNGVVTYDKAVEAALGKSHSDFRTGEVLDQLPYYGEILSREIPPGTLDPEDIDEIRWGKITNPTVHIGLGQLRRLLNAIINVHGRPDEIVVELARELKLSEKDKAEHNKRIGANTRAAEARSRKLLESDQRDSGSNRALLKLWEDLNPNNALDRCCPFCGRHIGQLALFTEETEIEHIIPYSRSFDDSAANKVIAHRSCNREKGNKTPWEAWGDTERWAIIAEQVSRLHKSKQWRFAPDAMERFDQEGGFISRQLTDTQYLSRMARTYLSSLYPDTAGVYVIPGRMTAMLRRLWGLNELLPDHNYVENPHSGAPKNRLDHRHHAIDAAVVGVTTRSLLNAISKAAGRAEDQNLDKLFVDLPTPWETFRDDLRDSLARVVVSHKADHGRKRAPAKGHDTTAARLHNDTAYGLTGLTSESGLPIVVHRVPLLSLKPADITDPIRIPDAALQRTLWEATDGLSGKAFEAALTRFSKSDPVFKGIRHVRVREALKVIPIRDLSGKAFKAYKGDANARYDVWRMPDGKWVSSWKDRDGKLHSGIISMFDAHQTDQLDQRPHPAAKRVLSLRQNDLVAVEPQGQPRKIMRVVKFSGGGQITFAEHQEAGALKARDATSSDIDPFKYFYSSAGGLQKAKARQIRIDELGHIFDPGPR

SEQ ID NO: 7723 - protein, 1474 aa, unidentified
  REGION 1..1474: note = Description of Unknown: Cas Enzyme sequence
MKKILGLDLGTNSIGWALVQQDFENKEGNILGMGSRIIPMSQDVLSDFGKGNSVSQTAKRTEYRGKRRLRERHLLRRERLHRVLKVLGFLPEHYAAEIDFEKKLGKFIGDKEPKLVYNKSEFLFKESFNEMIADFSQLQPHVLTNEKGGQKLVPYDWTIYYLRKKALSQKIKKEELAWILLNFNGKRGYYQLRSIDEEFTEDDTIQVLTLKVLDVEKGEKDKRYNKYWYTVTLENGYTYQAAFYGDVSSWKGTYRDFVIATDVLKDGSTKHRISFLPTFEEIDKLDKVAQSKLYGKIKIKTENEIDKSSKTVGVYIYDTLLQNPKQKINGKLVRTIERKFYKDELKQILKKQMEFHTELQNGDLYNDCVRELYRNNDAHQLLLSKRDFLHLFMEDIIFYQRPLSSQKSSISNCSLEARTYKDKNGIAQTQALKVVPKSNPYYQEFRIWQWMYNLSIYKNEDDTNVTQEFFSSIVDWENLFEFLNDRKEIDQKTLIKYLLVQKGFKGKQLSASIELYRWNYVLDKSYPCNETKTLMKTRLAKVKDLSSFHLTREIEQSLWHLIYSVTDKIDYEKALASFANKHKLDEATFIDAYRRFPPFKSEYGSFSEKALKKLLPLMRIGKFWTWDAIDVNSKDRIGKIITGEYDENIKDRVREKAIHLTSENQFQGLQLWLAQYIVYGRHYEAASLNKWNSAEELASFLQAFKQHTLRNPIVEQVVTETLRVVKDIWIKYGNGAKGFFDEIHIELGREMKNTADERKRITSAVTENENTNLRIKSLLLELMNDSDIENVRPYSPIQQEILKIYEEGVLNSDIAVDDDILKISKMAQPSSAELKKYKLWLEQKYRSPYTGAIIPLNKLFTAAYEIEHIIPQSRFFDDSFNNKVICEAAVNRLKDNQIGLAFIKNFHGQIVECGFGHNVKIFEVEAYEDFVKQHYAKNRSKRNKLLLEDIPDKMIERQLNDTRYISKYISGVLSNIVREDKNDDGVNSKNVLPGNGKITTELKQDWGLNDVWNELILPRFERLNQITNTTHFTTWNANHQKFLPTVPLELAKGFSKKRIDHRHHAMDALVIACATRDHINLLNNKHAKSKERFDLNRKLRQFEKVAYNHPQTSERIVRDVPKTFLKPWSNFTIDAKRMLEGVIVSFKQNLRVINKATNHYEKWVEKDGVKTKEVHAQKGVNWAIRKPMHQETVSGIITLNRVKIPNGKILTATRKSLNSSFTPDRIESITDTGIQNILKKHLASNGNNPELAFSPEGIDEMNKNIKKLNGGKNHQPIFKFRVFEIGNRFLLGNKQNKSSKYVQSKEGTNLFYAVYKNDGTKIGRSFETIPFNEVIEHQKWRATLDSDTMKRTPLFPLNSQRGRFLFCLSPNDLVYIPTEEEIENDSKIDLLNLTLEQKYRLFLVNDFSSTCYFRPNHVAKAIAPKEVDMNFDVSKSKLTGSYDIKTASFDGKQIKDICIKLDVNRLGQIVVNNK

SEQ ID NO: 7724 - protein, 1352 aa, unidentified
  REGION 1..1352: note = Description of Unknown: Cas Enzyme sequence
MKKILGLDLGTTSIGWAFIHEGEENETSKIINTGVRIVPLTTDEEADFKKGNTISINADRTLKRGARRGLQRFKQRRNALLELFKAIKFISDGFVYAENGKETTFLSYQVRAKAATEKVTKEELVKVLLMLNKKRGYKSSRKAKTIEEGEAIDGMAIAKELFENNITPGQWIFNSLSKGGKFIPDFYRSDLQKEIEKIVKFQNKFHSEINNVLIEDLKGKSRTLTSQHFTKTLKIELAENKGSREETKLQHYRWRNEALETKLDLKVLAYILTEINNQINQSSGYLGAISDRSKELYFNKLTVGQYLFNQLKENAHSRLKNQVFYRQDYLDEFETIWQTQATFYPELNDKLKKEVRDITIFYQRKLKSQKHLISHCEFEKGHKAIPKSSPLFQEFRIWQNLNNIVVKNELTKEPFLLSEELKKQIADALTFKDSMSDSQLIDFCGLKKNSHIVNFKKIEGNRTNTVLFKAFEKILIYEGYDELDLSKLDADDIVKIFKSAFEDLKLPTELLKFDASIQGNEFDKQPYYQLWHLLYSSEEDESLKQTLINKFGFKPQHVPFLLNVSLQADYGSLSAKSIKKILPHLKDGHIYDKACLMVGYNHSSSLTKEDNEKRDLKRKLDLIKKNSLRNPVVEKILNQMVNVINAIIEDPTMGKPDEIRVELARELKNNNEQRNEMTKTINKSTAEHEQIRKLLHTEYGIARVTRNDIIRYKLWKECDGISIYTGKPIEASKLFSKDYDIEHIIPKSRLFDDSFSNKTICERQLNIDKSNKTAYSFLKEKLSTEEFDQFEKRVKSLFGKISRTKQNKLLMADNEIPEGFIDRQLRETQYIAKKAKEILLEVSRTVTSTIGSVTDKLREDWELVEVMKELNWNKYHKLGLTVEEEGKNGERLYKIKDWTKRNDHRHHAMDAITVAFTKPVYIQYLNNLNARTKEDKKGAEIYGIETKYLKKDKNGKLRFIAPITNFREEAKKQLESILISYKSKNKVVTKNKNITKIKGGTLEKIQLTPRGQLHKETVYGKLKQYVTKEEKVNANFTADYITKVAKKQYREALLKRLEEHDNDPKKAFTGKNVLTKNPIYLDVDKTIIVPEKVKLVWFEDDYTIRKDITPDLKIEKVIDIGIKTILQDRLNEFGGDSKKAFVNLDENPIWLNKEKGISIKRVAISGVSNAQALHTKKDHLGNEILGKNEKPIPVDFISTGNNHHVAIYRDEKGNLQEEVVSFYDAVVRKNLGLSVINKSHEKGWEFLFSMKQNEFFIFPSESFNPSEIDLLEQNNYYLISPNIYRVQKLSIVKYGNTNIRDFVFRHHLETTVEDKKELVNITYKQIKSLAPLTDIIKVRLNHLGKIVQLGEY

SEQ ID NO: 7725 - protein, 1078 aa, unidentified
  REGION 1..1078: note = Description of Unknown: Cas Enzyme sequence
MAYLRYRLALDLGTTSLGWAMIRLNAENQPIAVIKAGVRIFSDGRNSKDGSSLAVTRRNARAMRRRRDRLLKRKARMMTALIKYGFFPKGEIERKALEQLNPYELRAKGLDEALTPSEFARALFHINQRRGFKSNRKTDKGASDTGALKTAINQIRSEMCVYPTISDGSSGLNLLAWVERKLPETANDMPRTVGELLFRRMQSGNTVRAKNNGLKNSKLKYDLYIDRKMIEDEFDTLWAKQSAINPQVFHEQARAELKDILLFQRKLRPVLAGRCTLIPHKQRSASALPTVQRLRIYQEVNHLRIKSIGLNKSKSLTQEQRDILVAALEINKKISFTQMKHLLKLSGADTFTHEDPKRTDFNGNVTTVELSNKNFFGERWFSFSYCLQDKIVHKLLNTENLENLCAWLVKHTDIDSITAHHIAENSKLVDGYGAFCWKASYQILQALQQDVTTYDKAVIKAGYPHHSVLEHTGESHQGIWMDVGESIDPNTGEVIKKEKFRFHELPKYNEPLKRFVGFGTRNPDDLPEKQFGKIANPTVHVGLNQVRTVVNALINRYGHPDEVIVEVARELKRAKDHRRAEFRVGAITEKNYRKDCSCAGCINIQQKLNKDVNQELRTHIKNIKGQNYKITDYDMDRMKLWHEHKNGEIVICPYSGTVLSVSKILSAEVEIDHILPFSRTLDDGRSNKILCIREANRLKTNLTPFEAKNLFAQQGWDYEQILSRVSHWSKNKRYRFDEDAMDVFLKDQTFLARALNDTRYLSRIAKEYLTLICPKDTRVIPGQMTAMLRDKFGLNDILSVNGKKNREDHRHHAIDACVIGVTDQPLLDRFAKANAQAQNQGLNRLVDNMPLPWETYQKHVKRAIDNIYVSHKPDHGYEGAMHEETAYRPPHRDPKGEWRTRGINGEKPNSKTPNSTGVISIKNTMNLPRYGKIDEVFKGYFGGNNYCMDIFKNGKGKWEAKVITVFDAYQICKTQGKDFFQKSIAFNGLPLIMRLVTNDCIRMKVDGIHPDPVLKIKKMRSDRHKVTVVAINEANESEREKEIELYFDDLSANQLYQRFARKVTISPIGEIRDHGFKE

SEQ ID NO: 7726 - protein, 1257 aa, unidentified
  REGION 1..1257: note = Description of Unknown: Cas Enzyme sequence
MKTILGLDLGTNSIGWALVKQDFDNKKGEILGMGSRIIPMGQDIKDEFGKGNSISKTADRTRFRSVRRLRERGLLRRERLHRVLNVLGFLPEHYKNDIDFDKRLGQFLDEKEPKIAWRKNSDNQFEFLFQQSFLEMAAEFKGLKVPYDWTIYYLRKKALEQVITKEELAWLILNFNHKRGYYQARGEEGDDNPLIKEFVIALKVVKVEKGEVDKKNSTRTWYKVLLSNGWEYSATFTAEPKWENIEKEFLVTEEYDEDGNIKVVKDKKNDNSGKEKRRISILPTFDEINLMAKKDQDKIYGKIKSRTEATIQNSNTTVGAYIYESLKQNPTQKINGKLVRTIERKFYKDELKQILEKQIVLQPQLFTEDKYNDCVRELYRTNNAHEQTLLKRDFVHLFLNDIVFYQRPLRSQKSTISNCPLECRQYIKSENNEEVRLKAQIKVIPKSNPYYQEFRLWQWIKNLNIYTKDNDVNVTHEFLSDVVKYEALFDFLDNRREVEQKALIEFLLKQKLGLKKTPKTEVDKYRWNYVEDKKYPCNETKAQIKSRLDKVLGVPEDFLAEELLHQLWHIIYSVTDKTEFEKALRTFAIKNNLDIDTFVSSFKNFPPFKSDYGAYSEKAIKKLLPLMRMGKYWKLEGIYEKTQNRIDKIITGEFDEEINNRVREKAINLTHTTHFQGLPEWLAKYVLYGRHSETIDGIKWKSVLELEEYLNSFKQHSLRNPIVEQIVTETLRVVKDIWVHFGKGAENYFDEVHVELGREMKNTADDRKKMTQQVTENENTNIRIKALLMEMMNDANIENVRPHSPMHQEILKLYEEYAINSDEKFVGKDANGNDLFVSEVTPDDIIKISKLAQPTKSELIRYRLWLEQKYRSPYTGQMIPLGKLFTSAYEIEHIIPQSRYFDDGFSNKVICEAAVNKLKDKQLGLEFIRNHHGEIVPTGNGKEQVRIFTEEEYVSFVKEHYAKLRGKKTKLLLDEIPDQMIERQLNDTRYISKFVNSILSNIVRSDNNDDGLNSKNLIPGNGKITSTLRQDWGLNDVWNEIILPRFERMNFLTQSTAFTTKNREGHTIPTIPLELSKGFQKKRIDHRHHALDALIIACATRDHVNLLNNQSAKSENTRYDLQHKLRNKDKWIDHNGKERLKFASFQLPWPSFAKDTKNGLEHIVVSFKQNTRVINKTKFAGLTYKESKEKSNNMNWAIRKPMHKDTISGKVDLPWVKVPKGKLLTATRKNIDTSFDEKTIKSITDTGIQKILLNYLK

SEQ ID NO: 7727 - protein, 1031 aa, unidentified
  REGION 1..1031: note = Description of Unknown: Cas Enzyme sequence
MKFKKRYRLGLDIGTNSIGWCVLQLSDDDQPIGIIRAGSRIFSDGRSPKTLASLAADRRAARQMRRRHDRVLKRQTRFMDGLIRFGLMPNDDDERLALSALDPYELRHKGLDEPLTAFELGRALYHLAKRRGFKSSRKSKGENENEAGKIATAIGKTRERIAAAGCRTMGEYLAKRHEQRETVRARTTADGKEYLLYTQRAMVAEEFDALWAAQAPHHPNVCTEAARAFLRDTLLFQRPLLPVQPGRCIFETEEFREPLWSPLQQQFRVLQELNNLRVIEGLEERPLTLDERNTLRDALYRKREMTFAAIVRALKLPKDTRFNLESEKRKGLKGDVVASQLGVENSLGDAWFAMSRQQQRDLAELIDIIDDTEELKSRLMDGPWRFDAAIAAQLAKARLPEDYGSLSRKALEKIVPILDADVITYDKAAQKAGYNHSDFYTGEIFERLPYYGEILRSYTSPTPKAKDPNERTFGKLANPTVHIGLNQLRQLVNEIIRRWGHPTEIIVELARDFGLSGQKRRDLEGEQAKNQGRNEKLNQRLSALGQRENRENRQRLMLWDELGREDANDRHCIYSGQRFSMSQLFDGTVEIDHILPFSRSLDDSLSNKVLCLSRANRDKKNSTAFEAFGHSPSGYDWKEIEERAARLHKNKAKRFKENALQNFLGEKDFLDRHLTDTAYLSRVARQYLTAVCPPNKVWVATGRLTAMLRQKYGLNEILDPEHKGKNRDDHRHHAVDAAVIAVCDRSLIQRISTAAKKAEADGENRLLKSLDVPWVGFREELAEVVRRIVVSHKPDHGREAGLHNDTNYGQRGEPNASGAMLVSVRKPLTALTPKNVDAVADPALRGELKKLLDGLSGQELKAALDAYTIRTGVRRIRMEERLSVIPIQDRATKQPYRYVKGDGNYCYDIYRTENGKWNGDVVDIYTANQPDFDPKSKTAYSSGKSLVMRLRKGDILKLEHDGRFKLMRVALFSRNGVALHEHNESNVDARDRDRENSFSYIRKGADPLRKLGARLVGVDILGYINDPGFKE

SEQ ID NO: 7728 - protein, 1200 aa, unidentified
  REGION 1..1200: note = Description of Unknown: Cas Enzyme sequence
MKTILGLDLGAASIGWALINEQKNKISIVDLGCRIIPYEGTEGKDFTKGAGESKNALRTKYRTARRGYDRYQLRRKYLVNALVKSNMYPDETLKNLPKDELWELRNKAVYSQITLKELGRLLLWFNQKRGYKSSRSDANVSKKDTEYVSLVKSRYEKIKELNLTIGQYFYKELSKNPFFRVKENVFPREAYIEEFDTICNTQKAFYPDILSEDFISKLRDEIIYYQRPLKSQKGLVSVCEFEGFWKVGKDGKEYFVGPKVAPKSSPIYQLSKMWENINNIKIGTRNGQNIELTIEQKQAIFQHLDNNEKLTVTDLLKILHIDKKDCFINKQIEKGILGNITKHAIQQCFDKSKEYNHLLSLNLNTIETEKQGYLIDKKTGEILNEKPIRYIDSNIEKEPLYQLWHTIYSIQDTQECSNALQARFNIDPDIADKLAKIDFNKHGFGNKSAKVIRKILPYLMEGDKYSEAMSYAGYEHSDSLTKDENLKRKLLNLLKPIEKNSLRQPVVEKILNQMVNVVNAIIEKYSEKDENGKIIKYFKFDEIRVELARELKQSKEERNETDKAMSKRQRENEIIAKRLAEYGLRATRNNIIKWRLYEEIDNKEKKLNAICIYCGQPISLTEAIKGNNIDVEHIIPKSKLFDDSQSNKTLAHRHCNATKNDRTSYDFMKSKPAEVFDAYVERVNSLYSNFIINKAKRDKLLMPEEKIPNNFIDRQLRESQYIARKSREILQTICHNVWATSGPVTAELRHLWGWDDVTMNLQFEKYKELGLTEIVEWESEHGKNKHQKEVISGWSKRDDHRHHAVDALTIACTKQGYIQRFNTLSAVTVSEVEDAISNILVSYKPGKKVASAGKRKTGKRGNKKVVQTGIIIPRGALHEEGIYGSIQQYNKDAYTNEVNFKSHIVKKYKLGVGSQGFLFTGKETYEKKEVINKKTGEVDVKIIDKIQNVLSSIVDNGIRNAILKRLNEGFLNGTDYRDNPKKALENLKNLENSPIYLNKSPIITVRCFTGLSAVILIKKDKNGQDISFVKPGNNHHIAIYTDRDGNKIEHVCTFWHAVERKKYGIPIVIKDSSEVWDKIQMLPENSFPESFLEKLPEVHLRLELSMQQNEMFVLGMKKEEINTAIASNDKTAISDNLYRVQKLSEKNYMFRHHLETQIIDDENSKTSKRYINVRSLGALFNLNPYKIKINILGDIQTEEI

SEQ ID NO: 7729 - protein, 1485 aa, unidentified
  REGION 1..1485: note = Description of Unknown: Cas Enzyme sequence
MNGKKILGLDLGTNSIGWAYVTEGETQNESEIKQIGARVIQFDNFVSTTTGKESKEPLKDFAGGKGISPNAGRTKSRGARRNLDRYQLRRKNLIDVLIKNNIIHTNTTLNEDGKQTTFQTWALRAKAATEKIELNEFARVLLAINKKRGYKSSRKAKNSEEGQAIDGMGIAKKLYEENLTPGQFVFQNLKAGKKVIPDFYRSDLQSEFDKVWNFQKQFHPEILTDEFYKDLQGKGKNATSALFWTKYQFNTADIKDIDNDLKNEKTIKLHVRDQKKLQAYKWRNNAVSKQLEKEQVAYVLTEINNNLNNSSGYLGAISDRSKELYFNHETVGQNQYNQLLKNRHTSLKNQVFYRQDYLDEFEKIWVTQANYHPQLTDELKEEIRDIVIFYQRKLKSQKGLISFCEFESKEIEKDGKKKTIGMRVIPKSSPLFQEFKIWQNLHNVLIKKAGSKKRAIKKENQPSLFEEEKEIFELDLVAKNQIFEELNIKGNLKKDRIIEILGYKSKDWEMNYIQLEGNRTNQALFNAYLKILEIEGYNEELLKLSDKDEINVDELKTPASEIKEMVKAIFEVLEINTEILDFDAELEGKAFENQASYQLWHLLYSAEDDIKKYSEEDMLLYGNDNIGLKKQLCSKFGFKPEHAKILVNVVLQDDYGSLSTKAMRKIYPYIKENKYSEACELAGYRHSKHSLTKEEIENRILKSRLDLLPKNSLRNPVVEKILNQMVNVVNTLIDKENGKLKSEGKEPNFQFDEIRIELARDLKKNAKERAEMTTNINAAKTAHEKIVKLLQTEFGLKNPTRNDIVRYKLYEELKNNGYKDLYTDTYIPRELLFSKQVDIEHIIPQSRLFDDSFSNKTVVFRKDNLEKGNQTAIEYIENKFGENGLISYQERIEALYKLWNKNNPENGISKAKHQKLLKRSSEIGEGFIERDLRDSQYIAKKAKEMLFSITRYVVSTSGQITDRLREDWDLVNIMKELNLPKYRALGLTEMEERKYGQQIEVIKDWTKRNDHRHHAMDALTIAFTKRSFIQYLNNLNARRNEKSDDTISNSKGRTAMDTNNLKLSTRDVLGIEEKETEIRTDDQGNRKRVFREPIINFRQVAKEHLENVIVSHKAKNKVVTKNKNKVKGSNKVQDALTPRGQLHKETVYGRYQYYDKKDEKVGAKFDKETIEKVGNPLYKRLLLQRLEDNGNDPKKAFTGKNTLDKNPIYLNAEKTEVLPEKVKLVWLEEDFSIRKDVTPELKIDKVIDKAVRTILENRLKEFGGDAKKAFSDLDKNPIWLNKEKGIAIKRVTISGVKNAEALHYKKDHFGKPILDKNGHKIPVDFVSTGNNHHVAVYRDEKGNLQENVVSLYEAVARVNLGLDIIDKPYKQSEGWQFLFTMKQNELFVFPNEKTGFNPSEIDLLDPKNKKEISKNLFRVQTISVVKYGNNIVRDFKFRHHLETTVNDKKELQGVTYQQIKSLEPLSKITKLRTNHLGDIVGVGEY

SEQ ID NO: 7730 - protein, 1422 aa, unidentified
  REGION 1..1422: note = Description of Unknown: Cas Enzyme sequence
MAKYLGLDLGTNSIGWSIRDNDVVDTVNQIIDYGVVVFKKGVGEGKSGEYSLAAERRTNRSKRRLYNAKRYRKWATLKVLSQYGMCPLSEEELRLWSIGNWIEISGKKKNAGRNYPTSPDFVAWLAMDFDKIGREWDGEKLSPEFANIYQLRISLLENNIPDDPYQLYKIGRAFYHLCQRRGFRTSRKNGNSAYGTNEYFDKAQKENPDLKAAQILQNGLTNENRRIRNSGVIQRRFFEEEFNAICDKQKLSATQKENIYKAIYYVRPLRSQKGLVGKCTIEKSKTRIPISHPAYEEFRALTYINNIKWRETGSKKLFESIPLSLKKNILEKLFFRRLEKGANKGKVHSESYFEFSEIVKHFSENFKYEFNFARYKNEKFELTSNPNVATCPVIAGLMNVFGSDWKNIFITDDKSYGINWEGLRLNYIARYNEIEKPKSLDYVAIWHLLYDFLQIKDQEAELVSFCENVLKWDKIRTSEFIDIGISQGYGSLSFTAIAKILPFLREENIYSEAVSFANLKCVLGAKDFDSKQEKAKIVIKSAIQKVEKEKQLLNITNGLIQGFFAENNTHRAKGFNSTIEEITFYNKEIESKLVAYFGVENWAAQSIEEKRMYQTSIFDLYICFLEGKQLREDKASFRSNKNPEIDYYKLPRLDECIKQELINKCDVSKKGLEYLYHHSDIEIYPKSKSGELENPNPPSKGWKNPMAMRTMYELRKVVNYLLQEGKIDVETKVIVEMARELNDANRRAAIQMYQKNREEENKEFARAILGVAKERYPNLNENDADNIDKVRLWWELLENSNIVYKQVKELKDDVAKYRIWKEQECQCLYTGKTIGITDLFDGTKFQFEHTLHLSESYDNSLTNLTVCDADYNMRIKKNQIPTQLKNYNENWGNYPAIEPKLKKWKDKVKNIKDQIEKNRKETKKATNSDNIKRKNELIQARHLLEFDLEYWEKKLQTFTVKQIPNWWKNSQLVDTQIISKYARAYLKTVFNKVDVQKGTITALFKKIYGIMGAEKKDRSKHSHHAIDAAVLTLIPGSARRDLILDEYFIALENRVKYRRDPYSNFHIDHVKNIENMVLANHVSKDQTLNSTRKYVRKRGNIQYIKDKNGVFATNENGDKIPKIMQGDGIRGKLHADSYYGAIKVNERINGFPQKADGKYKLIQKNGQDEIWLVVRKDIAKIDFEKDVIIDEVLKIHLLKQIANGEGLDKLVDKANNPIRHLRCRVKAGRGFLTKEKAIELKRHSHLSTKIHKQKVLAQNEENYLYLLYEGKKSSGETDRVGSILSLIKYSQLEISDLNEIWKDSTLNIINIKNSAIPLKYIIRVGTRVIFFTESKYGLKELSQRKLNDRVFNVYKFNEQGSPYIFLQNHIEARPDKELGDGDLAFQADKYQSRLKLKADKLSFIVEGLDFSIHPDGNIILNY

SEQ ID NO: 7731 - protein, 1290 aa, unidentified
  REGION 1..1290: note = Description of Unknown: Cas Enzyme sequence
AWLAMDFDSIGNEKDKTIKLKPAFENIYLLRSSLLETIDETDKNRLYKIGRACYHLVQRRGFKTSRKSGKSGYAKNEELEKLKEENPTIQISQILQSKLKTDNKRIRGSGVVQRKYFEDELFAICEKQEIANSLTDKIHKAIYFVRPLRTQKGLVGTCTLENGKTRIPISHPSFEEFRALSFINNIQWKETGSKDTFETIPIELKRKILENIFFKRNKKTGLVVDRTYFKFEDIIDEYSENGKKEFNYRNKPNISTCPVIAGLMNVFDSDWKDKFVIGENKLGINWAGLTLSYKVKYGKKLGHNRNLNYEAIWHLLFDLVQTKDKEDKDIEKFCSEVLGWQKEKIKLFIKIDIQQGYGSLSKSAIDKIIPFLQQGFIYSEAVSFANLSKVLGKELFESNKVAITKSISKTISEIDDKKEKLNIVNGLIQQFFAEFSTNRAKGIDNEIKSLAADEVEKKLNSYFGESNWNAKPDEIKKEYSDFALEKYLLFLEGKQDKAEKASANLTTNPEIDYYKLPRLDEAIKQTLQTKFNATDLGLKKLYHPSDIDIYPKAKYKKLEDPNPPSKGWKNPMAMRTMYELRKLINYLLEEGTIDIDTKIVVEMARELNDANKRAAIQKYQRDREEENKEFAKAIIGVAKIKYPNLNENDADNIDKIRLWWEQLENGAEIYKEVKALKEDVQKYRLWKEQQCQCFYTGKMIGITDLFDGVSYDFEHTLPITDSFDNSLTNLTICETNYNRNTKKKQIPTQLKNYKEDWNGYPAIEPKLKKWVDKVESLRKLIDDNKIRTKKIQDITAKNESIRKRHLLQFEFDYWDKKVKTFTLKEIPNWWKNSQLVDTQIITKYARAYMKTVFNKVDVQKGSITADFRRIYGIMGDEKKDRTKHSHHAKDAAILTLIPGSAKREDILKRYYADTRNFRTIPYEGFAISHIQNIDENILINHVKKDQTLSETRKKVRKRGDIVYLKDETTQQPLRDGDGNRIPMVMQGDSIRGALHEESFLGAIKIPERNSEGFSVKKDGKYLINQKNGEDEIWIVKRKSIVEIDPTKDIIVDELLRKHIIDQLNNGKKIYEIVDFQNKLIRHLRCRVKAGKGVLSKEKTIPIKGHIFPSKHQHKQNVLTKNEENYLYLLYEGENRKEEIVRGYKILNLFEIAGLGISSIDEIKMEPEFQKIHKGIGQNEIELKLKAIIKVGDKVIFYNEMKNELQELTSKELNKRVFKVIKFNELGPSTAYLYLQSHIEARPDVELEKGEKQLIFDKYQPRLELTCDKLNCAIENIDFKINSDGKILWLF

SEQ ID NO: 7732 - protein, 909 aa, unidentified
  REGION 1..909: note = Description of Unknown: Cas Enzyme sequence
MAYRLALDVGTASLGLVALNLNDESQPDGVAYSSLNIFSEPLLPAKSGGIGEPKKAARRLARQQRRLTERRARRLRRIAHLAPLIGLHANQVVPDDGQHIHALRADAIKQRIELAELLNVLIKLAKRRGYAGGFRVKKEDEEAGQVQGGIQNLQRLLADNDCTTLGELLHKRFGDTEHAGRGPRESLKLKSIGLYAHRDMLEEEFEMVWSEQAKHHPILNEDAVAYSVRGVAENLSIKQHFKDAIFYQRPLKSVAGMVGQCTLEPTLPRAPLSQPAAQLFRIEKQLADLRWGMGRMQRTLSKAQRDHIRAMLLDSEQLNKDGALTFGKIYKSLEKAGLRQEFPSQFNTDRFSRETLLGDRTTKAMWALGLLAPWTALDSVTQLRVINFIANLGSPESVDSVNWHERVEPVPKPEVVAFINHWVESGTFDRVSKMGFDTGRAAYSVKALKQITAKMQEGEGCDEHTAREVFYKPAEPTGELLMHLPQPASTGNVVVDVALRVVRQAVNQCLKTMGTPPTQVIVELSRDMALGLAARGKKEIAINKNRKARENAKRAIETSDPNKSASNNDIFRYLLWNEQESHCPYCSKRIELSEALDGNATNVDHILPRSLTQVKRERSHIVIAHRACNAAKADNVPLEAFKGDADRISAIENCANILKKKHSYRKANYLLAESYEAEKLNDKTLEDFTERQFVESSWIAKLVAHWMKDVCPNVSVSRGELTAQLRRAWKLETVIPQVRLETKVDPKSDKSDNHLPLFDDDKPAKPISREEFDRFRSCWENHHGPEVERTDRRIDKRIDHRHHLIDALVIGMTDRSLYMGMAKGYKERMEQRAAGVRGVKPWQTPEPPLRNIREVALKLVRETTVRHKTDRHPAGAFFDKMAYAKSYTDDGKSRVVRSVDLIDLADKSF

SEQ ID NO: 7733 - protein, 1402 aa, unidentified
  REGION 1..1402: note = Description of Unknown: Cas Enzyme sequence
MENKNELIVGLDVGSNSVGWAVVEMNGEHLERIHGMGSRIIPMGDEKKEFEQGAKITKNNTRRQKRSMRRNHQRYKLRRANLVKALKLMDAWPDGLGEQARANVPVLTPLQVYGLRAMAAVDPISLTELGRVLYHMNQRRGYKDIGDLMDEQDGAAPGEAKDDGKRIERVFIESVEVDDDKGKKVKYLVRLGDGREGTCTLETIKDMVGTEQELEVTTKKSKAGERYEFRLAQKTDWRKDMESINAAIDASGLTPGQFFHHQLKQDPFYRIRERIVLRDTFKKEFDTIWTRQLQAHAHLGDETLRDRVVKALIPNNLAEQAKWLRKDLGSFIRDYVIYYQRPLKSQVSNKGQCRFETGVPAKDGRKAIPPKPVMPVSSPIYQLFRIWQQVNNIRLIDKYAKEQELAASERVAVVEHLLQHPELKADNLLKVIGRKGEALENNLRANLPGHQTLAKLRPVLKKTALLKRLEQEAAQLKEPQNTLLFRIWHILYSIPMEQDRVDALKAMKEVPEELVEPLAKVRFERKHGAVSARAASRILPLMVCGDAWSAEYVHERDKRRIHEVIDKISTGEEIDRLPNEVRVRLAAYTSLDHYQGMPYWLAASVLYGDHRAATAKPFDRPEEIKPLGRGFLRNPVVEQVVNETLMIMRDIWSTYGRPTSVRVELARELRQNQKERARTFENNKNRDKARKEVVETLTKEFHRPKPSRKDIERYELWLQQGMTCIYSNKPINKSQLFDSRDTDIDHIIPQKVYYDDSIQNKVLVLRQENADKGKQLGALYMKSKGPGEYEAYVDRVNKLKAGRQKKKYLLAEQVPENFINRQLQETRYIGTKVTELLQPICTVKSTLGIVTDALKNEWGLDKVFKEILIPRFERLEGITGRKLIQEIPLTNGNKHKDWKIEGYDKRIDHRHHALDALVVALTRQGYIQRLSNLNQMDGSKEEKEAMKRPTWYPLPHPDLRTMVRTQLERAIPSIKNRKRLLTKTTNETRFLADATSGRTGLRKQTKGDLRAVRGPLHNEQPLGEIKEQHKWDVLKFFKQLKGEPDPIRLVASDYPREERLLAHEWQRQKVHEHLTRYDGNVEALMKAWKKDPIKGHNGEALKEVTVIERKYSKMRSLNPTFTASQLGMVIDRGLRRDLEQHILRSMPERSEKERLAVQLAFALYEKPEPSKKEEKQLAKFMDKGIERAFTVEGLQVLNRNRKVPLRQVKCKMDDALVDHALSRERLLKRGDLNRKRFVEKFEKYALVIHVDRTTGKREPEPVSLFDAVERTMKGHPIAEDRPNCKQFVLKRNSLVYVPRPGEEERDVDWADLDQIGQRLYRAVKFSTQNYFLPVTISTVVKLEASPASEQDEDGDENKAPREYGTQDCTEWVDSDNPRTKILERFIPVELDRLGRKIKPLQR

SEQ ID NO: 7734 - protein, 1030 aa, unidentified
  REGION 1..1030: note = Description of Unknown: Cas Enzyme sequence
MNTVLGLDLGVSSIGWALVTEKDGKKYITSMGSRIIPLSKDDSDEFSKGNAITKNQSRTTKRTQRKGYNRYQDRKKYVTTILKDNRMYPDDALFSLSGSALFGLRDKAVSHKISLPELGRICYHLNQKRGYKSGRADANMDKKDTDYVSEVKNRYQYIKDASITIGQYFYRQLKDNQHYRTKQQVFPREAYIEEFDTIMSEQKKYYPDLLTNEFVAELRDRVIYYQRPLKSQKGLVSICEFEGRYRPGKNGKDVFTGPKVAPKSSPLFQVGKIWETINSIRLVNKRGDEFEMPKEKKVELFEYLNQNEKLTQEKLFSILGLKKSDGWYGNKQTEKGIQGNLTVTAIKKILGAGTKFDEVSRFNIILVDAGIPTFVVDRKDGTVMGENTIKCVAPDCEQEPLYRLWHIIYSINDVAECTIALMKQFGFSAETAGRLAMIDFVRLGFGNKSAKAIRKTLPYLMEGHVYSDAAAFAGYNHSGSVTKDERAKKVLDDVLQLLPKNSLRQPVVEKILNQLINVVNAIIQQYGRPDEIRIELARELKQSREERNETYRSINKKEAENKKIAERIENEYRQLGVRATRNTIIKWRLFHEINNDESKINATCIYCGKQFGLTDALKGSSVDVEHVIPKAKLFDDSQQNKILAHRKCNEDKKDATAYDFMCGKGEKELQAYVERVNWLYENRCIGKGKRDKLLMPAEKIPKNFIDRQLRETQYISRKSVEILSKVCNNVWVTSGSVTERLRRLWGWDDVLMNLQLPKYKKLEGLTEIKEWETNDGQKHQIEVITGWTKRDDHRHHAIDALVIACTRQGFIQRINRLHAQQNRDEMKAEVDRLGAAARNGLTLLDRYLIMQRPFTTGQVENEAAKILVSFKPGKRVATKGVRKVKVDGQKEIVQRGIVVPRGPLSEASVYGKIKTIDKNKPVKYLLENPHLILKPYIKQLVEQHLQQHNGDVKKALIALKKEPLYLDDDKTIPLTYGSCYKEEVVIKYPIETITAKDVAYIVDDRVRLVIQNRLDEYGGKEKEAFKTPVW

SEQ ID NO: 7735 - protein, 1210 aa, unidentified
  REGION 1..1210: note = Description of Unknown: Cas Enzyme sequence
MEKTIALDLGTNSIGWAIREGWREEKQISNWGVLTFDKGVATVKGNEKPKVADRTEKRGKRRNYQARKYRKQYLLQLLIENSMCPLSIEELNTWRKYEKGRSYPKNQAFTNWLRLDFNADSIADYDNPYQLRSDVVNEKETSLFAIGRALYHLIQRRGYKASDEDNDKEAQSIHKGSDEKGTKGHDEIKPLLIEHQTLGAAYATFHKYKDRIRNRYNLRTDVEIELKAICNVAGITLNSDLFQKFYKAIIWQRPLRTQKGNVGPCTLEKGKIRCQISHPYFELYRAWGVINNIKIKPKGSSKSGFQPLSAEQRAQVLEQVFMRKEAYFDFEDIAKKLDKKGAFDFNYRNNQNISGCPVTAYLKAIFGDNWKGLQFAKQASEKSKKAHYDLEDVWHVLSTFNSKDKVEEFGKIKLKLDEDQAKQFVTLFTKMPKGYGSLSLYAIKKILPHLEAGVSYHEAVLSANLSKVLEKKLSVDETLKISNDISEAVKGFETERNINEVVNSLIAQHLELPEYERYCGDEKYVLDDSNRTEIEQKLISNFGEQTWNDTAIDRQTQIRETVSSLYQDYLRKAANAKDKFVKTKRRDERVKALLKDKYGATDDGLKYLYHHSAIDIYPISKENEEGKRYLQSPMPPSKGFKNPMAMKTLYKLKLLINYLIKTNQIDDDTKVVVEVPRELTTANKRVAYEKWQRDRQAENKEFARAVIEIAKEKHSNLKAENPEDIDKFRLWFDQLENRDELYKKIVALKNDIDKYRLWKDQECRCIYTGKVISLSELFNANKYDFEHTIPASLSFDNSLANRTVCDINYNRQEKGKRIPFELANYEKDTPQYTAIAPRLKAWKDRVDDLNDKIKEYARKAKYASTKEIKDACIQKRHYYEFDLEYWGRKLWTFETKEFKATWRNSQLVDTGIVSKYALHYLKTSFNKVYVQKGEVTAIFRKIYEIQGDWQTKSRDKHSHHAMDAAVLTLVPTGHKREKILEQYFEAQESEQKFHAKPYAKFEQSEVKQIEDNTLINFLSEDRSLLPAKKYVRERGKRYFEKDEDGKKHFFIATGDTVRGQLHKESFFGAIKEPLRDESNKMQRDVSGKILQKDEVRYVIRKELKAGELGFTTKEQLEKIVDPVVRRKVLEHVGDRSLKEAFAEVIWMNKEKGVRIRHVRIFVDRITDPLEVKQHEHAHLSSKEYKQHYFAENGGGANFKYAIYRTEEKGK

SEQ ID NO: 7736 - protein, 1043 aa, unidentified
  REGION 1..1043: note = Description of Unknown: Cas Enzyme sequence
MAISGAYRLALDLGSTSLGWALLRVNSASEPTAVIRAGVRIFSDGRNPKDGSSLAVTRRAARAMRRRRDRLLKRKARMMDQLVRHGFFSADAAERKALEHLNPFQLRAKGLHEALTPGEFARALFHINQRRGFQSNRKTDRKDNDSGALKKAINQLREQITAHGCTTVGEWFWQVRMEQKPGGVTGQGVRARYRETPHTTDEGKKRIDKSYDLYVDRAMIAQEFDALWAAQAALQPGLFTEVARADLRDTLLHQRPLRPVKPGRCTLLPEEERAPLALPSTQRFRILQEVNHLRLLDDSLRELPLSLAQRDAVVAVLEGKNKMSFEQIRKLLKLSGTVQFNLEDAKRTELKGNATSATLARKELFGAAWAGFDTALQDEIVWQLVNEEGEGTLVAWLQQHTGVDEARAEAIANTALPEGYGSLSRKALARIVPELQRDVVTYDKAVQAAGFAHHSDLGFDFEYAEDEVELVGERTIASTGEIKPVYAFKQLPYYGKALQRHVAFAKENPRNDEERYGKIANPTVHIGLNQVRTVVNALIRRYGRPTEVVVELARDLKQSREQKQEAQKKQADNQRRNTRIRERIAETLGISPERVRGSDIQKWILWEELSFDVADRRCPYSGVQISAAMLLSEQVEIEHILPFSETLDDSLNNRTVAMRQANRIKRNRTPWGARADFEAQGWNYDGILQRAERMPLRKRYRFAPDGYERWLGEDKDFLARALNDTRYLSRVAASYLRLVCPQGVRVIPGQMTAMLRGKFGLNDVLGLNGEKNRNDHRHHAVDACVIGVTDQGLMQRFASANAQAREGGLTRLVEDMPMPWPTYRDHVERAVRHIWVSHRPDHGFEGAMMEETSYGIRKDGSIKQRRKADGSAGREITNLIRIAEAAQPARHGVNVEGQPLPYKGYVGGSNYCIEITVNDKGKWDGNVISTFDAYRIVRTSGWERLRNGAQGQSGQPLVMRLVIGDSVRLEVDGKDQIMRVVKMSASGQVFMAPLREANVDARNSDKHDGFAYASKMAGSFQKAEARQVTISPIGELHDPGFKG

SEQ ID NO: 7737 - protein, 1068 aa, unidentified
  REGION 1..1068: note = Description of Unknown: Cas Enzyme sequence
VFTRLALDIGSSSIGWILYELIDGAPIRILDGGTRIFGDGREAKTGQSLAVGRRGARAMRRRRDRYLRRRSVLMKRLAEAGLMPTDPNQAAELASLDPYELRARGLDRALPPSHLGRALFHINQRRGFKSNRRTDKASNEGGLIADASARLDQAIMASGARTYGEFLHMRRQSAGDARAVPAVRTRINPHLVGEDGKEQAGYDLYPDRHHLEDEFRALWKAQARHNPDLTDELRDVLFETIFYQRPLKAPLVGRCLYQPEPRLPKAHPLTQARTLYETVNMLRVVSIGQPKRRLTRDERDKIIFALNGKTPAKSPSSNKLTLVALKREIKLRPDESFSLETAMRDAIACDPVRMSLSHPDRYGPQWSALPPDAQWQLIQRLRDEQDGEKLILWIMERYGFDRARAAAIADAPLPEGFARLGETATRRILAALIGGTADQPVATYNEAVEFCGWHHSQLGTGEVLDSLPYYGQVLDRHVLPGTAEPGDDDVTRFGRITNPTVHIGLGQVRRLVNRVIEAHGRPHEIVLELARDLKMSEDQKRKLTQDNAKNQRSAEQRSVKLIEDLKVADTGTNRAILRVWEESSDDVLKRCCPYTGARISATMLFDGSCDIDHILPYSRTLDDSFNNRVICLKSANREKRNKTPWEAWGNTSQWPAIEANLKSLPAGKSWRFQPDAMEKFEGERDFTARALIDTQYLSRLAREYLECLYADALKDGRRPIWVVAGKLTEMLRRHWGLNSLLPDAHRGTAKAKNRQDHRHHMIDAAVIGATDHSMVKRIADMAQANVENGLEELAGTIPPPWPSLRDDLKTQLLHTTVSHRADHGRIDPEGKKQGRDSTAGQLHNDTAYGLTGETLNNVPLVVTRKPIDNLTPAMIEKIRDPHLARLLMLATKGKDGKDLKSAIEAFRTHSGPYHRIRHVRIIEPVDVIEIRNREGRAYKGYKGDSNQYYEVWRLPDASLTHHVVSTFDAHQGRETKPHPAAKRLMRFYKGDMVRLDGSKFGPTIAVVVRFDTNGTIALVAHNESNADQRYRKDKEDIFIRLRPSSLINSGARRVIVDEIGRIRDPGPK

SEQ ID NO: 7738 - protein, 1132 aa, unidentified
  REGION 1..1132: note = Description of Unknown: Cas Enzyme sequence
MPTNETTMSPTASSLIFGLDIGIASVGWAVLSPERIVDLGVRAFDKAETAKEGDSLNLVRRTARLMRRRLWRRAWRLTKLSRLLKRNGLIADVDWMRTQPTFSDSTWALRAQGLDRLLTATEWARVIYHLCKHRGFHWVSKAEEAAADGDASGEGGRVKKGLAGTKALMTDKGYRTAAEMVLAEFPEAQRNKRGNYDKALSRVLLDDEFRQLFEVQRRLGNPHASDALELQVRGHGDRKSGLFWHQKPALAGSDLLKMLGLCTFEKAEPRAPKASFSAERHVWLTRLNNLRVVVDGLSRPLNERERQIALNLPYESGEKFTYKNLRTVLVKTCGLSEGFRFGGLSYPSASQTEEQKAKNPEDQPLVKLSAWHTLRLALKNAGLQNVWLQLSTPALDGHPDTLDQIGWILSVYKEDGEVQVELQKLSLPQAEQTIAVLLGVRFDKFHALSLKALRKIVPLMAQGLRYDEAVAQIPEYGHHSQLVKYDEAKTPYLPAFYQGRNASGTMVFREDLDVPRNPVVLRALNQARKVVNALIKAYGSPMAVHIEMARDLSRPLDERREVQKLQDEFRDRNQKAREDFEAQFHRKPSGKDFEKWMLYREQGGQCAYSQQPLAPNGDCNSIFLDGATQIDHALPYSRSFDDSKNNKVLVITRENQNKGNRTAYEYLTSFEGGEDGPRWRNFVAWVNQNKAYRAAKRNRLLRKNYGAEEAQGFRDRNLNDTRYICKFFKNYVEQNLQLAPKEDGDSNRRCVVVSGQLTSFLRARWGLLKIREESDRHHALDAAVVAACSHSMVKALADHARRKEVEFLQQGFADPETGEIINPEAFDRGRRHFPEPWAHFRHELEARLKTDDLAALREDMRRLGSYSEADLQALRTLFVSRAPQRRNGGAVHKDTIYAQPERLKAQGGVVQKVALTSLTLKDLDKLADPHRNAKLYAAIRQRLEAHGGKADKAFGHDKPFYKPGKDGQPSGPVVRTVKLEIDKLSGIPLRGGVAKNDSMLRVDVFTKAGKFHLVPVYVHHRVTGLPNRAIVAFKDEEEWTLIDESFGFLFSMYPNDLLRVTLKKEVRFGYYSSCNRTTGSIDLWAHDRAHAIGKDGLIQSIGVKVAVALEKFSVDVLGHIYPAPPEPRRGLA

SEQ ID NO: 7739 - protein, 1222 aa, unidentified
  REGION 1..1222: note = Description of Unknown: Cas Enzyme sequence
LLYPNNISHQKTIKELDFNHLIKEDILLYQRDLKSKKSLIADCIYEKENYERTDGKTGKKYKNPLKAIHKANPLYQEFRLWQFIKRLNIVKKEEVVNDEMKINMDVTAQLLTSNIKEELFDFLNDKESVTEKDILGFLNKKYKELEINSESYKWNFTSEKEPCNPTRYNFILRTKRIKGFDYRAFLTPENEYCLWHFFYSVKKKDEFTKGLSNIINRLLENSGLSKEFHAELVKNLSSFGGYTNDYGTYSEKAIKKMLPFLRLGKYWNEKDVEAILSKANQEVKQKVLDKEEINGELKDFQGLWVSSACYLVYGRYSEVGEVQFWQSPFDIENYLKNEFRQHSLNNPTVEKILVETLHVVKDIWKYYGEEIGTDEEGRVIYNKLFDRIHIELGREMKKNSKQKEKDDKNNKENRKANERIVELLRELKKSNSSLQEKSPFQQEKLRILEEGLLSSIEYDKDNVEYTNTNELNSDYPKFKITKKEIKEITTKELSKINRSDFERYKLWLDQRYQSPYTGKFIKLSDLFDRKKYEIEHVFPQERITLNALYNKVICETEINKEKKASTGYGFIANAKSKKVFCAAHDTHVEILSIDTYEELVKSNFTGRKRDILLSKEIPKEFTNSQLNNSQYISKMAMKLLSNIVREKDEDTYRSKNVLATNGTITSTLKRHWQLSDAWNEIISPRFKRLNELTNSNLFGDYREINGHKVFINTVPEEANKNFDPKRIDHRHHALDALIIALTTENHVNYLNNISSQEENDEEKLKTRKGYKFQLTNSRKGFNDETEWYFLPPAQIKTKDGIDEFDYQFGETKSKVFKEVAQNALENTIASFKQKNRVIRQRWNKYFKPIDGKIKIETQEGLKEVINYNVRKRLHEDTFYGKVKLQNKIITISLEKALIENFDLVDAAISKEIENLIQNEGTSTQKIIETLKIKYPKLNVYEKYVATRFGNELESLASIPSDKIIKAIQSITDTGIQRILENHLDKYKEVIDGKTKFDTENAFSSDGIKELNRNITELNNGKFHCPIYKVRTSDAMGTKFSVSEEGQKSTKYVVTAAGSNAFCGFYQNGKDRKYYIPTLRESFECLKQGLEPCPASHPEAPDYELIFVLNPSDLVYVPTEEEIENPNLVNFSKMKKEQINNIYKFTDGSGTTMNFIPVNIASVLFNMSNKDQEKSGIMLPIQNELGLGSPQSKNQNSSDHVPIQIKSVCWKVKIDRLGNLIKI

SEQ ID NO: 7740 - protein, 1351 aa, unidentified
  REGION 1..1351: note = Description of Unknown: Cas Enzyme sequence
KAATERIEHNEFARVLLSINKKRGYKSSRKAKNEEEGQAIDGMAIAKRLYDENLTPGQLVYQNFEKGNKVVPDFYRSDLQNEFDKVWSFQKQFYPEILTDELKEALRNQGKENTRKRLLAIAKVYTADIKDFSDDFKNKFVQKFSKLDVKLFKKIQAYKWRSEVLTQQLKIEEVAFVLTEINNNLNSSSGYLGAISDRSKKLYFNKETVGQNLYYQLLKNRHTSLKNQVFYRQDYLDEFEKIWETQAQFHLVLTPKLKEEIRDVVIFYQRKLKSQKSLISICELESKKVLIEGKEKEIGPKVAPKSSPLFQEFKIWQVLNNVLVRRKGSRKKKVIDTQPTLFEEEKEIFELSLEAKQAVFEELNLKGNLKSDRIIEILGYKPKDWEINFTELEGNRTNQALYNGFLKILEIEGYNEDLLKLSDEDNIDISKLKTPASEIKEMVKQIFEVLEINSKILEFDAKLEGKDFEKQASYQFWHLLYSAEDDTNKYSDEEKTIFGNENVGLKKQLCQKFGFKPEHAKILNNITFQDDYGSLSTKAIRKIYPYIKENNYSTACELSGFRHSKNSLTKEELENRELKPRLDLIKKNSLRNPVVEKILNQMVNVVNTLIDKENNKLEKEGNPRNFQFDEIRIELARELKKNAKERAEMTTNINASKILHDKIYKTLQYEFHVPNPTRNDIIRYKLYEELSTTGYHDLYTNKYISRDKLFSKEIDIEHIIPQSRLFDDSFSNKTIVFRDENLKKSNRTAYDYIEADYGNEKLDEFVNRVENLFKDKIINKAKRDKLLKKATEIGDGFVERDLRDSQYIAKKAKEILFEITKVVTSTSGSITDRLREDWDLVNIMKELNLPKYRALGLTEMEERKYGQKVEVIKDWTKRNDHRHHAMDALTIAFTKKSFIQYLNNLNARTEEGGQNRIKNSKGISDLKLSTNDVWGIETKELYRDEDGKLKFKLPIENFRQVAKEHLENVIISHKAKNKVVTKNKNKITGKDKAQEVLTPRGQLHKETVYGKYHFYNQKDEKVGPKFDLEMIDKVSNPLYQKLLLERLSENSNDPKKAFSGKNALSKNPIFLDEEKTKTLPETVKIVWLEEDFSIRKDVNPDNFKDEKSIDKILDEGIKRKMKTRLNEFGGDAKKAFSDLENNPIWLNEKQGIAIKRVAISGVKNAEVLHYKKDHFGKLILDENGKKIPTYFVSTGNNHHVAVYRDEKGNLQENVVSFFEAVERVNQELPIIDKSYKQDEGWQFLFTMKQNELFVFPNEQTGFNPAEIDLLDPKNKKEISPNLFRVQKFSKVVYGNSAVRDYVFRHHLETTVDDKKDLQNITYKSIKSLGYFEGIIKVRTNHLGDIIGVGEY

SEQ ID NO: 7741 - protein, 1357 aa, unidentified
  REGION 1..1357: note = Description of Unknown: Cas Enzyme sequence
MEKIIGLDLGTNSIGWAIRDIANTQNQIIDKGVLTFDKGVAEDKSGEHPMVQKRTESRGKRRNYQAEKYRKWQLLELLIENKMCPLTIEELNEWKHYKKGIGRKYPQSKNFIDWLRFDFNSDGKPDFNLFDLDKHESYYVFRKLVISSDKKHTTVFKNNPKIVGRILYQLVQRRGYNNLQDIEEDEEAKKESKTIMEGGGDSGAIGVNEIKPYIEKYKTLGAALYHIQKETNTRIRKRYNLRSHFEEEINEICKVQQIEHLSDKIKHAIIWQRPLRTQKGNVGLCTYLKNKRRCPISHPFYEEYRTWIFINNLKIKPIEKDKISSDLMPLNDVLHKIVYPVFYKVSSDFKLSSINKELKKVGYQIGAKFPEDTKVISCTLLNTFKEIFGENWKEKLDWQNAFENKIKSSNCKYSLEDIWHLHFSKGANKKDKIQPHIYLKDFAANNLQLDEDKANRFTKIRLQQGYATLSLNAIKRILPYLQQGFLYSHAVYLANIDKVMNLKNLTIDDINNFSEIINDVIIEDKRERIKYEIINGLITQYFENKETFIFNKLEVIQQKIIDTYGQKTWERFGLQLQMNIENEIIKDIELFINAFKGKPETHFLKTARLHDKIFKHLQDTYGIPQENIKYLWHPSEQETYPNAPIKNDKKLLGSPEPISKGFKNPMALKTMHQLKHLINYFIENDKIDESTRVVIETARELNNANERKAIERWQRDREAENVKYKKIIQEINNDPNCKANYNENDKNLIDKIRLWEEQNRRCIYTGNPIGLCDILDGTKYDYEHTVPASMSFDNELKNLTIADKKYNQQIKGKKIPFDCPNYDTDYTIDGITYTAILPRLDIMKKKVEDLQKQYEEWKSKTSDKKDIKDNIIIKRHYIKFDLNYWRHKYNSFTQTEYKAGWRNSQLRDTQTITKYALPYLRTVFNKVEVQKGTITAEFRRIYKIQPRFEKKERTKHSHHAIDAAVLTLIPPAAIRDKILLRYNEDKERGISYHEKPRQWQNFETHYILDIENEVLNNFQTKNRTLTPTFKNVRKRGEIQYVKHKDANGKWHYRLDEKGNKIPLVAKGDSIRGQLHKESFFGAIKNEGTLNLVERYPISSFTSIKDCNHIVDKNIQKIVQTVLENRISNGLSFDKAKLEPISFPNGNTIIKNVRCKVAAGRGYLTAEKAISIRQHDFKSKNDYKNSVYAQNDSMELCLYYEGKIADNKIERAFRIVSLFELSQLKLNNLIELYQLQGYKNIEKKKNSIPLVSIINSGQRVILYKESIEELKDLEKSNISEFLNRIFIIYKFNEITPTKYIYLQNHIEARKNDILGNGEKEIDLTKYQPRLYLTSDKFICAIENKDFEFNKDGSIKWLI

SEQ ID NO: 7742 - protein, 946 aa, unidentified
  REGION 1..946: note = Description of Unknown: Cas Enzyme sequence
MLRLGLDIGSTSIGWWLYRLNQGAIAEVVDGGVRLFSDGRDPKTGVSLAVDRRNARAMRRLRDRYLRRRASLMRRLGTAGLMPNDPEQAKRLEALDPYRLRAEALDRPLALTELGRALFHLNQRRGFKSNRKTDRGNNEGGKIADGTARLDQAMLAAGARTYGEFLHLRRSKAGDARTVPSVRTRLTLRQGEGDKAEAGYDFYPDRRHLEEEFRNIWTAQAHHHDTLTDDLRDTLFETIFFQRPLKAPVIGRCLFYPEPRLPRAHPLTQERVLYETVNALRIRTEGGSALPLSKEQRDTVITLLNNKAPVKIISSAKLSLKAIAKHLRLRDGQSFTLEKGREDIACDPVRASLSHPDRLGPCWSTLDRATQAELVQRLRDDSDDAALLAWLMDRHGLDEAHARATCDAPLPEGYSRLGPKATQMILERLKAEVLTYDKAVAACGLHHSDRRTGEVLEALPYYGEVLQAHVIPGTGEPDHDDITRFGRITNPTVHIGLNQLRRLVNRIIERHGKPTEIVVELARELKQSADQKAEAMALNAKNRKAAEARSALLYEWGVPDNGANRMRVRLWQELHPDPAMRRCPYTGVMISPTMLFSGECDDDHILPYSRTLDDSTANRTLCLQQANRQKRNKSPWEAQRDGMRIWALEDGNLRHLPEFKRWRFAEDAMARFEGERDFEARTLVDTQYLSRIARDYLDTLFTEGGHVWVVPGRLTEMLRRHWGLNGILQDPLRDVTKEKNRMDHRHHAIDAAVVAATDRSLVKRMADQSRLDIEQGREALASSVPHPWPGFRDAVAAQVNRIIVSHRTDHGRIDPAARAKGRDQTTGQLHLDTAYGLTGLSEKGVPLVVTRKPFDSLTHAMIDKVRDVPLKAALKLATAGKDGKAFAEALATFRSRIGPYRNIRHVRLIEPVSIVEVRDASGRSYKGYKGDSNHCFEVWLLPDASI

SEQ ID NO: 7743 - protein, 919 aa, unidentified
  REGION 1..919: note = Description of Unknown: Cas Enzyme sequence
MSELTLGLDIGCSSVGWALVDEQAEKIVAVGVRVFPEGVDRDQQGGEKSKSQSRRVARSMRRQIARRARRRRLLRDALARVGLLPKDSKEQGEVLGKNPYELRRRAVSEKLDLHDLGRALFHLSQRRGYLSNRKTDAAKASDQKGMLGEMNELAAALKNTRRTLGEHLAILAEEAGNRRGVDSVRLRNRHTRRDMYEDEFEAIWEAQRRHYPELLTDALKYGIQGKQPYPKKPDRVCKSTDVLTEYGLHGIVFFQRKLMPPKAAIGRCELERREKRSPRAARIAQRFRIVQEVNNLRVLDYTTRDERPLTPEERSIVIDYLADAKERTFEQIRKRLQLPERSRFNLEQGERKKLDGHKTDAALAGKNGIGKKWPQLPGATKDAVVDILLGNESDEVTLQRLTAQCGLDADEAKRAIRVALPDGRASFSRVAMENLAPHLERGLTLMADDAANSAIHAAGYCRPDEREPNQRRFLPKPPDITNPIVRQAIAEVRKVVNAILREHVHRGGHTLAKIHVELAREAKKSFEERKELRFENARRRDDREDAAKAIEEYDATVKPSRATVNRYLLWQEQGESCVYCGQKISPSQLFNGDTDVDHILPRWRSLDDSMANKVLCHRVCNHDKGDRTPREWLEEADPERYDIVLRLAGKLPYNKQRKFQQKDIELKDFVARQLNDTAYISRSVSQYLRCLGARILCPRGQMTSELCHWWGLNNILDPTKSDKKNREDHRQHAVDALAVALTTDKRLHALANARGKDMPFPWPTFREDAERAVLAINVSHRALVGLRGAFHKDFFYGATQKRSAVAGTPAIARPWATDWTENASTFVRRRAVTELKSTNDLADVRDVTIREVLKQHLRNLPGGGIDPDAATKIPGDAFKGANVPRMPSGVPIRKVRILEHGTTFRPASKKRSYQFVLPG

SEQ ID NO: 7744 - protein, 1244 aa, unidentified
  REGION 1..1244: note = Description of Unknown: Cas Enzyme sequence
MKKILGLDLGSASIGWTVIAEDIENRKTKCNILGMGSRIIPYEGTEGKDFAKGTGESRNSLRTKARTARKGYDRYQLRRRYLADTLAKNQMFPDEASRNLPKMNLWELRDKAVHSPISITEFGRLLFWLNQKRGYKSSRSDANLGKKDTEYVATVKSRHEKIKDLDLTIGQYFYKELSANEFYKVKENIFPREAYIEEFDTICKTQQIAHPSVLTNELIGKIRNEIIYYQRPLKSQKGLVSVCEFEGFWRIGKDGKEYFVGPKVAPKSSPLFQLAKMWENINNIKIGSRTGDDIKLTTEQKWAIFQHLDNNEKLTSADLLKILNLRKENCYVNKQLAKGLNGNITKQAIRQGVGGSDKYENLLKLELKIVENCLYDKVTGEIFEDIPIKFIDPSVEKEPFYQLWHTIYSIQDQEICSSVLQTKFNIEQPIADKLAAIDFSKHAFGNKSAKVIRKILPYLMEGDGYSEAMSYAGYDHSNSQTKEENLQRKLLDQLKAIPKNSLRQPIVEKILNQMVNVVNAVIEKYGKPDEIRVELARELKQSKEERNDADKAMSKRQRENDAITKRLEEFGLRATRNNIIKWRLYEEIDNQEKRLNAICVYCGQPISLIEALKGNDVDVEHIIPKSKLFDDSQSNKTLAHRHCNKNKNDLTAYDFMKGKPEAVFNEYVERVNKLYASRVIGKAKRDKLLMTESKIPDNFIDRQLRESQYIAKKAREILQTICHNVWSTSGTVTAELRHLWGWDDVTMNLQMAKYRELGLTHQVEWESEHGKNKHKKEVITDWTKRDDHRHHAVDALTIAFTKQGFIQRFNTLSAAKTREDMMFDVEQRSLEFREKRSLLEKYIIGEQPLSVEEVEKAVSNILISFKSGKKVAVWGTRKIGRRGSKEVVQKKIIVPRGALSEESVYGKIKKQEEKDYKYLFENPQLIFNPYIKAKVEERLLMFDGDVKKAIASLKKIPIYLNKEKTVVLEKATCLKDEYVIKYTVDTNFNKVDKVVDSKVREILRDRLKKFGGKEKEAFKDVQLEDKTVIKWYDDEGIERPIKSVRCFTGLSAVVPVKKDENGNDIGFVKPGNNHHIAVYTNTEENKQQHVCTFWHAVERKKYGIPVIIKSTNEVWDKIQTEPDGTYPESFLEMLPPPNLNLLVSMQQNEMFILGITTEDIMTAIEQRDYRLISDKLFRMQKMSIKPSSGQIDLVFRHHLETQLVDDENSKKSKRFYNVQSLGAFFALNPYKVRIDNLGDIITKE

SEQ ID NO: 7745 - protein, 1060 aa, unidentified
  REGION 1..1060: note = Description of Unknown: Cas Enzyme sequence
MGICMTLRSILRFAFDIGTNSIGWAVLVGTTTLARGETRQGQATEITGVKALGAHVFSDGRNPKDGSSLAMMRRVPKASRRRRDRYLQRQRKLIHVLIGHGSLPAREGERKRLERLDPYALRARGLDQCLEPYEFGRTLFHLNQRRGFQSNRKADAKDKESGVLKEVAKRLAEALTQNGSRTLGEFLHKRLARGDHARFRLTGVGTKAAHEFYPTRDLIKQEFEALWTAQVAYHPEILTPEARENIADAIFHQRPLKQVKPGRCTLNPNEERLPAALPSAQARRIYQQLNELRYGIGFTLNGTLTPALRDALASKLLQGKSVTWDQIRKELKLGSTSRFSREEIDDKIQGCETTKRLVGSAKKKAFGNAWHAIPLERKDEIVAKLLNEEDEETLIAWLRTDCGMDPEAAASVAGMSLPDGYGRLGKTANAEVLTELKKDVVPYAEAAKRAGYHHSDFTNEEKLDRLPYYARVLERHVAFGSGDPNDTEERRYGRIANPTVHIGLNQLRRIVNKLIATYGRPDEVVIELARELKLNKKQKDEADRKNKENRAANDKRKQQLAEIGIDDNGLNRILLRLWEEQRDGAHSFCPYSGTQNSVEQLFSEEIEIDHILPFSRTLDDSAANKVVCYHETNREKRNRPPYVAFGHKTTWSAIEANAQKLPYNKRWRFAPDAMERFNTRERDFLDRQLNETKHLSRVAKEYLECVAPDVWVVTGNLTSLLRHKWGLDSILGDNRKNRDDHRNHAVDAAAIGCISRSILNKLARRAGQTETLEERSRIADDSPNPYETFRDEARNLVRKIIVSYKAEHAKGGALHEDTAYGLVRDDKERKIGNLVYRKALTALTSKDIERARDPDLGKKLLAVRDAAQAKGEKLDAALIAFAEKEAQAVEDRTGKPRNPIRHVRLLKPEAANVEIKDRSTGEPYKAVVPGENWCMDIVSLKDGNGGHVWKGFAASAFEVNQNGWRPQWERDKIGGKLVMRLHKGDLVEIDDKDGERRIKKVVRLSPSNGIVYLVAHNEAGDYQKRHDDLDDPFRWDFANIGGMRARAARQVIVDELGRVS

SEQ ID NO: 7746 - protein, 1532 aa, unidentified
  REGION 1..1532: note = Description of Unknown: Cas Enzyme sequence
MKKILGLDLGTNSIGWSLVNQDYENKNGEIIGLGSRIIPMSQEIINDFNKGVSISQTASRTGYRGVRRLLERNLLRRERLHRVLNILGFLPKHYAAQIDFEKKLGQFISNSEPKLAYKGIKTSENKIQYEFVFKKAFEEMLEDFKIHQPNLVLNEKKVPYDWTIYYLRKKALTAKIEKEELAWLLLHFNQKRGYYQLRGEEEEETPNKLVEFHTLKVADVTADEQQKGKTDIWYNVILENGWIYRRASKTPLFDWKGKVQEFIVTTELNDDKSIKLNKDGNEKRSFKAVDSEVDWVAIKKSTEEKIDKSKKTVGCYIYETLLQNPNQKIKGKLVRTIERKFYKDELKQILEKQVQEHPELKNSALYSACIEELYENNTAHRENIKGLDFIHLFMNDILFYQRPLKSKKSLISDCPFEQRTYLKDGKKEIQSIKCISKSHPLFQEFRLWQFIQNIKIYQKEKIIDGKTHSDVNVTDEFLTCEEDYTNLFEWLNERKDIEQKAFLKYPAFNLKKNSENYRWNYVEDKSYPCNETHNAIVNRLSKVQEVHSNFLTKEKEQELWHILYSVEDKIEIERALKSFAIKNNLSEDFADVFKKIKPFDKDYGAYSEKAIKKLLPLMRMGKYWQEEAIHSQTKNRIEKIINGEVDEKIRDRVRDKAIHLSTINDFKALPLWLTSYIVYDRHSEDSNAMQWKKPEDIENFLKEFKQHSLRNPIVEQVITETLRVVKDIWKTYGNGDANFFDEIHIELGREMKNPADKRKDMTNKMSVNENTNLRIKALLSEFLNDTTYENVRPYSPSQQEILKIYEEGVLNSDIEIEEDILKITKSNQPTKSELNRYKLWLEQKYRSPYTGEIIPLNKLFTPAFEIEHIIPQSRYFDDSLSNKVICEAEVNKDKDKSTAYEYIRDNHGKKIELSFGKVVTIFGEKEYEDFVKRNYSKNRGKLTKLMMEEIPESFIQRQLNDSRYISKVVKNLLSSLVREDDEQESTSKHVISCNGNITNELKKDWGLNDIWNDIVSPRFERLNDLTKSTNFGEWTNKNGKRVFQTQVPLELQKGFNKKRIDHRHHALDALIIACASKNHVNYLNNQYAKSETTRYDLQKKLRRHEQIEITDKKTGEKKKINVAKEFFKPWDNFTIQAKESLENTVVSFKQNLRVINKTVNYYQSFKNEDGSLRLNKNGMPEKEIVKQAGNNWAIRKPMHTPMPYGKRNFDFDILKISENIGKREHIIDEDIKKKVNTIYEECGKKTIAAQNFIKQNPIQNNEGMPIIETAFKISVAKFRKRQPISKLSNRGQGGIKTPEDMIKFINKVADSKLRNDLLAHLNASNNDIELAFNSDGIDAFNSKRKNPVLKLPIAENGDKRFSLGNRIGSKHKWMEAAEGTNLFFAIYKVEKGKRNYETIPLNIVIENQKQGALQNIKPELCSVPNKNEKGDSLLFHLSPNDLVYVPTNEELENPNLVDLKKLSKVQQNRIMKFVSCTGGEGHFVPNYYSSPIMKNEIGTNNKSEKTFDGIQIKSVCWKIKTDRLGKISIVLK

SEQ ID NO: 7747 - protein, 1208 aa, unidentified
  REGION 1..1208: note = Description of Unknown: Cas Enzyme sequence
NKGDDKVKKLYSKIKKELKNEIEFEKIKTFIITEFNKPENLGKVMSGIGALSKEMEGFPTMGCYFNSIYSKKEKESGLINKIRGRYTHREDHYEAEFFYICEIQNITGELKDNLHKAIFNQRPLKSQKGLVANCTLETKRKRIAISHPLFEEFRMWESINRIKIIREVGGKLDFLNKDEKDLIKNEFLQITDFEFGKIANKLSKGESYCYIKLPEEVYLKGKKVETESDAVISFNFPMDKKFSACPTTASLKKAIGVEEYSKMTFLNTGYNDEKGKKQLSIEDVWHCLQMDVFGTKDKKTIRREFAEKHLKLDDKSIESFIKTKLVKGYGSLSKSAIRKILPFLIKGEIYTNAVFLANITEVLGRKVSENEEQQISEKVKEALELFRIEKQNKGIVNNYISKFKKSKEPFSLGNNTFSIDAHKKGLDYEIADWIGELQLNKLENEEILKITTNCWNLFYEVVYDKSPKEINYLTTKTIPEFILEVLKRAFPNDKIDVTKLYHPSAMEAYPKADKKLGNPEISSIKNPVFNRAMHQVKRLCNELIRNGLVNKDTEVNLEVAGEINSASYRRALSQWQKEQETIRTWAKNKIIGLNPIEKRSEIIPTATEITKYILYQEQNHKCLYTSGKEICITDFLGGKTTYDIEHTIPRSKFNDNSLKNKTLANYDFNRNYKKTTLPALLNLNFNGIDINKKIILQNRDKYLKSYTIKGDEITWDVSLSTLKFDYKKFKNAAKAITDAASHDEVMTKAHYTKFKLDYLREKYRNFEIEEINNQFTNANLVDTRIIAKYARAYLNSYFNKVNVVNGKITDTLRKIWGLQSEEEVKDRSNHIHHCIDAIVVACIEKGTANWISEVYHNYESDYFKGNSNPRIDVKKPMVDFVKRMKDLHKEVLIYHKQTDRIKPLLLQAQKENAKKLNLRGKLNSQNPYAHIKKNDELIFAKREKISNLTIKDVENIIDEGIKKRILNFASEVGLEAFIKESSKTGFMILPKYYDEEKQRDISEMIIKRLRLKSSVSNLKDYKKIRAIDQKRKFEYKHDFYFDKDSYTNYEARIYGDLIPNNPGKKIPFTNRTSSLINNYNIVKNNFPKETEKTILKLHQGDMFLFFDETPEEIEWGNSLDLQQRLFKVVKFTENKEKGEIKQIIFERHNYALGNVDYAVSTSENNLSDMNGVVLRKSVSALRVVPTKVNTLGKIDIEFSKEFINLNSK

SEQ ID NO: 7748 - protein, 963 aa, unidentified
  REGION 1..963: note = Description of Unknown: Cas Enzyme sequence
MKKILGLDLGVNSIGWALIDEDEPSILGIGTRVVPLSSDDKNDFIKGNAISQNQKRTIKRGQRRGYDRYQLRRNFLIDCLSKNNMLPDDSLKNLPKLELWELRASAVDKKVSLPQLGRILLHLNQKRGYKSNRKDTSKETKETDYVSNINTRYEHLKQNNLTIGKYFYSELSKNQYFRIKQLIYPRDAYVEEFNSIIYNQQKYYPDILTDELIKTIRDEIIYYQRPLKSQKHLVSICPFEGFYIDNPIKNKNDKIFVGPKVAHRSSPLFQVCKIWESINNITINHKHIPSYQIPLDKKFEIFNYLNNNETLPLKDLLDILSLDRKDIYSNKMLTKGLQGNLTRVKIINCFKEFADEFPFENFSHLFTFDINIINNDEERFLVDRKSGEIVNSKNYKIVSPDVEEQPFYKLWHTLYSISDDSACINSLIEKFHIPLKIANKLVNLNFSEWGYSNKSHRAIRKILPYLMEGDVYSDACSYAGYNHSFSLTKNENINRQLLDKLNLLPKNSLRQPIVEKILNQMINLVNSIIDHYGKPDEIRIELARELKMSKDERNDYYKFINANESINNEIANRLKKLNLPVTKRLIDKYKLIFPINSVIDKSGKFSKSKFDSATVINQCIYCGQSFNLSQALSGLDFDVDHIIPQSLLFDDSLQNKVLVHRKCNADKLNSTAYDFMRSKGEDAFNDYLTRIDLWFKNGIISYSKLERLKLSYEDYLKRKASNKTTAIDEKYWESFIQRQLKETQYISRKSREILSNICHNVWSTTGSITAQLRHIWGWDNVIEDLRIDQLRNFGLTTFQEYFDNDKLIKKEKIINWSKRDDQRHHAIDALTIACTKQSFIQRINTLNSTNTKNEIQFNIDISNNKNSSPEKLLENYILSLRPFSTQQVSSAVKNILVSYKQGKKLATYSRRIIKKNNKKIIIQNKILAPRGALSEESIYGKIKIIDKNKPLKYIFTNPHLIVK

SEQ ID NO: 7749 - protein, 1337 aa, unidentified
  REGION 1..1337: note = Description of Unknown: Cas Enzyme sequence
IFPAGVDESDEKRGDPKNAKRRATRRSRITLARRAQRKRLLRLKLISVSLLPADAAEFKELLQDTDPWELRRKALAVALSPFEFGRVLLHLAQRRGALGLRIIDPDDPDATDSDREDGKVKKAIGEVQSQMRKCGARTYGEFIAQLRDTSVTQITTPDNRPKGRRNGPREYRSAVRNKAGSYKHCADRTMIRDEFAKLWEAQKRLGGPLAEILSGELRLALDDDARNSDWRHKGLLFGQRMQTWDLGTLGRCVLEPTERCVAHADSIASRYLVVETINNLKIIERGKQPRSLAIAERSKIKNFLSEPLGEVTRGKQKGQPKRSVTVTDLRDLMGWGNASKTSAFRFNIEADKERSINTDWFSREIIHGAITAAKWQQLSLRSREGINRAILKHDPDDETHDEKLKALVMQEWAGLKEAQADLLVAAWKKRPRPDAKRLSMSRRAVRNLLTVMDRDEPWPDADQPGETRWLTQIEARKRIAKDENFLDVTTGNPLDEHARRRYVTGTKGATARDRHYMKKHLLMKNKEPVYGPDGLPLHEPPPAPLISNPVVRKTIHEVRRHIIDYLTNLGCKPDEIHVELAREAKMGKKDSDRVLFMNRLRNRIRNDIIDVHGLSAVSATQQRAAVERVVLSVQQDGVCPLCGNQKIKTKITPRMAANGEGCEVAHIIPKASGGHNGLGNLVLAHTACNRDMGRRTPRQYWEATLSGGFDEGFRWIEGIYADIQRPSPWTVNEVSGDALWLCYFAGGPSRWGPTYDGLKIGQFKKDIKDIQEMTERQGAATKYAARQVMTYLADALYDGKGLPERSTGTEQNPETRRIFANDGLWTSRLRREWGLFFDRHGAKAHGLTNEQEHELKEKNRGDHRHHAIDAIVIALCSERVRKAWDARELAADQADINTANEEAMDNYRRQHPLPLPMAYKSRDELRAAVQLAVFGEGPLERPVAHRPVKRKLIGALHEETLFGPVVDRAGSLTANFSAKKSVLQLDPNHLRRPRRETEKKAIERLALLRLKEKSGDEKTARKWARSVVSSLGYQPAIVDPPPGKSGIVRDIALRLRIRDCLSGFQYAKRNKNGEQVGEARSINPDDFTDYEIKQAFEAGAICQASGVPINTVVLLRTMSGPVVIDRKRPDYATGKMVHDDDPASKRAYLGGNNHHVEIRVAKNKKGDEVWSGQIVTAFEAAQRKLTKLRAFREAGIPKLKVLRKLSKAERAKFHAELRRIETAHPVIDRCENVDNGGKFVMSLCEGEMLKMKHKQTGEVGYFVVAKLDKPQSIVVVPHWDARAATERKGSDGKKVADSKREQFAVTPSDLKDLAPPGEDHAVKVRVSPLGKLVVLTD

SEQ ID NO: 7750 - protein, 1016 aa, unidentified
  REGION 1..1016: note = Description of Unknown: Cas Enzyme sequence
EADGKLVAMGSRVFPEGVDRDQTGSEHPKNEQRRIARGMRRQIARRSRRKGVLRRALVECGLLPSEREQQRELDLLDPYDLRRRAVEEKLTPQQIGRLLIHLNQRRGFLSNRKADRARVKENSEMLAEISELAGKMGDQTLGQYFAEKRDESPLERVRGKHTLRQMYLDEFEKIWETQRVFHSDLLTDELKYGRRGKLSYPREPEPLRKRKSNSLLREFGLHGILFFQRALYWPKSVVGRCELEPKQKRCPKGDRVAQRFRLLHEVNNLRIIPQRGEPRDLTPHERAKVIEFLAKKKERTFDELRKCLGLLEGDGFNLEAGDRRKLQGIPVDAILARKDLFGKAWYERSDREKNQIVRSLIDEGEESARFKATTEWGCSAEVAEGLIDTDLGQGYMAYSREAIEKLLPHLERGLPLTSRDEKPSALSEAGYLRADQRVPHQRDDLPLVPEDIVNPLVRQALFEVRKVVNAVIREYGKPAAIHIELAREVKGTSFTRARDSVRMRERERLRDDAAEQIRNWGYKVSHDAIERYRLWKEQGEICLYSGTPISPHQLLGGQVDVDHILPYSKSLDNSLANKVVAFRSENERKGQRTPHEWLAETEPAKFEAILQRAAKLPIDIRNNKRLKLQQPTVELDHFLNRQLTDTAYITSKVLEYVRCLGCDIVASKGQCTYELRHMWGLDGVLRDDGLELKNREDHRHHAVDALVIALTNRKRLQELARVRGTDQQLAPPWDSFRHDAQDLVNTILVSHRVSRRVSGALHNAKPFGPTSKPSRANGMDRPHAKNWMESEGQFARRVFLEELTTAMVKAIRDPQVKELVLERMKEHGIVPETATKLPRDLWKTPLLMIRKRGRTSLAPHVIKKVRILENDQTIRPIRQGTAYVKPASNHHITLFELPGSTAAKPKRDLVAVSMIDAIERVKRKVPVIERDHPTISDAKFLMSFSLNEMLLLQHKGNEVLCRFESAAGTSHQMWFRIHTFAGKSADKRGQISKKPSTFEAVKVTVDVLGRIRRATD

SEQ ID NO: 7751 - protein, 1131 aa, unidentified
  REGION 1..1131: note = Description of Unknown: Cas Enzyme sequence
LNPKRKYHLTKNEWRGWCKTFDVLPVLDSHDKAKPGAKAAGESDSAKKSKDDDAVEKPSTQGRSRYSRPALRIVRELVLGGDAPIVLHDKLVSAAPDFAAHIGLDVLKNAPLIEKQDNKGNKFTVYEKRERPWVLVSDLEFLLRMGKDGKPADSWMDLYIPSQQLDRLAQQSSATREERDAAIRALIGQQNNPIVRHRLDTFWKRLRVLEAMPGTDGQPLGEPHRIIIEMVRDDSESSWLGPKAIQEITDAQKKQRDRRENARKRLAELEQPHGDVLRYMLWEEQGAQCIYTGDALPFTDLGKYRIDHIVPRAMGGPDSNSNRILTTDPTNARKGDQTPYRWLHSTPDWDAYCKRVNDPKNKLGEMKKRLLLSADAEMLVSRYTPLAETAWITRLAQTIASLHFGWANGNDATGTKRVVVISGGLTGRVRRKYFLNSLLGSDRALDEKITTVLDQLAALRTSPLPREEVKEKRRELRDELSELGKQAEKDRSDKRHHALDAMVLSFLEGWVNDPKREEEFRFTVLGDAPAFPEIRKSEIGILRQRIIALGVAAADKTKTPEQREELQRQITTCHDALASMRQPHEARVIREALRREIVGDVTAGILPILPRALNFTKQEPDASKYRGVWLHEEDEAATEQANRPVWKTTRTPLGELAYQMNWRTRKKEFSATHLQRMVAQIVANDGYDAEALRSVLRAFVEAKTEPTVEQWKQFYQAPGTRALWTARGKAGEEMKVVHYSLVEKRTKRPQLTPSDRASLYSLAVGGKLVKVFDREIYESKVGRMVLPPPKGILPEALKLEPDVLLREKLLRLLPKIEAHYRQHRPNPPKRLRQPADKAAWELQKKTAEAALAQTLAKENLKPDQRVWFATFAEGVTDQPCKKGTLRTVLLADVPEFSADSAIEKVKYISDLWTRFQVREFLKRLPSTDEWKEYCAELIQVPRAQFQEFLAGNPADAQAFIKFYHREGEKQSKSGRVPVAIKAVHCMENDPPFFFDASKDQSGIFATGRNHGYWIWKQRVGPSDEDFAYGAEVVRIFESEHLVKERLVEEGKEVCDSKLWRGGMLLRLLESCVNEDSREKKAIRAGYYFLGSISTQGRNQYAELLEMEGGTNTGKFPMRLLLRNKLQRVIQT

SEQ ID NO: 7752 - protein, 1098 aa, unidentified
  REGION 1..1098: note = Description of Unknown: Cas Enzyme sequence
MSNYRLSLDIGTNSIGWCALALETLNGRQNPDGIVDMGVRIFPDGRNPKDGSSNAVNRRMARAARRNRDRSVERRNRLIAALVTFGLMPEDGNQRRKLTELDPYELRNRGLREKLYLYELGRAIFHLNQRRGFKSNRKSDAKDKEAGAIKSALRDQQNAMLSAGARTFGEYLYLRRQDGESVRSRLKTKRIADAKGKEKNQDYYDFYPGRELLENEFDTLWQVQAEHHPSVLGKEARDKIRDIIFFQRPLKPQVVGKCTFERLEDRLPRVFPIAQRCRIYQELNHLQVLDTRTLKGTPLTLEQRDKLAALLCQPNGKKSGKSEVSFDAMRKKLHLGEESIFSLESEKRKGLEADTTSALLSHKDRFGPRWYQIPVEGQEQIVGALLYEDDEEELISQLMENWEVDRKRAEEIACTPLPVTYGRLGITATRKILAELMQTVIPYSEAVVRAGYASHSQLSSGKQWERLPYYGEVLERHVAPDPEQAGDPRATLEKRFGKVTNPTVHIALNQVRKVVNEIIKLYGPPAEIHVEVLRDLKNSLERKKEITAEQAENQAKNDECARRLRQEFGLPVNRENIQRIRLWTELKAADRVCPYTGETITEHNLFSEEIEIDHVLPWCRTLDDSMANKILCKRRANREKSNQTPFETWGNAGYWPEILARSAVLPKNKRWRFADDAMQRYMKDRDFIARQLTDSQYIARLAREYLAVLFPADEAHKVVCLPGRLTGLFRHHLGLDEILDEINPGRKDSPVPKGQKNRNDHRHHAVDALIIGLMDRAFLQRAASISARLEKEGVYKMLENFPEPWANFHATAREALGKIIVSHKRDHGIAAALHNDTAYGFAKRPDNRGNAVHRVAVKDLEVTNLLAIKGKSLRAELFAHLAGFSLETAFKNLETLDDNKRKGTQALKEAIGLDDKEIAVRIQAFFHDRGIRHVRVIEEIELVPIRNQRGLTYKGFKPDGNAYLEVFKAASGPEWESEIVTSFAANAQGNGNHMTSGDTTEAPRRKVIRLFRQDMIEIEHNGQRHIFYVQKMSKATIALAEHFEANADSRDRDKKDSFNFLRKANAELLRKAAVRFLVVTPAGRVRYLSGERDDSESG

SEQ ID NO: 7753 - protein, 1568 aa, unidentified
  REGION 1..1568: note = Description of Unknown: Cas Enzyme sequence
MKKILGLDLGTNSIGWALVENNFEKKEGKINGLGSRIIPMSQDILGKFDSGVSISQTAERTGFRGVRRLNQKDALRRERLHRVLNILGFLPTHYSEKIDFENHLGQFKDGQEIKFNYRKNGSPKHEFIFQDSYQEMVAEFAENRQVLKIPYDWTIYFLRKKALSEKISKEELAWIILNFNQKRGYYQLRGEEEETNDNKIEEFYSLRIADVEATDDTNTKGTWYNVVLENGWIYRRQSTESLDNWVGKTKEFVITTQTEKDGTPKLDKDGNIRRSFRALNSEQDWIAIKKKTEKDIEESRKTVGQYIYETLIENPSQKIRGKLVRTIERKFYKEELAQILKTQTQFHKELQDRNIYKLCLEELYPRNEAHQNNIKDKDFMHLFINDIIFYQRPLKSKKSSISNCQYEFRTFNKLSEINENGVISKKEIKVDEPLKAIPKSNPHFQEFRLWQFLKNLKIYQKNAIVDGRPAIDVDITDQFNPDEDSWVELFDFLNDRKEIEQNQLLDFFVKKGIISRQEKENYRWNYVEDKKYPCNETKAHFVSRLKKVNGVEDCDLFLAEKTILGKKDGAIEMSKEQQLWHIIYSIHDKIEFEKALKTFAIKNEIDGESFVDNFRKFPPFKNEYGAYSEKAIKKLLPLMRMGKYWKHDGISLEILNRADAIMERLKVIGFDKNRVDEKIADDDIPKQILKSFCSFQDKNPCKGLNTFQACYVVYNRHSEASSITFWKRPSDIENYLAEFKQHSLRNPIVEQVVTETLRVVKDIWEHFGNGKENFFDEIHLELGREMKNPADKRKRMSEQVTENENTNQRIRELLQELVNDQNVQGDIRPFSPSHQEILKIYEEGVYQNPQTRYSKLSADEIDKIRKNASPSKNEILRYKLWLEQGYISPYTGQVIPLSKLFTTEYQIEHIIPQSRYFDDSLSNKIICESEINQLKDNQTAYSFLKNEYGRLIELAQGKTVKLFTLEDYETHCNNYFKKNRPKLQKLLSEDIPESFINRQMNDSRYISKLVKGLLSNLVREENELEATSKNLVPVSGAITSTLKKDWGLHDKWNEIVAPRFKRLNQITNSNDFGFWDKDINAFRITVPEPLLKGFNSKRIDHRHHALDALVIACTTKDHINYLTSLNTQRNNFALVPKLRVIEKIETVDKKTGEIKTRNVARNFHLPWAGFPVEVQSWLLKTVISFKQNLRVINKTNNKTWQWVNREGNLKKELVKQSKGDNWAIRKPMHKDTVSGSVNVRIKKTVSFINGVKDWKNIVDKKLKNKIKTFYGLGKNEKYILKYFKDNPYQIDGKAVSNVEVYAFTEGATATRVALSENLTAKQLTNITDSGIRSILERHLENYIDDKGKQRFDLAYNPDGIDELNRNITTLNNGKKHHPIYKVRIYEEGKKFKVGNTGNKMSKFVEAAKGTNLFFAIYWNEEKQKREFETIPLNEVIEFQKWRALLPRDEQKITPFIPVNHEKGKFLFSLSPNDLVYVPTAEEIENPSSINFAELSGEKVSRIYKMVSSTGSECHFIQNQVATLIKSYDPKSKSGEFGSLNKMETSFEGVRIKELCWKLKVDRLGNISF

SEQ ID NO: 7754 - protein, 1364 aa, unidentified
  REGION 1..1364: note = Description of Unknown: Cas Enzyme sequence
MPVYLGLDIGSNSVGSAWIDTTDRSITPGVSIFPAGVDESDDKRGEPRNAKRRMARRTRITLARRAERKRLLRLQLIEARLLPREAAEFKILLENTDPWELRRKGLDGQLTPHEFGRVLLHLAQHRGALGLKIADPDESEPDGDAEDGKVKAAIGEVRAKMLRRKARSFGEYIALVRAERVTPITSEDRRAVHARKGPREYRDAVRNKAGSYEHCADRDMVRDEFQKLWHKQVELGGDTARLLTNQLCTALDDESGDSLWVHKGLLFGQRRQSWDLGTLGRCVLEPTERCVPHADMYASRYLVVETVNNLKIIERGKEARPLTPQERQKIKDYLSGPLGIEKGRRKKGDTEPPKDKPKTTVSVTDLRNLMGWGRASKTSPFRLNIESDEERTINTDWFSREIIHGAVTPAKWAEMPPSVREGLNRAILKFDPDRDADAAKIRNGAMSWGGLDEAQADALVGAWKKRPRVDAKRLNMSRRAVRNLLTLMDRAEPWPDTSQPRCPRWLTQIEARKLIAEDADYKDATTGGPLDLQARMRYATGAKGATARDRYYMQKHLLLKNGKPVFGPDGLPLAEPPPAPLINNPVVRKAIHEVRRHLVEYMTTFGRKPDAIYIELAREARMGKMAADKLLFRNRLRNRIRNDIVAAFDLDTLSSTQQRAAVDRVILAVQQGGVCPLCGNQAVPTEITPRMAAFGAGCDVAHIIPKACGGHNGLGNIVLGHTKCNRDMGRRTPRQFWEATIKGGFEEGMRYVEGIYQDVDRPKPSEVKNASGNALWSCYFAGRPSRFGPTFDELKIEQFKKDISDIQEMTPRQSAATSYAARQVMTYLADALYGGKGLPERSTGADTDDRERRIFATDGLWTSRLRWEWGLRFDPHQSRAKGLTDQQEHHRKEKDRGDHRHHAIDAVVIALCSAQVQRAWDDREKCADRDGMNTADEVAMKNYRRRNPLPVPPPFGSQEEFREAVRLAVFGEVAVERPICHRPVKRKLIGALHEETLLGPVLDNTGRLTQNFTAQKSVLALDPNHLRMPRLETSQEAIERLAHRRLRQADGDERAARKWARQVVLSAGYKPAIIDPPPEKSGIVRDIALRARLRECLTNAGLDPDDFSANQVKKVVESGGLRQASGIPIRSVVLLRTMKDPAIVSRWASEHATGKRCRVYDATTGTGDAAAARAYVGGNNHHIEIRAAKSKKGEETWSGEIVTAFEVAQRKLAKLRAFRKAGIPKPDAFRKLLRAERAKLTPTLRAIEAAHPLVDRCDNDAKGGKFIMSLCEGEMLLMKHKVGGEVGYFVVAKLDKPQSIVLVPHWDARAAGERKDSEGTKVPDSKRDQFAATPGDLKSLAPPGRAHAIKVCVSPIGAVTEVCD

SEQ ID NO: 7755 - protein, 1176 aa, unidentified
  REGION 1..1176: note = Description of Unknown: Cas Enzyme sequence
MKKVLGLDLGTNSIGWALVDHENKKIEALGSRIIPMDEATIGDFNNGNSKSQTAERTRLRSARRLIERYLLRRERLLRVLNILGFLPPHFSNSIDFEKRKGKYQFGKESKLAYHPDDNGDNKFLFLDSFDEMLMDFKIHQPVLLENGQKVPYDWTIYYLRKKALHTKISKEELAWLLMQFNQKRGYYQLRGEDEAENPGKLVEFHALKVVKVAEEEKRKGKDETWYSVILENGWIYRRSSKIPLFDWQGKIKEFIVTTEINEDGTVKKDKEGSERRSFRSPSEDDWTLLKKKTEADIDKSQQTVGEYIYDSLLKKPDQKIRGKLVRTIERRFYKEELVKILEKQKDFHPQLNDYKLYNKCLQELYCFNESHRNSIGNKGFVHLLVNDILFYQRPLKSKKSLIANCPYESRIYMKDGQRLSEPIKCIAKSNPYYQEFRLWQFLHNLRIYSREEIVNGKTETDVDVTAKFLTNETDWVALYEWLNDRKEVEQKTFLKNPAFNLKKDIEKYRWNYVEDKLYPCNETRGAILSKLKQCASVPNDFLTPQKEMELWHLLYSVEDKYELVKALSSFSAKYNLSDDFVEQLRKFPPFKKDYGAYSEKAIKKLLPLMRLGIYWREDGIPPDAKYRIDAVKERLTLATEDSIKIEELADDDIPKQVIKSFLKCKYLIKGFNTYQACYAVYGRHSEISDLQQWQCPADIDKFIADFKQHSLRNPIVEQVVVETLRVVRDIWNYYGKGTAHFFDEIHIELGREMKNPADKRKRMTEKITENENTNLRIKALLLEMLNDNTYSEIRPYSPSQQEILKIYEEGVLQSGIEVPDDIQKIAKQNQPSKNELIRYKLWLDQKYRSPYTGEVIPLSKLFTSAYQIEHVIPQTRYFDDSLSNKVICEAEVNADKDNRTAYEYIKKNAGKIIELNYGRKVKLFVLEDYEQFIKQHFGKNQSKMKKLLMEDIPDEFINRQLNDSRYISKYVKGLLSNIVREDGELEATAKRIVSCNGAITSVLKQDWGLNDVWNELVVPRFIRLNQLTNTNNFGQWTNKGGKRVFQTEMPLELQKNFSKKRIDHRHHALDAVVIACATRDHVNYLNNEFAAANKKEIRFDLRRKLRRVESKDILRKIDGVDVPKKIEVAKEFFKPWDTFTQNTREALSSVVVSFKQNLRVLNRTVNNYQHWQKDAN

SEQ ID NO: 7756 - protein, 973 aa, unidentified
  REGION 1..973: note = Description of Unknown: Cas Enzyme sequence
LENGWIYRRSSKNPLFDWKGKIKEFIVTTEINEDGTVKKDKEGNERRSFRAPSEDDWTLLKKKTETDIDKSEQTVGEYIYNALLNEPNQKIKGKLVRTIERRFYKEELVKILEKQKEFHPQLNDDKLYDRCLHELYCFNESHRNSIGKKGFVHLFVNDILFYQRPLKSKKSLIANCPYEARIYMKDGQKLSEPIKCIARSNPYFQEFRLWQFLHNLRIYSREEIVNGKTETDVDVTARFLQNESDWVALFEWLNERKEIEQKTFLKYPAFNLKKEIVKYRWNYVEDKLYPCNETRGAILSKIKQCVSAPIDFLTPQKEMELWHILYSVEDKHELVKALSTFAKKCDLSDDFIELFRKFPPFKKEYGAYSEKAIKKLLPLMRLGKYWNEKDIAPDAKYRIDAVKERLVLAAEQSVKVEELADDDIPKQIIKSFSKCNYLNKGFNTYQACYAVYGRHSEISDLQQWQSPADIDKFLADFKQHSLRNPIVEQVVVETLRVVRDIWNYYGKGTSRFFDEIHIELGREMKNPADKRKRMTDKITENENTNLRIKALLVEMLNDSTFSEVRPFSPSQQEILKIYEEGVLQSGIEVPDDILKISKQNQPSKNELIRYKLWLDQKYRSPYTGEVIPLSKLFTSAYQIEHVIPQSRYFDDSLSNKVICEAEVNFDKDNSTAYEYIKNNAGKIIELNYGKKVKLFSLDDYEQFIKQHFGKNQSKMKKLLMEDIPEEFINRQLNDSRYISKYVKGLLSNIVREDGELDATAKRIVSCNGAITSVLKQDWGLNDVWNELVTPRFVRLNQLTNSNNFGQWTNKGGKRYFQTEMPLELQKNFNKKRIDHRHHALDAVVIACATRDHVNFLNNEFAAATKKDIRFDLRHKLRVIETKEIVRKIDGVAVPKKIDVAKEFYKPWDTITQDTREALGSVVVSFKQNLRVLNRTVNKYQHWHKDANGQLKKGVATQEGTNWAIRKSMHKDTV

SEQ ID NO: 7757 - protein, 1795 aa, unidentified
  REGION 1..1795: note = Description of Unknown: Cas Enzyme sequence
MKKILGLDLGTNSIGWALVEIDHENGIVRILGLGSRILPMDAGEINDFESSGKIKSAAAQRTEKRIPRRMNERFMLRRDRLHLVLNLLNALPKHYRLEIDFKNASGEKCGQFKSNREPKLAFLPKLKDSKAEFLFIDSYKEMLNELGIEDKKGSRIPYDWTLYYLRQKALKSQITLEELAWVLLSYNQKRGYEKIEVENKSEKENEIVDELDLRVKNVTPLSDKEGKKFFKVELDSIENFIYNEYSDSQMTFKNDLKEVKIISKIDETGNIRSKEFSITDIFPLQIKDVKYEKQDGKHKYTLIYHNGWEEIKQPKNYTFRYEKAKGKEYECIVETVYDEKGNIKPSQGKARKLREPDFGEDSNDWTLLKKKTEKEALAFNLENGYINAETKEPKKYISTRIYNILKKDAQSGNRSKIIGGMFQVVDRDFYREELNQIIETQKQFHSKLRDEALFEQCVNTLYPKNESHARTLLANKSAIQHLLVEDVLLYQRPLKSKKSEIADCKYEIQRWVDILDKEGKPIEEIDKETGEVYLKKEPIYLKVVSVSHPIFQEFRIWDRLHNLRLIQIEKEFKGKVETNVDVTNDYFTSETYQKLFEQLNNQKSLNQEQFLKFCKDKLSVPYEKKRENFVWNFPEDEEFKGNETRVSFAIRFKRCGFTEYAEFLTQQKELDLWHYLYSVSYKERTANNNKSVTTFFNRFLEGSNITDELKEKIIKDFANYPKFASKYCAYSEKALKKLLPLIRLGDKIMDDHWATEQGYTKWQQSLEWRKGEILKKLKTTNFSAEDVDFSAIVSNDTSNGNLPFPKGLFNAFKSFEKTEDFTKLNLTQASYLVYGRHSELAQAIHWNSPNEIREKLHQELKQHSLNNPVAEKVILEMMQVVADIWDYYGEGKEKFFTKIHLEVGRELKKSAKEKDSITKNQSANKAQNKRLRQVLQEFLSTNTYNAKPNNNDHFERLKIVEEGAEHTKNTDKKFFENKPYTKNDIEEILKKPEITQADFEKYKLWIEQGYRSPYTNRMIKLTDLFNGKKYNVDHVFPQASITNDSLINKVVCEFEINKLKSDKTGREFISVYGDKEVYCSAYNSNIKINNDDQYVTTVKTQFSGNKRFILLSKEIPKGFTNSQLNNARHIARKAMELLSHIVREEGEVEFRSKNVLPVTGEVTSKLKRAWRLDQVWKELVAPRFIRMNELTQSDLFGQWQESKEGNEYFDCNLDDTILEKDESYDIKRIDHRHHAIDALIVALCTEEHVNYINNINADAKSENYGKQKQIEKYRETLKKKIKLSQSNKEDPKEKDWFYMLLGEIRQQDSENSCRDSILTKTYFYKDLDSFSRDYRKMVLSALQHTIVTFKQNLRVINNRINYYQAEPNTKKRKAQEPKTFNDRENSQNKYNWGIRRSLGKDTFYGKTLIDGEYKIVIRKDIDATFGGDKINTISDAQGQLKNILYNHLKQFDTVVLPFEEALLYYNAVLEKQEIDAIVADTETQFHSIQDFLVYLKERKYEYKKTNYSKLNVFVEQVSDRDFRSEKNEDVKILEHPEIAFTAEEINKMNEPENLKRLNEGKSHKPITKVKISRGFGNQRALSENSESVKSKQYIVNDAGSNLYLGFYEGLIKDKDGNETKERKFQDIGLIELIESLKQDKSKRINPLPNEIYDDKQNEYNWKFALSPLDLVYVPTEEETDNPKSVDFNNLTIEQANRIYKYVDGGGGIANFVPYPVAQPIWKFYDDKKKKQIHKELSEKKVLTISEKELIKDEFGFGSQQTKNQNMIDGKTQIKKICWKLNVNKLGNIMSVDGSV

SEQ ID NO: 7758 - protein, 1019 aa, unidentified
  REGION 1..1019: note = Description of Unknown: Cas Enzyme sequence
MKSVLGIDLGPNSLGWALLNVGEKEGKIVAAGVRIFEAGLAEMEKDGKGISRNAQRREARSLRRMTERRARRLHKLLHAIQRYGLLPEGSLERPDDRHAFINRLDKELDSPYKLRAKALDSPLKSHELGRALYHLGQRRGFLSNRKTVPKKDEDAGKVKTAIVGLAVKMQASGARTIGEYFSRINPHEERIRTHYTSREMYRDEFEKIWKAQKTHHSAIMTEQAKKEIWLAIFRQRPLKNQKDLIGECELEDGKKRAPWAIVPAQRFRYLQTVNNLQIIDDDAPGGRPLTLEERTKLIEELENRGDLRFPKVRQILELPRTSKFNLERGGEEKLQGNRTATKLIKVFGEKWADMTEPERDDVVEDLRSIVKETTLKKRGLNHWHLDEEGAEELSRIRLEDGYCAFSRQAIDKLLPHLMAGKHVPTAIKELYPGRSERKAIPMDELPPIKSEEVGEIRNPIVERSLTELRKVVNALIKSHGKPDIIRIEMARDLRQPAKQREAAWKRMRTNEKAREKAAKQIIEEVHIREPKRSDILKVQLAEECRWKCPYTGKIISMQSLFGDHPQFDIEHIIPFDRSLDDSYMNKTLCYAEENRKVKHSKSPYEAYHGTVKWGEIIERVKSFAGDARDEKLRRFHFTESELEQFTQNFTSRQLNDTRYATRLAKRYLGFMYGGVNDDGVDGENKRRIFASTGQVTAHLRTAWGLNSILSAGEFKTRDDHRHHAVDAVVIGLTDIAMVKRLSDASKRATGWRPFGSVTPPWGTLRSDVESAIKKVVVSRRVRKRVRGALHEETFYTKPIIGSGGKEYVRVRKALADMSMSDIENIIDPAIKQVVSERLAELGNDIKKFKEPANLPVIVTPSGERHIIKKARFKRNLATFTVGTGPQARYVQSDSNHHMEIVETADGRWEGHVVSLYEAYKRLREGQPIIKKDHGPDKTYKYSICNGDMVELGNDDNRDLFVVRKMNKGNQQVFYAQINDARKRKGISMAGLSAVPNMLRAKQCKKVIISPIGDVQDAND

SEQ ID NO: 7759 - protein, 1129 aa, unidentified
  REGION 1..1129: note = Description of Unknown: Cas Enzyme sequence
MKKLLSINLGITSIGYSVLNELDNDKYSLIDYGVNMFDTPYDKDGNSKKLIHSQIKSTKKLYELRKERKKNLSKLFEDFGFAKKEDFLNQEKENLFINKWGLRAKKAFEEKLTFQELFSILYLIAKHRGYKSLDTDDLLEEFCEKLGLNQEKKKDNGKDNEKGKIKQALKTIETLKLQFPQKTIPQIIYEVEIQKENPTFRNHDNYNYMIRREYINEEIKALVLSQEKFGLFDKNFDSKAFIEKLIETIDDQKESSNDLSLFGNCEYLKNEKVAHQYSLLGDIYKMYQSVANITFNSNPTIKISKEQIKLIANDFFDKLKNGKNISDIKYKEIRKILKLSDDFKIFNKEDSYKSKDKTQENSITKFHFVNNLSKFDKDFIKSILEKSNKYDILKEVFDVLRDEKQPKPIYDKLNNIFSKYDLIKNESIKNNTILELIKNKTGSSLSISHQAMINIIPYFEDGSTIDEIKQKLNLSREEDYLSYKKGIKYLSVAQFENNNNLPINNHPVKYVVSAALRLIKHLHVTYGAFDEIRVESTRELSLNDESKRNIDKVNRENEAKITAILENIEYQQIAQTYGKKLEKYARKILIWDEQERFDIYNGKSIGFGDIFSNSVDIDHIVPQSLGGLSVKHNLVLVHRDTNLQKLNQLPLNFIADKQGFIDRIEYLFKEHKISWKKRKNLLATNLDDTYKDTFESKSLRATSYIEALTAQILKSYYPFPNQTKNSMEVRHIQGRTTSNIRKLLKVKTKIRNTNIHHAIDAILIGLTNQSWLQELSNTFRENMGVIDDVARQNIKKVIPLIEGIEPKELIEMIENNYNAYGEDSIFYKDIFGKTKAVNFWVSKKPMVSKIHKDTIYSKKPNDFYTVKENILNQFIALKVNNDTKANKFYEDFKKNILEKMYVYKTNPNDVICKIVQNRAYDIKELLTSFETIDKKDKEALSEAKQKLDTLIHNPLLDNNNKPIRKVKFYQTNLTGFNIRGGLATKEKTFIGFKASLKNDKLFYERIDVANKNNIKDNDFLIIRNNLICINFKNKNLLGFVESFDENTNKIRMYDSRYPKRLENQPERFKVASGKGRKEFGIAGAIGIIKLNLDILGNINSYQIIGTIQNELYSFFKKLKNDKGNLPINT

SEQ ID NO: 7760 - protein, 1745 aa, unidentified
  REGION 1..1745: note = Description of Unknown: Cas Enzyme sequence
MKKILGLDLGTNSVGWALVEIDYKEKLIKIVGIGARIIPMDGQEFSKFNAGQKIESAAGNRTKLHRARITKERYLLRRDRLHLVLNLLEALPNHYKIEIDFERNGKRCGQFKDDKEPKIAYLPTKNLENKHSFYFEDAFNEMIMDLQSVNPEIKNEKKKRVPKDWTIYFLRNKAMSEKISLEELAWVLLSYNQKRGTDLAEIENEDEKSDEKEQLDLKVIKVEPNKDVNGDYFEITLNDAENFKYKEYTTEQLTFVNDIKEVVKILKLDDTGNILNEKTIYQISDLYNLTLANIEHQEIDEKIAKHKYEFVYTNGWKNEKKKAKFDVTYQKLKKQIKDDAKIITELFVISNKYDDNGKPESIIPNIKLPDFNSEGSKDWTLLKKKTEKDIVSYNISTGFVNSDGSAKHFISPKIYDVLKNDAKTGERSKIIGGLFQTIDRKFYREELYQIINTQRKFHTSTLDDKEVFEKCVKLLYPHNEEHSKALLENKNALTNLLIEDILLYQRPLKSKKSEISDCKYEIDYWKKDVNTTTGEITEIPIYKKAVSASHPLFQEFRIWDKIHNIRLVQLEGKDAEGNSETNIDITSKYFKPEDYQALFSHFNNRSTVAIDDFLEFCKKQFKLDIGKKGERKILWNYPVEEEFKGNETRKSFENKFRQCGFENFNEFFDKFMTQEKEIELWHYLYSVSSAERKKVSQTTNTSNPKYGKTGVYNFFTKYLKDENVSSEVLEKLGRAFENYPKFASKYASYSIKALNKLLSVMRVGDNFLTKNEINEKWQEKYLDRTNTILKSNKEIDWSSEFVDFTKVVVNDVNIKDGELPFPKGLFNTFKNFETVEDFQFLNLTQASYFIYGRHSELAQAKYWNSPEKIREEITKELKHHSLNNPTAKKVLKETLKVVADIWEFYGNSEEKFFTKIHLEVARELQKSNKEKKEITDRQKNSRTENNRLRSILEEFLSDSSYNAKKGNQDHFERLKIVEDGAKVRSYSDKEFYSDNKDKFSKSEIETILKKQRISKSDFEKYKLWIEQGYKSPYTEKMIKLTDLFDGNKYNVDHILPRASVTNDSLSNKVVCEREINKEKSNLTGRAFISSYQGKEIHTVAHGNVKIISEENYVTLVKFQFKDSKRLILLAKEVPSGFTDSQLNNTKYIARKAMELLSHIVREDGEVEFRSKNVLPVSGAITDRLKKEWKINQIWTELLTPRFERLNKIHSSEDFGTYSISKSGHEYFDINTKIILEKNDKFDLKRLDHRHHALDALIIALCTENHVQYFNNINSGITNKKKSKTEVIQKQRAGIKRQIMYSEKDKENPNEKIWKYMLPGSFRQKDSLNNEKESLIELLWNNNYTAKDSKDYQKTILEVLENCIVSFKNDFKIVTKSSNKYESYYDKDENLRLDKNGKPQKDFISQKNDNQKHWSIRKPLHTDNPSAEITLQFDRLKLIDYLGKADFIIDEKIKDAIKEVLGMFINKIGEAKKYLSKNPILIDDKKIEYADFKIANTKYRKRQSITSLSLRTGTGALPTFDAVTDRINKVSDFVLRNDLLEHLKQNENDIDKAFSIEGINEFNANRKIPVFRLPISESASLKFKIGNKNSNNHKWVETGGNFHFRITKNEDSRDYETIPIRVALQIEKENFGKEQTQNNNEIILSPNDLVFVPLKTDEIVDFDNLTNHQIKRIYRFISCTDKEAHFIPYSNATEIIKNENGTNSKNERIQDFFDGNEILDDKQKLIQIKSVCIKLIVDRLGNISKW

SEQ ID NO: 7761 - protein, 1110 aa, unidentified
  REGION 1..1110: note = Description of Unknown: Cas Enzyme sequence
MQDGRLWRLGFDLGSNSLGWAALSLTDEGRPSGLIDMSVRIFPDGRDPQDQQSNAAKRRMPRGARRNRDRYLQRRAKFLRMLTDYGLMSAESERRSELEAIDPWILRARGLEEPLALHEFGRALFHLQQRRGFQSNRLTDKGDDDKGKVSKGAEQARLAMGHSGAETLGQLKGQPRLENLRSPVGQRKAMPLARVRSHGEGAKLAYDYYPLREMIADEFDLLWGTQARHHPELTDTARKALREALLFQRPLKPQPVGRCTLESDEERAPNALPSVQRLRIYQELNNLRVAKRPGEPRLPLSPSERDILAVRLETSAKLSLKQIRTLLGLSDAASFSIEEGGRDYLDGNKTHDSMCGTAKNKAGWKGWADLPDEEQDAVIEILLGRPSPVKGSTQAVSNTHRQIIDRVSAALAVDEGIAQSLIEAKDQNAITDFLCERYNLEEDAAGRIATIRLPDGHGRLGRTAGGKVLPHLIAPDEEGELRTFDKAVVAAGYLSHSLRGTGEVHDTADGLPYYGVVLEKSVAFGSGNPADSEEKRIGKVANPTVHVALNQLRHVYNALAARLGPPAQIVIELARDLPLSAKGKAELEKTQKDNRAANEKRSKELEAFGVPNTYENRMRLRLWEDLDATGKRCPYSGNQISSAVLFSSEIEIDHILPFSRTLDDGFGNKILAFRERNRAKGHRSPWEAVEAGAFDRAVIEASMRDLPKSKAWRFGPDAMERFENQERGFLDRQLNDTRYISRLAKQYLDATGAQTWVVNGRLTADLRHVWGLNAVLSTHNSAPPSSEADAVKKNRNDHRHHAIDAFVVACTDRSMVKAASDAAKVVEDEFAAGRRESMRLLENVPDPFGGYLQAVREAAARIVVSHKPDHGIQGELHEGTNYGVVMTQDGSQRLATRKPITGLTANEIKNIGDDRIRRELLPLVDLSDAERKAALLKYSQDTGHLRVRVHKVQATFETIRHGPDSKGESHYRAVIPGENYCMDVVETPDGKWQGVGITRFEAHQPGWKRKWRQKFPNGKLVMRLRKGDLLKIVHEGEEKVMLIHDLRPSANLCKMAPHNETGKLQERHDVDKDKDLFRWDFGSISGYKQRSARLVRITADGQLIDPGPPA

SEQ ID NO: 7762 - protein, 1271 aa, unidentified
  REGION 1..1271: note = Description of Unknown: Cas Enzyme sequence
MKKILGLDLGTNSVGWALIEVNENNTPIKIIAMGSRIIPLSSDDRDQFQKGQAISKNQDRTKARTQRKGYDRKQLKKSDDFKYSLKKILSELNIYPTKDLLQLPSLDLWKLRSDAASENSAISAEQLGRIFYMINQKRGYKSARSEANEDKKDTEYIAEVKGRYAQLKDRNQTIGQYFYDELLISEQNNTFFQVKKKVYPREAYIEEFDRIINSQRNKHSFLTNEIIEKLRNEIIYYQRKLKSQKGLVSVCEFEGFNTTYFDKETKKEKTVFTGPKVAPKSSPLFQLCKIWESVNNISLKVKNPEGSKYKWSDRIPNLEEKELVVKHLSLSPNLSLADLLKILNLKKEDVYVNKQISKGIQGNITYTDIHNILGDSKWLRFDLEIIPSNQKTYLIDKKTAEILEEKDGLQLHAKLEQEPFYQLWHTIYSIKDLEECKNALIKRFHISEEIAEKLSKIDFNKQAFGNKSNKAMRKILPYLMQGYDYSQACSLAGYNHSNSLTKEEKSSIVTLDKLELLPKNSLRQPVVEKIINQMINVVNAIIEKYGKPDSISIELARELKQSKDERNDADIQNSGNKKLNEEVSKRLQELGLPATKRYIQKYKFIFPTKDKKLKDAQVVNQCIYCGNTFNLTEALSGDNFDVDHIVPKALLFDDSQTNKVLVHRSCNSTKTNQTAYDYISKKGNEELNKYIERVDDWLKRGIISYSKMQRLKVSFEEYTERKKLKKETESDKRLWESFINRQLRETQYIARKSKEILEQICKDVTTTEGTVTATLRKLWGWDDALMNLQIPKYKELGQTVIKEWTSEHGKRKHQKEEIENWTKRDDHRHHAVDALVIACTQQGFIQRINTLNASEVKDEMNKKVEEAALSYNEKLTLLEKYLVTQKPFSTVEVEKEAEKILISFKAGKKVATKGVRKIKVNGKKRIIQSDIIVPRGALHEQFVYGKIKTEDKDKTLKYLFENSDSIINTYIKALIKSRLAENDNDTKLALSTLKKNPIYLDKNKEIILEKASCYKEEYVLKYKLQDLKTKDIPFIIDPKVKQLVKTRLERHNGKEKEAFKDVLWFNEEKQIPILTVRCFTGLSAVEAIKKDENGKDIGFAKTGSNHHIAFYKNNEDKLSQHLCTFWHAVERKKYKVPCVVKDSSLVWDDLLDKDVPQSFLEKLPTDNLHLNMSMQENEMFILGLENEEFEKALKEYNYPLLSKHLYLVWSISINKYWFRHHLETKNSELKKMIGAKESKRLYEVSSVDGLMRLNPIKLRLNHLGEITKIGE

SEQ ID NO: 7763 - protein, 1065 aa, unidentified
  REGION 1..1065: note = Description of Unknown: Cas Enzyme sequence
MRVLGLDVGIASIGWALIEIDDIGGEEGARGEILAAGVWKFDSPEEKTQNGSRLKSEIRRNFRGQRRVLRRRRQRMNEIRRVFARHELLPRDDRDALKQPGLDPWKLRTEAFERALRPVEFAVALGHIARHRGFKSNAKDVKSAQAANANSAMSKAFAATKDKLARFRTPAHMLCADESFLVSGTSVRRLRNRDGDHSRTQLREDLLSEAAALFRAQARLRADHATTAFEQEFIKAAFFQRPLQDSEHMVGRCPFELDQKRSPKRGYSYERFRCLCRLRNLTLVEGSETRALSASEMNVAMLDFGADAKFTYAVLREKLALPASISFAGVAIGEEKRLDFVVRSGAAAAGTHKLRSLIGAALGETTWRDLLATPERLDRIAEVVSFRNRYDLIRQDLLASGFDEALTRTLVTAAKDGGLDLFAGAGHVSAKAARNIIPALMQGLTYDRACARAGYDHTASRARHAFDVGVFGKEALARILSEKRVSRELVDSPTARKALIEALKQVKAIVETYGVPDYIHVELARDVGKSIDERREIARRGEARGRRRDELIERFTREMGRAPRGGGHEELTRFELWLEQDGRCIYSNVRIEASQLVAGDNSVQIDHILPWSRFGDDSYSSKTLCLTRANQHKKGRTPFEWFHVERGPKEWEAFIARVDSLRIDGFKKRNYKLRDAEAAADKFRARNLNDTRWTSRLLAEALKQLYPGVEKNAEGDGMRRVFTRPGALTDRLRKAFGLQWIKKNEKGERIRDDRHHALDAIIVAATTESLLNRATRQIQKKEREGRPFELTEICAPWTGFREACLDALEMVFVACAERRRARGKAHDATFRQIAIRDGERRAYERKMVADIKIADLERIKDPDRNMATVRALRAWIEAGKPAGEPPRSPKGDPIRKIRLAAKSKVNILLNTGNPNRAAAVDRGDMARVDVFRKPNAKGVFQYFLVPIYPHEIAMLAAPPMRAVQGGTEEENWPRIDSSYEFMWSMTSMTLLEVSRSDSEIIRCYFRSLDRNTGALTVSTVSSALPVKMRIGTRTLFGLRKLHVDRLGQVHKVEREQRTWRGKVCD

SEQ ID NO: 7764 - protein, 1066 aa, unidentified
  REGION 1..1066: note = Description of Unknown: Cas Enzyme sequence
MQTYVLNKKPEPASNDMVWAFDLGKGSIGEAVRRGNEFLHKASLLIPPDFAETKTAAGRRRMFRTREAHKAREKWLRKVMHEAGIEVLHGRNYDTAGNWKAGELAEKRLEQEFPAPGDDTCYTSCLLRIKLLRGEKLDPWQVFKAFHSAIQRRGYDKDIPWKTREARKAKDGEDDDAGTEQRMHKFEQDLEGMAPGKTDFHFPAYFDAYQMGLWNPAKPDDLQLRSDCHAKTTRNQIVPRKLVEAEIRQMVEGAAKHYPALAGKADYLLYGIAQQSYASYKPELRQKFKLREGGATDWQGVVGQKIPRFENRIIAKCALIPRLNVCKLREGEKGQPHEKSLVAVEVAYLMKLKNLRVQRPGGNGWLSAEEIHDILENPKRTDWKFTKSAWKKLCVSIGAIPLPGHEEIESPRFSGRSRFCRPALEVLKRLILSGKKPSEFLQEEIARLNGNKDPLKGLVEADLKFISDMATKNDAWEGIYIPNQQLDALVELSNNFAEAITRLIGQQNDPIVRHRLSVFYKRLRELEQTTKSRPDQVVLEFVREDFMGKKAKIEYFSFIKRRAEERIKAREEAANAGATEKSAGLKLELLRAQDGCCLYTNEGLVPSKLDEYQIDHIVPRSKGGPDAVVNYALTTQKANEAKADRTPYDWFHQEMPDKWDAYVNRVRARATHLRNKKVQLLVALNAAELADKYTALAETAWIAKLAQAIVGLHFGWRNGVDENGNKRVTVISGGLTGRIRRKYALNQILNPNAKTEEEAEKKNRDDDRHHALDAMVISFIPSWVRDAMKEKFFRFPEPIHQNAKGFFEKEIASVIPQSLCFEKSALAETIYGARGEGDDKVIVQRVELLKLAYTTVKQKQVFSLDYLGDQIKAVRDEHIQKLLAAFHATLPDEGAWKNFCERFNLSHKDGSTGSRVLSVLMNVGQPKEYKDLSKDGTGSYRKALKGHKGQIVYVETSVDKKGETKETAQVRPVYAFESQAQVSKELAEKFGDKCRVIGFFQSGCLVEVDKPVFHVKQPLPPGTYRLNTILTDSKNVKVTTADGKTYPDIPRYNLGNMIASGFKRAD

SEQ ID NO: 7765 - protein, 1053 aa, unidentified
  REGION 1..1053: note = Description of Unknown: Cas Enzyme sequence
MKFNISTNTDPFLTGLVFGFDVGTGSIGYAVRRGSTFLPDGVGVLICDSEGSKLDERRNFRRQRRTLRSKKFRRQWFAKELVKLGLPKPTKEQLKRANNETNEQFDQRTNPVSLRVRALNEPLEKWQLFIALTHLFKRRGYEKDVPWANKEKDTKANKENDAEEWGSGTVPPEKVQSEFDASGCKYPCEFLARNPKHQRRRVWPRVLLENEFHAIAKAQTENKNFPQLTEKTNWLLYGETKEVKGHHVYFKTTEAQNPGVLGLRWPRFDNRGPALDSLQPLDEQGRPLHVVRKNKETFRKAQWELALINFRVIDRATGNLVRPDDKSLTRLREIWESGKRKKKKESGSNAAESEIIKISEPVLKRWAKDFAGQYKLVDGQQPLTPQTGAGRARYSSPTLERIIAGEQFNPPQPLLRRKNESAEQALNRYMADIKHPLVRHRLTLFQKLLQQLVSRFGEPDMIVLEAIRSLAMGEKKRREHIQRIKENRDERESIRTELKKDNFSSSKNSILRYRLFKEAKGRCPFCLCPFCLQEVVYKEAEIEHIVPRSRVDCNEFYNLTVAHQECNKKKDSRTPWEAYGTTKDWEALRKNAEDCFGLGSLKYRLFTNPDAQNLVEEKSDLQHTAYIARVIRQVSLIQLGWLAEDGRDATGLKDPEMTAWRFQVTNGSLTSRLRKSWGLNQILNPFPSKDAWEAMTPEEQEKKKTEMQEKNRGDLRHHSLDAMVIACTLPWLAHRTHGAKDSFGRPGWWWLDEKKRSQASNPIFPKEGQMHEVVKKEIEKVLVRHHVSRSNHQQSYATTLYAKKAENKYVAREVFTSLTPKNLGNIWPDKFALYCEAAWRRYSDESANLEGELKKTKGNVPASFTNKLCFAHFQKWRADDCPEFYWPKEIKIPIRSVRLISVKDDTAVVPFSPGTHAYVKRTGFKEVQVFLAEDEKSFVPAFIPHWKSDKPICEKPIKADRKPIAVIRRGELVKLLKPTGPKNPPGAYRVSTTMQDNIQLIPAHIAKDKDALLASGFLANGVTISWKSFFAAVGYELPHPPSVKSQPPGAAEA

SEQ ID NO: 7766 - protein, 1055 aa, unidentified
  REGION 1..1055: note = Description of Unknown: Cas Enzyme sequence
MELNVQETVWAFDLGKGSIGEAVRQGNRFLHKESLLIPADFAETRTAATRRRMWRTRQAHKARERWLDEVWSSGGLDPLRKREVWKNPNTGKWELKQTADYRLEREFAPKAGEAAQDGAPSDEAGANVCYTSCLLQIRLLRGENLEPWQIYKALNSAIQRRGYDPDIPWKTRQRRRSEKPEDEEGVTLVRMQEFEKLLAGMAPSQPQYQWPCYFDAWRMGLWEPAKPEILKLRQDCHAETTRNQIVPRKMVEAEVRALVEAAANQILTLTGKADYLLFGPPGRAYASFYADERKHHGLREGGAGDWQGVLGQKIPRFDNRIIGKCVLIPRLNVCKIRTGPGGELLPQSRVAAEVVFLMKLKNMRLQRDGGVHGLKAGEIGQIFADPKRRKLGLTPTQWKRWCVRFGGLPLPGQYEEVEEPRFSGRSRFCRPALEILKRLILSGDAPPLAHEKEVGRLNGNTDPLKGLVPGDLRFLQQMGSTWDRLYIPNQKIEALARSTDDAQEAIRRLIGSQNDPVVRHRLALFAKRLDYLAVEKKLGPPDYVVLEFVREDFMGQKAKLEYFKFQRERARARAEAREEAAKAGATENSAGLKMELHKAQGGICLYTGEGLAVTSLEDYVIDHIVPRAEGGPDAAVNYVLTTRRTNDDKADRTPYEWLANKDGWDAYVERVKKRLTMLRNKKVQLLTSPEAAALVGKYTALAETAWISKLAQTIVGLRFGWPGGIVDGKRKVIVVSGGLTGRIRRKYKLNSLLNPNAASEEEAETKNRADDRHHALDAMVISFIPNWARNAKLAGFFRFPEGVHRELFAKEITDVVPRNVCFDRPVLAETIYGARTEQGQRVIVQRAELLSLGLKPTAPGKSVFDLRYASKQARSVRDPGIQERLLQFLATGPDEAAWHKFCSEFWLKCKDGSNGPRVEHVMVNVGEATEYKDMSKDGTGAFRKGKEGHKGQIVYRDEKNKPHVCPVYAHEATRGVRATLLRENPRAVIVGFFQSGCLVGLDQAVAHPKTPLATGKYRLNTIRSDGFVVLTSASGQVSLPIGLSKLLGAGFRRLD

SEQ ID NO: 7767 - protein, 1063 aa, unidentified
  REGION 1..1063: note = Description of Unknown: Cas Enzyme sequence
MDQKSSPYLLGLDLGVQSVGWAIVDLVKNGKPCGIRRAGVRCFDSGVGSETEIAMGKDESANKPRRDARLQRRQTWRRARRLKKVFLTLQKAGLLPPEPVHSSEERHQFLLKLDAELAKQYLPPDDRIAAHLLPYRLRYLTLDQNLPPFALGRALFHLAQRRGFFNNRKMDKKDKETGVVKDGIKQNKKEMEDVHARTWGEYLASLDPEEKRIRERWTDRKWYWDEFEKIWIAQQPHHPELLTEELKQRIHDAIFHQRPLKSQKGLIGICELESDQRRAPLASLEAQRFRYLQKVNDLEIATPIGQILRLDGEQRQKLIDLMENQAEISFDKIRTLFGLKKPRRKKAEGEEAKTEEPKYTFNLEAGGEKKLKGNVTMARLKNELGNELDKMTPEHLANMITDLIEYEKKDALEKRLIERYGLSQDKAAVASDITLEDGYCSLSLKALRKLLPLMEGGIRFATARKQVYGEYSGASKMCDYLPPVLEAKSQLRNPVVTRGLTELRKVVNAIIRIYGKPAFIHVELARDLKRSRKQREDITKQNRQNEKAREDAKKRILKEMSSQEPRSGDILKVLLAEESNWECPYTGKPISMSDLIGSAPKFDIEHIIPFSRSFDNSSINKTLCYHEENRNIKKNQIPFQAYSGHPDKYSEIIARVKRFKGSAAHAKLRKFVQEKIDEDFSARHLQDTRYMSRLATEYLGLLYGGAIDAEGRRRIQVSAGRITAFLRDEWKLNAILNDGDNEKNRDDHRHHSIDAIVIALTDSQTVEYLSRAAEKAEQWGRRLFAPMDEPWTTFLDDVRRAVDAINISYRVNRRISGALHKETYYSNAYKSKDKNGKPIEYRHVRKPLVNMSMDEVNSIVDPTIHDLVQEKLEKLGGEPRKAFADPTNLPYIQSKGGRLISIKKARIRKNVSVIPLNNKNTRFAEPGSNHHMEIIAVLNDKGEEIEWEGHIVSLFEAYRRRKAHEPVIRDKRYDWGLNKKFKFSLAGGEYLMMEVESGKERLVRTVVISERSLEFRLHNDARPITVLKKISKARITSSPSALFKRKARKVVVDPLGNIIAAND

SEQ ID NO: 7768 - protein, 1398 aa, unidentified
  REGION 1..1398: note = Description of Unknown: Cas Enzyme sequence
MDRTDTIWAFDLGKGSIGEAVRRGTQFLHKASLLIPAGFAETKPAANRRRMMRTRQAHKAREQWLDQVWGNAGLEPLRTREVELVDFEVRRKRKKVRDKIRWKNKKVGGRWILARKADYRLEREFAPKIGEKTKDAAPSDEAGANVCYTSCLLRIKLLRGEKLEPWQIYKALHSAIQKRGYERVPWAAREAKRKLRSEDADKEMASTQKRMEEFERMLVALSKGKPEFHYSCYFDAHEMGLWDGGTQFKDRIDCRAKSTRNQIVPRHLVEKEIRDLMDAAAKHYPKLKGQAEYLLYGPAKKPYASYNTNPKKAPFLKEGAPTDWQGVLGQKIPRFDNRILNDCALIPRLHVCRNPDRDEYKKLPDDKLLPAQVTFLMKLKNMRVEEKTPERKQRGLTAAQIKDIFEEYNPKRKYNLTSTQWRNWCEQFDVLPITDAGEKGTGATEEANKKEKKEEKNAVEAPTAGGRCRFSRPALRILKALILSGLKPSLMHKKLFERDSTLLTQLGVDVLDSPPIKEKKDTGGNVFRNYVRQSRPWLLGSDLSFLLAMRKTGAKEDSWEDLFIPNQRLDQVVQEISSAGRGGDAKAERQRRNVAIQELIGSQNDPIVRHRLNAFWDRLKHLEDLRDENEQPFGEPDQIVLEFVREDFMGQKAKTKLKQFQDERAAARKKAREYGGLKYELYEAQGGLCLYGKQVIQNGKCVYLENGLPQPNTPGWDALVIDHIVPREAPYNGPDAMVNYVLTTPNANSAKRKRTPFDWFHQDRLDQWDCYKNFATSKIGTLGGKKVQLLTRADAAELVSKYTSLAETAWISKLAQTLIRLHFGWPLEHQRGKERVTVVPGGLTGRIRRKYLLNTLLDTRFKSLPTAQIKSEDEEEAEKDRKDLRHHGLDAMLISFFPDWMRNPQKDDFFRFPPPLDKPFPGKRNKHAVREFFKKQLDEVLPENIFLEKAKLAETAYGRSFQPEETGVSGTAIRYKTAKLSLAELACGKDAAGNSIYDHKQARRMAHGIVDETIRTRVEGFLKMRPIETDWSEFCQKLESELASEKKRGEPIKIEVRKVMEIRTRRRSVKELAYEQGNSREYDLEYARENVNELVEDSPEQKTIKARLREFFASTPSELQWKAFAESLKPTDRCKLRAESDQAGKKSKARTVKFAVLAHRPIPMKFNLEKAHARIDKICDEHVRLRLRAFTNQTPPPNQTAWNAFCESFAHERRDPGGDLLEDDGGNILYGAAIKKVRVNDGSPDEYKDFSKDGTGTFYKNKKEHKGQFVYLVDDGTPDGAVNVRPVYVFESIQKVKSTVEAVLKFKHLIGYFQSGCTISIKQPVPIDSFKLVTWNDEKKKRRIAATTPLAPSKFLLNTIITESQAVEAKIADGTVVVSTLEALIKAGLYRVHRESNK

SEQ ID NO: 7769 - protein, 1098 aa, unidentified
  REGION 1..1098: note = Description of Unknown: Cas Enzyme sequence
MNQPYRLGLDVGTNSIGWAALTLDTTGRPNGILALGARIYSDGRNPKDGTSLAVARRVPRGSRRRRDRYLRRRDDLMQELIALELMPADEAERQALVTLDPYALRAKAAHGPLPPHELGRALFHLDQRRGFKSNRKTDTSDDNKLTDKIEALDRSIKESGAETLGEYLNRRRLKGKLVRARPEAGFYPHRALYEKEFDKIQEIQAPHQTLRPEQWAHLRDIMFFQRELRPVDPGWCLLEEGERRAHRALPCAQEFRMVQEANNLRILVPGESGRPLSRDQRDRVLKELRTKKELKFDDLLKLLKLPSGARVNLFDENRKALKGDETAARLSHKDSFGRLWHALPFARRTEIVRKLIETESADEIERIARAEWKLDTAAAKKLAATPLPEGYARLSEKAIGKLLPVMEEHCLNYAEAVAEIPEYRHHSDFRPDRELDELPYYGAILTRQVVGTDPTKPKEDEVAHYGRIANPTVHIGLGQLRRLVNRVIKTYGKPTKIVVELARELKMNKEEKEAERRKIRENEAANKRREETAGGRKLSPEDHRRLRLLEEQRFGTACVCPYTGQPISFTMALSSQTEIEHILPFKKTRDDSMANKVLCLTVVNRVKRDQPPAVAFQENRMAGIYPCNYDEILLRASSLPENKRWRFYPDAMERFDDEQAFLDRQLNETKYLSRITRLYLAHLFDEKSKGQRLVDASPGRLTAMLRGKWGLSALLRDHNRSGGDGEDSPTRKNRDDHRHHAIDAFVVAMTDQGLLKHISELNSNPERVRLIEKMDPPWPNFSYEQFRERLDRMVVSHKPDHAERKPKRKTLGASRKVPSEQGKTTGSLHNDTAYGFVKDRDGNIAPGKNGTWKVVSRAALASFLTPKDMDRALSAVRDHTLKAALIAEWERAKETKPAREDASSGDSEKRKKNPAASFAEHVATAGIQLNGRNVKVRRVRLVEELAVVPINDRRTGKPYKAYKPDGNAFADLYRLPTGRCTAVVIRRFDANQPDFDPAKFRPHPAAKKLLRLHIDDMVALEDAGRRRILRVVKMSGQTITLADHQEGGALKKRNDDKDDPFKYLEKSANTLIGMGLRKIGVDEIGRLTDPGPRVARNT

SEQ ID NO: 7770 - protein, 1105 aa, unidentified
  REGION 1..1105: note = Description of Unknown: Cas Enzyme sequence
VNEFVLGLDLGVASVGWALADLEEKRIVAAGVRVFQAPMDLVKFQAGEPGGSHAAKRRQNIQQGRQTARRKARHRDLYIALQDKELLPFAGKRAEHRHEKLTDLDKNLSVRWRQKIRAESPAIADPDQILCYYLRAAALTTKLELDELGRALYHLGQRRGFKSNRREARSGLTAAEAKKDDLDRSKMKLAIRTLEDELGATNHTLGQHLSLVNPHVTALRNRKRSDIDPIWTERTMFTQEFDRIWDAQQIYHPLVLTTALRERLQKLMFWQRKVSAGKPGNCELERKPPLARAPRSSLLAQHFRLVQTLNNLKVRESIFTEYRNLTREERDRLLLELSTEITKTNNKKNPELFGLPFLKVKERLSLGKKAKLNLDDDDDAKYLRGNRTNAIMLRAFGEQRWNSMPETDKRRIVRKWMSETSPEKLLELAKTHWGLAEPDALQLARLEPEDGYAALSHVAMLKLLPYMENDGLTYSEAVVKEYKDVFSGGEELEYLPPVENVLPQIPNPVVKRALSELRKVINELIREHDKPKQIRIELARDLKRNAKQRAGYQEKQKAQEQNRNTAKKWLTEANQRITGDAIEKTLLYMRCKVCVYCGRNLGTTLSDIFSENSGIQIEHILPKRAQDDSFSNKVLAHHTCNRRKGDRTPIQAFKDEPDWGEMLDRVTCLNDEALLDKFTMPEERIAEFSNRHLSDTRYISKLATEYVEKLYGGRDTAIPWEDRNRRCVYASSGALTANLRKRWTLNAVLKDTYGNESERKVRTDHRHHAIDAIVIALTTESMIQQAAFDSQRHDRASGFLQPRHFTPPWPRVGDVEDQVRAFRREIREVVNQIKVSHRVEHRLNGQIHEQTFYSPKIEGQRFVYSRVPVYKLTLEQIEDPNNRIESEIRKALQEHFAKVGGDPKEKLKRFERDVPYIEKNGRKIFIRKVRIAVASSSVETLDRRKGQPSIKLAENHHLVIFEREEQDGETEWYTPGPVSRFEVMRKKDAAKRAGLKQPYTVVEKKDGPGSKYKMFLMKGDAVEMLDAKNDLRDIYILSSMSDGDYVFLRHSVSVPSPKALGLSLPQMRKKMQDTGDRVRIRIDRLREWDCRKVVLDPLGKAFYPK

SEQ ID NO: 7771 - protein, 1084 aa, unidentified
  REGION 1..1084: note = Description of Unknown: Cas Enzyme sequence
MSAKSEELKGAPYILGLDLGAASLGWAVVGLADGKPACHVDGGVRIFPEAVENLEQGKDDPKSAQRRLARQMRRQTDRRARRVASVFRVLQKAGLLPRFSEGADPADPLARHELINRLDEDLACTVPGLIDPAAEHRSRSVFHYRLRALAIHQDLPPYAIGRAFLHIAQRRGFKSGRIEEASGSEKAKERESDSRKERRQVAARIESLPAEFLRLGACTIGEYWSKLDPNQKRIRGIGNWSGRQMHVDEFDRIWERQAPRQQEIMTPLLYRIVKRRIFFQRPLKSAAGLIGHCELERESQRRRAPLAHPLYQRFRILQTVNDLRIVEGSGLSRPLTVEQRIKALDTLSRQQTVTFKSLHKKLGLVPGETFSHEEGDRKDLPGNRTECKLREVFGEQWDSLPEQQKNVIAGYVRSMDDSAVLARIAETRWGLGHLRAARLAGIQLEQGYGRLSVAALRKLLPLMEEGLPYMTAVERIYPDRAFAPTQELLPKVLDLKNVRNPAVVRALTELRKVVNGVIREYGRPERIQIELARELKKPAKARERIAQENRQREDLRKKTIERIFRECGLGKPSNADIEKAILWEECQHHDPYTGGSINFHDLFGSDAKWEIEHIIPHSRSQDDSLTNKTLCSRETNRQKGNRTPFEVFGNTPEWEAMVERVTKFQGDKRAMTRKLARFTMEGGVEELFGEFTQRQLNDTKYASLLAMEFLGQLYGGVCDERGIRRVNAVSGGVTAQIRKGWRLHSILRDGPSQGEAKPRDDHRHHAIDALVIAMTDAGAVQAVSRASERSRLDHRHGFRVDDPWNGFLEQVQAVIRAIRVSHRPDHHLRGALHAESLYSPPRSERGAAPRHRIRKWLSSLTPEQVRDIVDTKVREAVEAKLKELGQTDPRDAFKNNADPPTLGNRHGDPVPIRRVRVYVSVSPQRIGTGATARHVVSKDNHHLAIYRLSADKKGTARWTGEAVSLLEALKRMNLPGRPVIAPVNESGAPLVMALYKGDLVEMTVPKSQPPERDLFVVRGFSIEKRGGPEINFVRHNLAAEIADLKDAGEWQRIRSWDELRLLNPRIVRLGAMGRVMPDDSQPNS

SEQ ID NO: 7772 - protein, 1310 aa, unidentified
  REGION 1..1310: note = Description of Unknown: Cas Enzyme sequence
MDETDYVMKDKPGPASNEMVWAFDLGKGSIGEAVRRGNEFLHKASLLIPAELARRGPAAMSGTPASQYRMLQTRRAHKRREDWLDAVWEAAGLKPLVSRTVELVDFKTRKVKKTIHGKTRWKTKKVGGHWVLKNKADPLLEKEFGAKDDSICHTSCLLRIKLLAGDKLETWQLYKALFSAIQKRGYAKVPWEKDQKDADDKNAQEEAENAVAGKRWTDFSQHPDVVNLGDEFKRACYFDAWHMKLWNPTDPKHVELHSVERPESTQKVVFPGRIIAEEVLRLAENAAKQEARLNEAFDKVMADWRAKVSKRIARVNEHRARLGKSPLPEPNFSVGANNFAELLVYGPGGSPKTAKEGFRHIPSHDPDIRRAMGLRPGGIDDAMGALNQEVARFDNRLRAPCALIPRLSVCRNLAPDEILKIKENDHEKLLPAQVTFLMELKKMTVEQRDSTRKQHGLAAKDILEMFEKLNSQRKYHLTKREWGKWCEHFNVLAVTNPEEKAAAKKLNPEAETAEKKKPDDLAVNRPRAAGRARFSRPALRLLKELLLSGSSPATFHAKLVGRNEELLNKLNLDVLDKEPVITKKDSRGNDYINYEKRSRPWLLVSDLDFLPRMSKDGKSADSWDNIFIPSQQLDRLAQESDAPAAKRKEAIQNLIGEQNNPIVRHRLETFWKRLEKLEAKHGVPRTIVLEFVRDDSETSWLGAEASKEITAAQKKQRDRREQAKKMLAEMGKPNGDVLKYMLWESQGGQCLYGKPAGNPQCPYTETALSFTDLHKYRIDHIVPRAKGGPDSFSNFILTTDEANAAKGDRTPWQWFRQDRSLADWDAYKKRVLGRFHALGGKKVRLLLGADAEKLVERNTPFVETAWIARLAQTVASLHFGWANGNDSEGKKRVIAVSGGLTGRTRRKYFLNSLLGRDRELDKNISEKLAELAALRSSALPREEQKAKARILLAELDELNAESGKARDDDRHHALDAMVLSFLEGWVNDPKREDEFRFALLGDNPTYPTSLEREIGQLKHKIIALGAVAEKAASGEERARINQQIIACRDALAGMRMERNALKVREAFRDEIYGNEKKGIKPILPIWLHYPKPELAAALHRGIWLRAESASRAAHATIDDFDKAFEQERISLVDLPYLENRITEELAFSVAHGLRRIGEIVEHKDYDFKAVQPVVEEFLKTNPTETQWKEWCASSAAPAGIKPKKGQPDKREFVVFKIKEVRTKRPQETPSARASLYSIGIGSKEVPEFDRTHFEIQVARLICKPEKNMDKPGIPLQPDTELQNKLRAFLPRIEEFYRQYPPDPGDPPRKE

SEQ ID NO: 7773 - protein, 1067 aa, unidentified
  REGION 1..1067: note = Description of Unknown: Cas Enzyme sequence
MTESGSSQSNYVLGIDLGTTYAGWAAISLNQSGKPTGVLRAGVRVFDTTVTGNVEKGQDESNAIARRNARLVRRQLRRHVARQKALFQLLQQHGLLPPYQGTESDSSRQRHQILNALDHELVIKRASTGDANAKAAVELPLYLLRKIALDAALEPFELGRVFYHLSQRRGYKSNRKEKPTDKKKVAELGVVESGIEDLTEEMHRAHARTLGEYFASLDPHAQKIRGRWTARKMYEEEFALIWEKQATFRPDLLTEELHHQVKHLLFYQRPLKAQSHLIGRCELEPGERRAAWATLEAQEFRLLQEVNNLEIILPGSVIGVPLTAQQRQTVLDLLENSAEVTFKQIRKALGLANNAGFNLQHGGETRLKGNATNAYMNEVFGERWSAMPDGDKKQVVEDWRTIEQEDSLVRRAVSHWHLDEANAQWLASRSAPNGYCAFSRKAISKMLPFLAAGKSGQEAEIKIYGSRLSGGKVYDRIPPVRDFLKNLRNPAVERSLTELRKVVNALVQEYGKPVEIRIQLARELKKSRRERMESVSTNRDREKQRNAAKEKLLKELGLQHPSRADIEKALLWEECQGVCPYTGKQFPFSSLFGENPSMQVQHIIPFSRIPDDSFQNKTLCSVEENQYKANRTPFEAYADPAQYEAILDRVKNWPRPNRGKQRRFELRTLEELEGFSSRQLNCIRYASQMACKLMGTLYGGRDMETAGRSRQIIFASTGMLTGTLRRAWGLEAILREETPSSIEGKPRNDYRHHAIDAIAVALSHPKLIAALSRSDDSYAWATRALLKIESPWKNFIDSIRPHFDQMLISHRPEHRLTGEIHKATNYSMPHEEDGKQVVHLRRPVPGLTMKDIENIVDPATREAVRAKAVEYGNELVKWTPNQGGTDWPQLVNKSGKHIPIKKVRVKEVLNVRAIGKGESTRYVALKNNHHVAIFALLNEVADEKRWVPVVVSLFDAMQRKNKSEAVIQTTYSGSGKAAFKFSLMGGDTLLLHKDCDHGNSKCNPSVWQVRTIAASGQLSLVRINDARQKADILKAKEWWSPSVETLRKLEAIKVTIDSLGGIHQAGG

SEQ ID NO: 7774 - protein, 931 aa, unidentified
  REGION 1..931: note = Description of Unknown: Cas Enzyme sequence
MISESGAKPYVLGLDLGVQSIGWAILDLDAEGRPCAVRRAGVRCFDSGTGSETEIQMGKDESNNAKRRDARQHRRQLFRRAQRLKRVLRALQKAGLMPEGSLKPAARHEMILKLDRELAPLYAAAGDRVAGHVVPYLLRAKALDEPLSPHALGRALFHLAQRRGFLSNKKARKEKDDEGVVKAGISQLHTEIEQAGARTLGEFFARLDPEDRRIRGRWTGRQMFVDEFDQIWAAQTPYHPGLTDEIRNSIHHAIFFQRPLKSQKGLVGRCELEPHRRRAPMATLIAERFRYLQKINDLEITAPDGEVRPLSPEQKAVLREALELGGDLTFTRLRGKKLLDLKKPTDEAPGFEINLERGGEKKIPGNRTAEKFVNVLGDRWHAMPADRQDRLVQEVLQSEHEDELARRLEANWGFASDTAAQLSAIELEQGYCALSRRAMRRLLPGLEAGRRLNDVRKEIYGEKLLRGSQDCEWLPAVGKVAGSLRNPVVCRALSELRKVVNAVVRRYGKPEKVRIELARDMKKGRKRREEAWREMRQNEKLRDDARRRILQEVGISAPRPGDVLKMLLADECNWECPYTGRAITPRALLGDSPQFDVEHIIPFSRSLDNAFTNKTLCHHEENRNVKQNRTPWEAYSCDDRRWAEIVARVRRFRGGAAAAKLRRFQLQEIPADFAERQLNDTRYISRMAADYVGLLFGGRTDASGTQRVQVGRGGMTKYLRDEWSLNSILSDGDAKNRTDHRHHAVDAVVIALTDPATVQTLSRSAERAHDMGRRLFVPIDVPWGDGAGFLDEVRGAIEAVNVSYRVNRRVSGALHEDSNYSKPHPAASAKGKRAIAYRHIRKPLKNMSAKEIEAIVDDRVRECVKDHLQRFGGDLKKAFGDEHNHPYLKAHDGRIIPIHKARVRKNEATITVGAGEKQRYVSPGSNHHMEI

SEQ ID NO: 7775 - protein, 1132 aa, unidentified
  REGION 1..1132: note = Description of Unknown: Cas Enzyme sequence
VPGMDFRKYTLGLDLGSASLGWALVELDDKDNPVRLMDAGVRIFDPGVVGGEAEIQKGRDKSKASERRSARQTRKQTHRRSLRQKKLFRLLQEHGLLPSAENRAQQKFSIQRHEILNALDQQLTSAWRGKATLPGSSMDMADQSLVYLLRQNAVDRKLEPFELGRILYHFAQRRGYRSNRLDADDAGESGNADTGEATESSEGATKKAKRAKEPTEKTLGEVAKGISTLRSEMDAKGTRYLGSYFAMVNPHEKRIRHRWTERAMFEEEFTAIWDKQREFHSELLTDQLEKEVRYWLFFQRPLASSNHLVGFCELEKGERRAPWATLEAQRFRLLQKVNDLRVIERGMQNERRLKKEEREHILDHLETKGDLTFKALKELLAPSIIDGANMERGIKDKIEGNRVNIHMLRVFGDRWNALSREDRQKAVEQWRTIESPETLKRVGREQWQLDENAAERWGDARLARPPKDYCNLSRLAISKVLPMMETGCPFKTVEREIYDSRFSGAEPMKLVPRVTDYLPSITNPAVMRALTELRKVANAIIREYGKPYQIRIELARELRRNRRDREKQFLDNKARQEKREKGARWILAQQSKPDPSAQDIRDVPGHMVDKWLLAEECGWKCPYTSDPARAQINYSKLFVYPEFEVEHIIPLSRCTDNSLANKTLCHRDENQRKGGRTPWEAYHEDEDRWAQILKRVSQFANGPKLREHPKLRRFKLRSLEEIEGFTRRQLTDTRYTSKLASRLLMALYGGRDTTVSADDDTAEFFDKTGRRIFASTGGVTHLLRDAWVLHPDVVLNMSSMNDGEKRKGKDRSDHRHHAVDALVIALTNEQQVKAVSLHAASKQEKKWPLDYRDLVRGLKTPWNNRDQFLGDVFHRMLVSHKPEHKLGGKLHIDTIYPEPLRDPNDGKHYVSLRRSIVGITDKQIKAIQGDNIRIAVEQKLQEHGGNSKKFDPDNLATLPVLKSRDGRLIPIKKVRVRESKSPESLMSFPGSRQVESESIHHFEFFARRDRKNREEWTHIPVSIIEAHVRYGRKNPVIARAHSEDQNAEFVFSLMKGDTVEMDYNGSRDVFKVKKFYSSGQIWFTQINNAQKDEEQKKDKTAWSVNPNPLRLLNPQKVTIDPLGRKYGVNRAT

SEQ ID NO: 7776 - protein, 1082 aa, unidentified
  REGION 1..1082: note = Description of Unknown: Cas Enzyme sequence
MSSAMETPQKYVLGLDLGSASLGWAMIALNHADEPTSLIRSGVRIFEPGVDGTALDIEQGKDQSKAVERRTARLHRRQLRRRAARQRELFQELQKAGLLPTNAAGGGASSEQRHELLNEFDRSLTLKFLKPNDDSFAQKPLYLLRTIALDHALEPFELGRVLFHLSQRRGFKSNRKETKKSAKENEDLGQVKADIHSLELAIQEAGARTIGEYFAGLDPHIEKVRRRWTARKMFEHEFALIWAAQVAHHGSLLTQELHDRVHELLFFQRPISAQKHLVGTCELERGNDKHPPKRRAPWATMAAQRFRMLQKVNDLVVIDTKNQASRKLTEEERGKLYQLLDREGTQSFASIRKYLELKGTTFNLEAGGDKDLPGNRTQKSMRTVFGVFWDEFTEGKQNQIIENWRNSESDELLMQEAMEHLGLDAEAAAVLVKESPQADYCSLSLTAIAKLMPLMMSGRSFKDVETEIYGSRFSGLAVHDTLPPVREALPTLRNPAVERAMTELRKVVNAIVREYGKPYEIRIELARELKKPRQERVKATTANRKREADNKGIAAKILNECGIANPSRADLEKAKLFVECGGICPYTGRSIPFSQLFQDSEFDVEHIIPRSRFPDDSFQNKTLCYLPENREHKRNQTPFEAYSNNPDVWAQILLRVTKWSNPGKLSRFKLQSERELADFSARQMNDTRYTSVLAGRLLAMLYGGRDVETGDSNRQVIFASSGAVTATLRRSWGFERILQAIVSPEPGDTRGKPRTDHRHHAVDAITIALTRQSVIQAMASASAFEPWQPGTRSWRRVPEPWTRPDFIGNLTEQIAQMVVSHRPEHKISGELHKGSNFSRPYLYKGKSTVHTRCELSQLKAADIAADDTIVDKAILGLIRAKFDELGGNPKAFEDPKNLPCFTTANGRKIPIRKVRIRQVKEPKLAGHGDRERFVDSGGIHHVALFVARNDTRQEQWLSEVAQVTDVYQRCPRRDKRIGRPKSIANEPAVSRKLKDNPEAEFLFSLMKDDTVELDYNGAREVFRVKKFYAAGPIWFTGVNNAQMDADQKKNKTTWSKNPNGLKTLHPRKVVVDLLGKVHPAND

SEQ ID NO: 7777 - protein, 1094 aa, unidentified
  REGION 1..1094: note = Description of Unknown: Cas Enzyme sequence
MSDNGSLAQDYILGVDLGSASLGWAAIRQDENGMATRLLRAGVRIFDPAVSGDVEKGQDESNAVARRTARLIRRQLRRRAARQSELFRLLQTRGLLPSYQGSEADASQQRHTILNALDLKLAAKWAKSGSNEEQTAIELPLYLLRKTALDAALEPYELGRVFYHLSQRRGYRSNRKEQASGKEASGKAKKADDLGAVEGGIKELEEAMHPFRTLGEYFASLDPHIQKVRRRWTGRKMYEDEFAAIWAKQAAFHPDLLPEELHHQIKRLLFYQRPIKAQSNLIGGCELEPGERRAAWATLEAQQFRVLQKVNDLEIILPGNVTGIPLTPEQRKIVLDLLENSAEATFKKIRKALGLAENIGFNLQRGGDTRLKGNLTNTLMAEAFAERWPEMSNEEKMQAVEDWRTIEQKESLVRRAIEHWKLDETGAQWLAEKPAPNGYCMYSRKAIRKLLPLMATGTRFKAAEKEIYGNRLAGGKVYDRIPPVRDALKTLRNPAIERALTELRKVINALVHEHGKPAEVRIELARDLKKPRHERAKAVSYNRDREKQRTTAKEKMLREVGPGFQHPSRADVEKALLWEECQGECPYTGKRFPFSSLFGENPPLQVDHIIPFSRIPDDSFQNKTLCYHEENQHKGNRTPFEAYTDPAQYEAILNRVRSWRTPNPGKQRRFELRTLEELEGFSERQLNDTRYASKLACELVGTLYGGRDVPLKDGKSRQVVFASSGMVTSTLRKGWGLEAILREAAPSANGQNRGKPRTDHRHHAIDAITIALSRPKMIAALSRNNAQDPYWPNNGRTTPKIQSPWKDFVDSIRPHFEQMLVSHRPEHRLTGALHDETNYGRPRKEGGKDVVHIRKPLVGKNKGEGLSSEDIENIVDPAVREAVKEKAVQFGGSLKTWTPNAAQDDWPLLKTKTGKQIPIKRVRIRKAIKVFPVGETAYRTRHVAPGADSIHHIAVYVTKDKHGRDKWISEIVRIFEEKQRWQAWKKKGGAVVPLVYSTHSEDKDAEFLFYLMKKDTLELEVNGKRAVYLVTSFESDGRINLIPINSSGKREDQKDSKIVLRESLSSLSERVPQKVQIDSIGRKWVVRDWVAPHP

SEQ ID NO: 7778 - protein, 1025 aa, unidentified
  REGION 1..1025: note = Description of Unknown: Cas Enzyme sequence
MRIFGIDGGIASIGWAVLDITDDATSIVAAGVRMFDAPETDKERTPTNAVRRLHRGQRRVIRRRRQRMAAIRAMFQQHGLLADTHRDALKQPGLDPWRLRAEGLERPLSGPEMAVVLGHIARHRGFRSNAKREASANAADETSKMKKAIAATQERLGQWQTVGLMFARDPDYAGRKHNRGLNFDRSIQRSDHEAEVRTLFASQRRLGNALATEALQAAYADKAFSQLPLQDSEHLLAACPFEADQKRTARRCYAFEMFRLLSRLAALRLTVRGQEQPPLSAEQISLAAADFGRQKSLSYRWLRKTLDLDPGVRFAGVAEKDEKNDLVARSGSAAEGTYALREVLGDAGWRVLMHNPVMRDRVGEALTFREDPGSIRGGLEEAGVEGLILDALMDGLATGKFHAFTGAGHISAKAARALIAPLSRGLVYSDACVEVGYDHAKPVEVKLEDVRNPVARKAVTEMLKQVRILVHEYGLPEFIHVELARDIGKGVEERDKITKGIEDRNKERDKARKRLEEDILGCPASLEELIRYELWKEQNGFCLYTGDYIEPGWIVAGDNRVQVDHILPWSRFGDDSFVNKTLCLARANQAKRGRTPFEWFEAEGLDWALFAARVEGCKEMKGRKKGGFYLRKNAQEVETRFKNRNLGDTRYATRLLLGLLARMYPVAGDLHVLARPGQLTAKLRRAWGLDDLKKDTDGNRLEDDRHHALDAIVVAATSQSMLMQLTKAAQEAELQGSPRGFDFDHVPLPWPTFREDTRAKVSATFVSRAERHRARGEAHAATIKQVREIDGAAVVFERKAVEKLTLANLDNIPVPEPYGKIGDPAKLRDEMVAELRRWIEAGKPKDALPRSPKGDVIRKVRVANKDKIAVEVRGGTADRGDMARVDVFAKADSRGRQQYYLVPIYPHQVADRQGFPNPPDRAVDAHKLESEWTAIDQTYSFLYSLNQNSLIEVTKSDGEVIFGYFKGLDRDGGQIAIAMPESQQKVRGRIGSRTLLRFRKFSVNRLGRFSETAREVRTWHGEACT

SEQ ID NO: 7779 - protein, 1105 aa, unidentified
  REGION 1..1105: note = Description of Unknown: Cas Enzyme sequence
MNAIPKISPRAGADLQLAFDVGHSSIGWAVLKKIGAQPSDIDILGCGSVVFRADDCLASSRRAYRRQRRHIRSTRQRIARMKILLRQIGVLTEVALDKPGCAWPWKLAAQVLQGGKLLTWPEFWDVLRWYAHNRGYDGNRRWSAAEAEAQNEDSEKEANARTLMGQFGTKSMAETFCAMSGINPLGQKKSANLPGDKRPKGQNAAFPREIVEREVRQILQKHFGKLNNVDTHLERALMGKDNNDKLAWQAIPCPDLKLPNRYEGGLLFGQLVPRFDNRIISLCPISGQKVPSRNCPEFLNFRWAMQLANIRVGKKLDRELRELTVAERVKLDRQMREQGYLTPGQLKDAVRSITACERDNLDTMLMHPDAKEALLVDPVQKLVSSDELQPFWKLFPERLQKRLRGQWRRGKSFSLAQIRTQFEALGDVGGFDAELSKQLDKQNSRVKNKDKQVTREALLQRHFPTRPLKLDGRAAYARPLLKQAYEEVIAGKPHPKETGGCLFISEEIRQKQLNETIAEQTNNHLVRHRLLILERVLADIVKEYAAGQKERIGKITIEVNHDLREMSGKTAKEKAQDMGLRLANHHAVAAKLEQAFAAEKDGKSIPITAGLIRKARIAEDLGWRCPYTGIQYEPKDLVTRRVDKDHVVPRSERASDSLDSLVITFSAINKWKGKRTAWQFVSEEQGKAVPDLPNLSILSLTRFKQFVENLESFRGHDDDKRRKRKRKELLLLPKYEEKEFTPRDLTQTSQLVRLGAQVLRKNLPHLTTGDVISLPGSVTGTVRKSWRVLGCLASANPHVLDENHEVKSKTDIRGITHLHHALDACVLGLSAHFIPNNGHVWELIVKRNLNNMEKQQLATLGVFGFNQENRFELRDLDDKFKEQIRQRLAEKRVVQHIPARMDGLRVEQNAWRVVAVKDGEVVLKQRIRQPDGSRSEKIAEEKPAKLLGLNPPDGKGKLAANKGALVIPDNFGVALDPQPTVIPFHKVWTRLKELKKANGGKLPRVLRNGQLIRVPRGSRAGIWRVMSTKSTEAYGLALDLALPDRVKLDRGNAPIEKLIQDGLEILDAGFTGIDSSGIAIVEAKKRPRKPKATGTDESCPTTSSA

SEQ ID NO: 7780 - protein, 1029 aa, unidentified
  REGION 1..1029: note = Description of Unknown: Cas Enzyme sequence
MAEHSINYVLGIDLGANSLGWAALGCGEEVPTGILAAGVRVFSAGAAGLERGRDESNAAKRRVARLQRRQTDRRRRRIGKIYGMIAGFEMLPPAKSPEDRTRALTELDVTLSKKFDADANLPYLLRARALDGSLEPLEIGRALFHLAQRRGFLSNRKSRRQTDEERGKVRAAITTLSKEITDSGARTLGEFFARHDTSERRIRGQYTSRQMYVDEFEAIWAAQRQHHPESLTDERRKLLSQAIFFQRPLRDQSDLIGDCGLEISQKRAAVWHPLAQRFRLLQEANNMRLVDGTGASRHLDQAERALVIRRLESGDMTLKDLRNLLGLRRTVQINLDSGGKKTVIGDRTAEKMRAVFQHHWDAMSADERTEAINDLASDMDGSVLAEKAKAKWGLNGLNAQEYSETALETGKYLSLSLSAIERLLPHLEQGSDVTTARMKEYPETFRTEIRDLLPKVDEIKDIRNPAVHRSLSELRKVVNALIRRYGKPSEIHIELARELKSPRPEREKKWDRMRQLEGERSAAVANLLKEIGIASPSGADIEKWRLADECNWRCPYSCRAFSKHQLFGSGEVQVEHIIPFALSLDDSFANKTLAYVSANARKANRTPRGAFAGTLEWDEILQEVRQFKGSFSAHKLQRFQWTDEQVTETLDDFTKRQMNDTRYASRLAARYAACLYGGLSDESGKQRVFVTPGQVTAFLRRLWGIGGLLSDDGQKTRDDHRHHLVDAITVALTGPKWVRALSDAASQAHAAGRRRFASIRPPWDGFANDVRATLDRTVVSVRADRKVRGALHDETNYGVVAGQEGGARTVVRKPVHKLTVAEVERIVDERVRERVRLQLNILQQSIKKLENDPPTLPTRHGKEIKIRKARIQVAENYPRTIGKGIRERNVVGGDHHHFEILKRTDPGTGRVKWDFAPVRVQEAMERVHPPREKSQLPLVKRDYGEGIEFVCSIAKDETLEIEKEGARRLIRVRTLEADGRVGFTSLADARPFIEKNKNRERLTVAKLMSELKCRKVAVSPLGEVRYSRD

SEQ ID NO: 7781 - protein, 1042 aa, unidentified
  REGION 1..1042: note = Description of Unknown: Cas Enzyme sequence
MAEEISGDFILGLDIGASSVGWAILGTDKGKPVKLVRCGARVFDAGMEEGDFAAGKENSRNAARRQARQARKLTNRRWRRQRKLFNLLVKAGLLPPGDPGKVMPELDATLRAKHLAPLLKYSAERRRLEHVLPYRLRAMALTEKLEPFELGRAIYHLAQRRGFLSNRKAPLKKDEKPGEVKAQITQLEIKMKEAGAETLGQYFAGLDPEEERIRRRWTSRGMYQVEFKKMWDEQARHHPAILTEELGKRVYRAIFHQRPLKNQSNLIGTCEFERGRKRAPWGLLLAQRFRLLQQVGNTLIVAPNGARRAFTADERDRLLNFLQREGDLTFPKTRKLLDLPKGHKFNWEEGGEERFLGNRTNAKLAAIFGERWWGFSETDRDQVVEDVLTIHKDEALARRGAKHWGLDKEAAARLGQMALEDGHCALSRQALLKLMPMLQDGVPYSTAVKELYGDRHGDALDCLPPPAPAYPHLRNPMVLRVLAELRKVVNAVIRERGKPAAIRVELARDMRRSKKQRTEAWQKMRQNERDRRKAADKIAKEAAMENPSRADVEKVLLAEECGWICPYTGRAISMNDLLGPTPQFDIEHIIPFSRSLDDSFLNKTLCEVKENRDHKRNRTPHEAYARDPEKWDAILARVRRFRSSAADAKLRRFQQEELVDLEEFTKRQLNDTRYATRQATDYLALLYGGLYEKDGRRFIQASKGGTTAYLRNEWQLNTILGDGGAKSRDDHRHHAVDAVAIALTDAGTVKMLSDAAERATSEGRRRFGRVEEPWAGFLDDVRQAVQAISVSHRISRKVNGPLHEETNYGPSKRRDAQGRPESFRVRKRLDALSPADVKLIADERVRQLVEEKLAELGGDAKKAFADSKSHPCIVTKRGRRIPIHCVRLRKSEAMIEVGQGPRLRHVASGSNHHMEIFEVKDKKGKTHWKGRVVSTYEAMRRLATRRPVVDLTPPDGGRFLFTLAGGEVIQVNHTNGEPLLYMIRSFWDTPSGCRLRRDRINDARRQEDIERKGREPMLSILQEESCRKVTVTPLGEVRYAND

SEQ ID NO: 7782 - protein, 1070 aa, unidentified
  REGION 1..1070: note = Description of Unknown: Cas Enzyme sequence
MGRRLGLSLGTGSIGWALLETNEDRPADILRAGVRIFSDGRDPHTGDALAVNRRRARGARVRRDRLIRRKSDLRKSLATLGLFPADKSEQEKLKSLNPYELRVRAVTGILTPHELGRVLIHLSQRRGFQSNRKGSRKEDEEEKKDRIALDHALRESGLTLGQYLYQRLKEGKGVRARAGEGLMTLREHYKHEFAQIRQTQKPHHSLGEEDWDRIAGILFFQRGLRPQQRGYCQIYFRDKAEHAWRAMPSFQRFRIEQTLANLRIIGPDRSKYHLSADQRAQLREKMLAQKTIGFGKIRTLLGLAESCSFNLETARRRDLKGDATGALMMRHDYFGGAWRDLDLRQQDEIVGRVLEEADPQTLKTIARTEWGLSEDQAQALADLNHSQLESGTAGLSTRALHELIPLVSGKGMSVTQAVAKIRSGLGLTALAERAPAPARGNLLNSAPPPREAGRIFRIAPSREGAGGARPSGPALEYYGTVMPDLVVPQPRAAVEEERVYGRINDPPVHIALNQLRKLVNEIIAEHGPPDEIVAELARDLKLLPNARKNLARKRNSDRHLSAEAAEFIKGQGVAVNDENILRYKLWKELNAEDINDRNSPYSGRNISIGQLFGDQVAVGHILPVSRTLDDSYNNKTLCFVDEKRAKGNFSPHEACLNAAWPFDYDEIVSRASCLPRRKRFRFEADAMERWEYRDSVFIARQLTEMQYLSNAVRRYLESLYQDGGKIHGRIVAGQLTAKIRGQWRLNSILSGDGNNEESRNDHRRHAIDAVVIGCTDQGLLEGAAAMAAQSQELEFAVPFGRGEEFRGRVKDRVDAVIVSHRPDHGYQGALHEETNYGIIEHPNEYEAANNYNAVYRKPFVSLFAGLEAEKAGAKAAEIRDGRLRRDLMNLLEGASAKEEVAGIIEAFAREEQIRHIRLLKKESTIIPIVHPASTKRFRKFVAPKTINHVGFWQMPCGEIRAVGRSVFEVNQAKGDMNRLKPHPAARLKMTLYKKDTVRVVKSGRTMTCTVVSLSPAGKSFKLRPHNLGESEEFRISFSQVRNYQVRKLSITASGQVHDPGPIFQGSACLP

SEQ ID NO: 7783 - protein, 1059 aa, unidentified
  REGION 1..1059: note = Description of Unknown: Cas Enzyme sequence
MEMKQPVILGIDLGAKSVGWAVMAGDVDDAGRFEPIGLLDAGARCFEAGVDGNLDQGKDEARAVARRLHRGARRQLYRRAQRLRRALRELAAGGLLPSAVASPPEARHTYLCALDERLKSLMLADGEAAGPVQDSPIYQIRRRCLDGKRGLEEIGRALFHLAQRRGFKSNRKDSGKDDDKGKVKEGIASLGKAIDLAKSRTLGEYFSTLDPHQTRIRNRWTARTMYEAEFELIWAAQAPHHPGIMTDKTKSKIRHAIFHQRPLKSSAHLIGFCDLEPSHRRAPMGCLIFQRFRIVQKINDLTWRDENGSVCGPLAVDDPRRTALIDRLDAEGDLTMAEAKKTLGLHKKAAFLLEEGAARMLPGNRTVARLKPALGGHWNKWSAGRREAFVNELISDIEQSKWERRLVEHWGLSEEDAGRVGDLGLQDGYASLSRRAMRRLLVEMEAGVPFATAKKSLYGDRAKGRPALDNLPGVLRPPTRKFLGKINNPAVVRALTELRKVVNGIIRKYGKPVRIRIELARDIRNTRKQRQDSTKKIKDRTDERDGFKREMASKLPDLFGGRDPFKSDVEKWALADECNWVCPYTGNCITPESLFGQHAHFEVEHIIPRTRRPDDSFMNKTLCHSDKNRAKSNLTPFEAYYGTPQWDEIIVRVKRFQGSAARAKLRLFEVEKIDEDFTNRDLNDTRYASRLAKDYLGLLYGGFDGIDEAGTRCVQACCGQITSTLRNEWSLNTILGTDGEKNREDHRHHAVDAVVIALAGPRAVQILATAAGNASAEGRRRYARLGEPWGGFRANVEEVIGRVVVSHRVNQTLSGALHEGTNFSPAKNHKNEKTGKSEVVRHARKKLIGITRGQIENIVDERVKDAVTGFLGERDPKTVFKEGSAFPTLDNKKKNSGHPMPIRRVRVWERNSVISFGEGGAARHVAAGENNHLEVVADTDKHRNEIWDISNVVTRYEANRRLGASEPVVRRNWGEGKKLVMALQRGDHLELEIAGVPQLMRVVSIGTNWLQLQPPAFGSPKMEKVDRNAWLFQSARRFQAANPRKVSVSPIGEIRPCNE

SEQ ID NO: 7784 - protein, 1258 aa, unidentified
  REGION 1..1258: note = Description of Unknown: Cas Enzyme sequence
MPKENESSFLNGLVFGFDVGTGSIGYAVRKGAEFLDVGVLICDSKGSDLSKRRELRRQRRTLRSRKYRRQWLANELSELGLTKPVPSPDDPVSLRLRALNGEALKPEELHAALTHLFKRRGYSKVPWAKVEALRKNGEKAKQEDSDTQKGITELEQEMNEKGCTYPCQLLDLRRKDAGTLPKRKWGRNFPWGRQMLETEFRAIAEAQKDHFPELVQNVESLLHRNTLEIRREVDGKKQTFHVFFKTDTGKKPGVLGIRWPKFENRGPGLDALEPFRKDRKTGAWIPQHTLRRDSLFFKEWQSEVALRNFRVKRRLITVGRSKKEKFELIPPPPVALERLRNLWNEHGHLWAEDLREWAKNYEGQFELRDPDFNLTPRNDFSGRARFSKNGMAAIRQIIANAREKHDAAYNTWEQRFKDKNLKANEEDIANGYARFLTQLTNEAASNQATADNSYARTVAPPPVLILPGETTDGAFQRYLNSIRNPQVRHRVELFGRELQRLMNLHSEDQAPDFIIIEMARDLMMNQKQKDAKEAKDRERRDERDKAAQILRDMGYAPTADNIKKFLLAQEVGWRCPFTLQAFCQSDFSRLTITQLAQAENKPRFLKEASSVFRRLEVEHLVPRTPVVCNEWYNLTVTLHSTNAQKGKRTPFQWLSIDKDGVPPDLDWDCACKNAADRFGANSLKYQIFTSPNAAEIIADNAKRSIQQTAYIARCLREACLIHFGKEWLDWTDGAGRDPRLLPDNRASKSYLTTSGATTARLRGAWHLNEILWPKPQRLNDAEWDKLTDEEKTILKAKYKEERAVRALKNRQDHRHHALDAMVISCAVPWQTFKVRLGNQQPEDGLCELDAETGEITKIWNPVFNDYGYGIMRAVESRMDLLLKFSTDRQTDLLRHHKSSQRNAQAFDTTPYGRREKFGGDELGQPLFVARKRILDLKTSHLNPRNTGGFIFSPLIRDHIAKEWESFSGNEKNWIRIESDWIAIFEAQIATLRASGKDDQKTRLGIKARESRIYKLRQMEGCKDWEELLSFIAKELGAQQPQPKFPSQFIETLCHPIYKTPITSVKVTAQSKNDESFSLVRRPTSEKARSGTYVMRKQEDKYREMRVYRLPKPGRSGAYACWLLLPWYGMLDARGKRFKTVEKDLMTRACKGAKFVRAFRRDDIVCFANNLLANKGIKQNESWRIVRTDAKGDCLANVGLLPANLARETSHPITGEKVKLEPVVVALNDFMNALEPRLPTDELSHSPPVKPKSPGAAET

SEQ ID NO: 7785 - protein, 1207 aa, unidentified
  REGION 1..1207: note = Description of Unknown: Cas Enzyme sequence
MSAKQKMQSSTSAGDSADLQIAFDVGHSSIGWAVLQTDARAVSQAHMSSVNILGCGVVTFGADDCLASKRRDYRRQRRHTRSTRNRIERMEKLLVHLKVLSAEELKQKHQQAGGHAAPWLLAACVLASNGDAKHLLDWPKLWDVLRWYAHNRGYDGNSRWANVSEDVLTATEQDEKKSDTEKEQNAIKLMNDYGKHTMAETVFADLFTEFKITDPTKVKALPFLQKRFKENQCAFPRKMVEAEVLRILQAHKSCDAKSIHLLLTKKLADEDRAFLENIGIRLPKRYEGGLLFGQLVPRFENRIIAKCPITGGKVPGKHCHEFLGFRWAMTLANIRIGFGDEKYEDDAKLRPLTTDELHKVDARVRRLGFLKLEPDKPGKDGLVRPGKNELRTIVITETKCDRHNLDNLLLHPDSKEGLKLLPAKGDTTAFRVAWSCFGEPRHDAKGCYHDDTLRHRFTTQLLRGTKENPKKLTIQKILDELNRLKKTDVAERLLQAAVQEAQGKKIKLDRDKLNALLNAEFYCDKIKGRARFSREMLSQAVQQIFQKPKPIHPLEKGGCLEQTEKIKRAALEKPLDQQTNNHLVRHRLLILKRLHDHIIHDFAAADKSRISRITVEVARDLQTMSGMTNKEKAKELTGKLKHHHETAADLAEKLMDERDEKGHPFAISPGLIRKARIADDLKWECPYTGRTFEPASLVHRSYDKDHVIPRSKRLSDALEALVITSREVNGEKKTRTALQFVKEMSQPENSAKRDRLGIRTEAQFRAFVDSLWPKSDPFKRARAGGNRATDDEARCWRRKQLLLTETWEEKEFTPADLTKTRYITKLAAQHLEATFKDLPEPQHPAIISITGAVTAAFRDKSWKLLPLLGSANPQINKLHQQKIEAEKTGRDFNFKKAVREVTHLHHALDAVSLGLITALLVPPGNAGRAGLNGDLARLIHKGKLTAEERNQFEALRHKLGLPKFYRWSVSRCDDKDKRNPAAGQGGTLCIDQLSESIKQQICERLTEKRIVQHIPADMSGLKVEENTRGIVKAESGRIYLRQQKRDEKTGKLTTNPTDEIPNKLIGIPPNGVTSKLKAVKGARVINDNFGVAFLHRNAESADRFVVIPHHKVWHRIEELRTRNQGKRPIILRKGDIIEFKKDDQFVRYRIFGAGQRARGLYFDAALLDELDRSVELHPTTLIRGNFRLVETSLTGVERKSCSITSSA

SEQ ID NO: 7786 - protein, 1025 aa, unidentified
  REGION 1..1025: note = Description of Unknown: Cas Enzyme sequence
MRIFGIDGGIASIGWAVLDITDDAASIVAAGVRMFDAPETDKERTPTNAVRRLHRGQRRVIRRRRQRMAALRMMFQQHGLLADTHRDALRQPGLDPWRLRAEGLERPLSGLEMAVVLGHIARHRGFRSNAKREAGANAADETSKMKKAIAATQERLGQWQTVGLMFARDPNYTDRKHNRGLNFDRSIQRSDHEDEVRALFATQRRLGNALATEELQVAYADKAFSQLPLQDSEHLLAACPFEPDQKRTARRCYAFEKFRLLSRLATLRLTVRGQEQPPLSAEQISLAAADFGHQKSLSYRWLRKTLDLDTGVRFAGVAEKDEKNDFVARSGAAVEGTYALREVLGDAGWRVLMRNPVMRDRIGEVLTFREDPGSIRRGLEEAGVEGLILEALMDGVATGKFHAFTRAGHISAKAARALIPPLARGLVYSDACAEVGYDHAKRVEVKLEDVRNPVARKAVTEMLKQVRALVHEYGLPEFIHVELARDIGKGVEERDKITKGIEDRNKERDKARKRLEEDILGRPASLEELIRYELWKEQNGFCLYTGDYIEPGWIAAGDNRVQVDHILPWSRFGDDSFVNKTLCLARANQAKLGRTPFEWFEAEGLDWALFAARVEGCKEMKGRKKGGFYLRKNAAEVEERFRNRNLGDTRYATRLLLDLLARIYPADGKLHVLARPGQLTAKLRRAWGLDDLKKDADGNRLEDDRHHALDAIVVAATSQSMLQQLTKAAQEAERLGAPRGFDFEHVPLPAAGFREIVRDVVKDVFVSRAERRRARGEAHAATIKQVREIDGAQVVFERKAVEKLTLADLENIPVPEPYGRIADPKKLRDETVAELRRWIEAGKPKDVLPRSPKGDVIRKVRVATGDKVAVAVRDGTADRGDMARVDVFAKASKRGKREFYVVPIYPHQVADRNEYAVPPNRAINAFKPEDEWYLIDGNFEFLFSLTQNSLAEIIKPDGEVIRGYFRGVHRGTGNITLALPENPRDLRAGLGPRRLVQFRKLAVDRLGMVSAVEREVRTWHGEACT

SEQ ID NO: 7787 - protein, 1193 aa, unidentified
  REGION 1..1193: note = Description of Unknown: Cas Enzyme sequence
MKTEAGDSSNEIVWAFDLGKGSIGEAVRRGNEFLHKASLLIPAEFAETKTAAGRRRMFRTREAHKARERWLNEVMQSAGIEILKGRQIGKVDEQGNEISKSEWKKKKGKWVQIAKGDYRLEREFPPRKFQKNKDGKLEPVIYPDGKAKDGAPAKTDEDFSTCYNSALLRIKLLRGEELKPWQIFKALRSAIQKRGYGKIPWAEKEARRAGKSIEELEKEEQKKDANYVAALNRWRDFKKQVPADSHFPCYYDAWKMGLWDPKAPDRLASQLKHDAESTRNVRFDRTDVENEIKKLIEEADRQLNGKLDSARRRLIEEFRNDRVTRIRLINERRRTKNKSLPRDKQKKLLKEPKFEHTAENIASFLINGPTGLPYASYFAATRREFGLRQGSTDDWLGALGQKIPRFDNRILNDCVVIPRFHVCKAEIRQDAKTGKPIADSLLPAEVTFLMKLKNTLVAGAKAQRKLTVEEICKIYEVVSTGIQDVEADAKDWAKKVASRLSLTDTSWARKKGVKELGLFPLPGHGEVKPPRHSGRSAFSRPALKLLKALILSGKSPQNFYQEQIAALGGNTDEKKGLVPRDLKFLSDMGDSWDDIHIPAQKLEALAARHTENGKLDVDMAVADLLADINDPVVRHRLNVFAGRLRFLRDKYGEPQEVVLEFVREDFMGPKRLNELLQFQRDREKARKEAREKATEAGAEEKSAALKYELCKAQGCVCLYCGQPFAASKLDEYRIEHIVPRSQNGPDAMVNYVLAHDECNEAKSNQTPFQWWHNNRSKKAPSISWDGYKRLVDSCATSLRNKKVQLLLREDAPELAQRYTALAETAWVSKLAQTIASLFFGWENGNDKQGHKRVAIISGGLTGRIRRKYRLNSILNPCPDGEDPFLWEEKCEKNRKDDRHHALDAMVISFLPTWARDTKKEGFFRFPEGVHQEYFAREIEDVRPKYIALEKAALEAKFYGLRTINGQKFIVGRESLAALAIKVAKNRETLKARKDIETHRIVDGQIRRDVEGFWEKNPSATLEEWKAWCQSYRLGGRGARVENILVTKSKADSIEEYKDVAKHDGDAQRGQFKRGAKHRGYFIYERPAPTKKDAQHTQIEVRPVFVFEGKQSVHEELRQHLGWKIHGYFESGCQVSLEKIWQFREKTYPAGEYILKSVWANRNAELKHPQHGEIGPVGLRILLDAGFKRIGNKL

SEQ ID NO: 7788 - protein, 1063 aa, unidentified
  REGION 1..1063: note = Description of Unknown: Cas Enzyme sequence
MGEETGVLKYTLGLDLGSAAIGWALVGLDSNHSPCNLLDAGVRVFEQGVEGNIEEGKDESRALARRTARLQRRQLRRRAARQRELFRLLQSVGLLSASDPAIDDFSLQRHEILNQLDRELLNGLKACQSASDYLQSEQLLPYVLRKEALERKLEKYELGRVFYHLCQRRGFKSNRREGGGKEKREELSKVKQNISTLRHEMGEKTLGAYFAGLDPHLRKVRQRWTARDMFEKEFEAIWERQSREWPDLLSGALKSEIARLLYFQRPIAKQEHLIGHCELEKTERRAPRASLDAQRFRLLKNVNDLKIIPAGSSDEVCLTGDQRQLLLEYLEVHGGVTFVELKTLLALPARTHFNLERGEKSIPGNRTNTHMLAVFGERWQELASESKDEIVEMWRRGESEEKLARYGQERWALDENSAKLFAGKHAEDEYCNLSLKAIRELRPLMEEGVAFTMARMALYPEQRNEPREFLPLVKEAVPELHNLALERALTEVRKVVNAILRKYGKPYSIRIVMARELRKPRKERQAAAKRKRQNERERIALKARILKEADLPTPSRDDVEKARLWEECGGICPFTGRTVELSALLGPESQFDVEHIIPLSRCVDDSFGNKTLCYHEENRHVKRNRTPWEAYRGDEERWNEIIRRLKSWKPRNVAKLGRFELKSTEEVEGFAARQMNDTRYTTRLAVDLLKTLYGGLHVVEADGSARQVIFASSGMLTATLRRVWGLAAILREALPSANGENRGKPRSDHRHHAIDAIAIALSSSSTIKRMNAYAATALARDSGTRVFRGLQSPWHDFVDSIRPHILSMRVSHRPEHKMSGALHNETLYGRPYVRDGESLVHLRRSVKGIKPDQIANIVDGAVRAAVQRRLSEHGGDVGKFNPEIPESLPYLESKRGRIPIKKVRVKEIKKGLMELRNNRFVELGEIHHLELFMRRDEKGRERWTHVPVSLMEASQRNAANRRNSHLEAVVSRTMKDKPEAKFLFSLMKGDIVEMDHAGDRELFRVKKFYAVGQIWFTHVNNAQNDADQQRDRTRWSKSPNGLMQLDAHKVTIDLLGKVHPVHD

SEQ ID NO: 7789 - protein, 1087 aa, unidentified
  REGION 1..1087: note = Description of Unknown: Cas Enzyme sequence
MKYTLGIDLGITSVGWAVINNDLNRIEDLGVRTFAAAEDPKTRAPLAEPRRLARSARLRLRRRGQRLHKIKALFVQYRLIPPEFNADVFVTESGKATPWELRVKGLDEVLSGEELARSLFHIAKRRGYKSNRRSEAEKKEEGAVTAAIRANAALLAEKGYRTIGELFASAETFQDRKRNRSGDYAHCVDRDSLLHEIQTLFQQQRELGSALACTELQAEFEKLFSWQLPFASGDDILSKVGSCTFEKNEKRAAKNCYTAERFTLLSNINHLSWYADGVKTLPGNTQRKIIIAAAYDKCKLTFKDLRKALKLEPDVCFTGLDYRRDAAKCETRTFCNLEGYRECRRIAEEAGEWIDIQNAPDAIDDLAHALTFYKSEEDVVRFLAEKQFTESLCRAAAASAGFRKPIHLSLRAMKKIIPFLEEGLVYSEACELAGYDHSNAANNGEKFRKLPPIPSDDVRNPVAYRALTQARKVINAVIEKHGSPAGIHIELAREMGKGAELRKKIERQIEDNRKANAAYDLQYKEKYGVAPRGDDRIKMRFYNEQGCKCAYSLAPIDIDRLIGDPGYVQIDHIIPYSRSFDDSMTNRVMVLTSENQNKADRTPYEYFGHDEERWQRFVAWVQNTPGIDQRKKAKLTTTESADVERQQWMPRNLIDTQYISSLMADHIRRNLLFSDFAGKLPVICVSGRITSLLRGMWGISKVRADNDLHHAKDAVVIACISQRMIGLITRYRQQRERARWQPGQKFVDTETGEIIDFKFSFPLPWSGFRKELDARLLDDPEAALAVLNLPSYADGMVPPAVFVSRKSDRKASGPLHKETIRSLRQYPDGTKKVVSRIQLTDLKLSDLDRLYAPETNEKLYAAIKERLIACGGNAKKAFEDTPLRKPTKDGIPGPIVRAVKVAETNFSGVQIRPSRPRRVELPDIQITNTLDVQLRTGLAGNGGMVRIDIFQKEQKFYVVPIYTLDIAARKLPNKAIVQGVEEDHWIKIDDTFDFVYSLHSYELVKIVDSKGIDRFGYYSKCNRSTGAIDITCPNTSKVIPSIGMRTIKSIQKFEVGILGDYHPVSKETRRGMANGRDRESREAVGQE

SEQ ID NO: 7790 - protein, 1006 aa, unidentified
  REGION 1..1006: note = Description of Unknown: Cas Enzyme sequence
FSDGRNPKDGQSLAAMRRVPRAARRRRDRFIQRRDWLMTLLIRHGLMPEDEAARKALEGLDPYGIRGRALNERLEPHEIGRALFHLNQRRGFKSNRVADAKTDDKDKDRGKIATGAEQLKQKLKDGGFETLGQYYANIPAGPERQTRTRINGKGTTAAYDVYPQRGMLEHEFDVIWAAQANHHPALLTPAAHDTIRTTIFHQRPLKAPVVGRCTFFPEEFRLAVAHPTAQAFRIYQELANIEITEGLERPRKLTLDERDLLAAPLLAGVDLPFSKFRKALDLSGAAKINLEEGGRDKLKGDESARRLGDPKSGRLRRLWPDLSVDMRAEIIAQLTEEGELETLKNWLINTVGAWPEEADDAAGFRPPEGHIRLGLTAATGVVDELKRGHPETGGVIRYHEALARAFPNLHHSDLRTGEVFDRLPDYRTVLERHTIGGTGDPADSDDKRLGRVPNPTVHIGLNQLRRVINALIDLYGPPRQIVLELARDLKRSKDDKDKAQRDNRKNEDANRRRARDLEDAGYPDSAANLRRLRLWEDMGPMPRLCTYTGKPISFAQVFSDEIEIEHILPFSRTLDDSMANRTLAYREANRGKRNQAPDQAFHGEEYEAIQRRADALPRNKAWRFKPDAMERFENEHRGFLDRQLNETRHLSKLAREYVAGLVDRERRESNVWVVTGQLTSLLRARWGLNFSNVKDRNNHRHHAIDAATIGVIDRGLLNEMARRAGVKEERDQLAEITKDVPEPPGFVAAGRNFRDNVRERVQALIVSHKAEHGKGGALHEDTAYGLVDPAGGEDGNLVYRKALDSLTAPEIGRVRDLNLRARLIDLLDSLGGKKAEAKALADALTAFGRDNDIRRVRLLKSEAGVVVIRDKNGAPYKALVPGANHCMDIVERADGIWRGHAATVFEVNQRGFTPAWRSDPDARLIMRLHKGDLVEVEDNGERRIKRVVRINPSGGRLYLAAHDEGGELAKRHDDADDPFRWDLASISKLKERGCRIVILSAASQRI

SEQ ID NO: 7791 - protein, 1068 aa, unidentified
  REGION 1..1068: note = Description of Unknown: Cas Enzyme sequence
MNAKIDTAFDVGHDSIGWAVLQKNGNRPSDINVLGCGSVVFRADDCLVSSRRAYRRQRRHIRSTKQRIARMKIILKHLGALTEGELNQPGCAWPWQLAARVLQGGKLLTWPELWDVLRWYAHNRGYDGNRRWSAAEAAAQNEDSEKEANARTLMGKHGTQSMAETFCAISGIDPLGKRKSCNLPGDKRPKGQNAAFQREVVEGEVGRILQAHVGKLKGVDANLEKALFFDWRAIACPGLKLPKRFEGGLLFGQLVPRFDNRIISICPISGQKVPTRNCPEFLNFRWAMQLANIRVGKHSDLELRLLNRTERTAVDQRMRKRGYLTAKELKDVVRDITSCERGNLDTMLMHPDAKEALLLDPVQKLICSDDLQPFWKLLPERLQKRLRGQWRRGKKFTLAQIRHQLESLGDANAFDAALQHQLDTHNSNVKKKDKQTTREELLQRHYPPKPLKLDGRAAFARHLLKQAHEDILAGKAHPKEEGGCLFLSEEIREKQLNREVADQTNNHLVRHRLLILERLLADIIKEYAAGKKERVGKLTIEVNRDLREMSGKTAKRIAMDLGSRIANHHHVAEKLEQAFAEERNGRNIQITAGLIRKGRIAEDLGWQCPYTGIDYEPKDLVTRRVDKDHIVPRSERASDSLDSLVITLSAINKWKGKRTAWQFVEQEQGKPVPGLPNLSIMSLTRYKQFVEALESFKGHDDDKRRKKKRKELMLLPQYEEKEFVPGDLTQTSQLVRLGAQVLKRAFAGCEEKPSVISLPGPVTGTVRKAWKLLGCLGLANPQVLDENGGVKTKTDIRDITHLHHALDACVLGLASHFIPNNGRVWELIVKRNLNDLEKQQLQALGIFDFNAQRRFEMRELDDKFKDQIRQRLAEKRVVQHIPARMDGLRVEQNTWRVVAIKDNEIMLRQRIRQPDGTRPEKVTEEKPGKLLGPNPMNGNGKLAKNKGALVIPDNFGVALDPQPTVIPFHKVWTRLQELKNANGGKMPRVLRNGQIIQVPKGRYRGIWRVFSAKASLTLDLGAPDKVRLENKGEGQKREVQIKTLLKDGMAFLKTPLTGIDACPTTSSA

SEQ ID NO: 7792 - protein, 1055 aa, unidentified
  REGION 1..1055: note = Description of Unknown: Cas Enzyme sequence
MGTGGARSYRLGIDAGSNSLGWFVVWLDANSDPAGLGPGGVRIFPDGRDPKSKASNAADRRFARVMRRRRDRYLRRRGNLMALLIKHGLMPAEDTARKALESIDPYALRAEALDKPLPAHHVGRALFHLNQRRGFLSNRKTETGDKESGAIKSAADKLQTLMQELRARTLGEFLHWRHQIRAPVRARSQATGTTAEYDFYPTRPMLQHEFDAIWTAQARHHPSMTEDARGAIHHAIFFQRPLKGQPVGKCSLDPASAKDDIEGFRCSWAHPLAQRFRIWHETRNLKVVETGRPVLPLRKEDRDRIALALLQNNKLRFDKIRSLLQLPPEATFNLESEKRDLLEGDETAAVLSLKRYFGKAWRGFSLDRQIEIVTRLVDETDETALVAWLTAHTGLDAEAAERVGSAILPDGHSRLGLRAIKKILPFMEGGMTTAEAEDAAGYKEVHSRDGELALNGRLPYYGERLQDDVLGSGDPRDNNDRRWGRFPNPTVHIGLGQFRRVVNALIAQYGPPSEIVVEMARDFKLAPRKLAELERQQAENQRKNQKRAAEIGKLGQAVNARNLLKMRLWERQGTMVKECPYTGEVIGIERLLSDEVDIDHLIPFSDSWDDSAANKVICMRYANREKGNRTPFEAFGKRKGQPYDWRAISQRAATLPRAKRWRFDPGARARFDKSGGFLARQLNETGWLARVARQYLAAVTDPYKIHVLPGKLTAMIRRKWGLNDLLPDHNYSDAKNRKDHRHHAIDALVAALTDRKLLHRMSNAYDEDRQKIEVPLPWPTLRADLDAKLKTMIVSHKPDHGLQTRLHEDTAYGTIKEPDKEEGANLVYRKNFIDLTENEISRIRDRRLRDLIQSHVEREKREGRDIKSALSAFAQRKDIPGLAHGIRHVRLTKTEKSAYLVPIRDKSGKVYKSYSAGQNAFVDILKSAAGRWIASATTVFQANQTDRDANQNMQPPESAPDFVMRVFKGDMLRIDHDGRTKLVRIVRLSPSNNLLYLVAHNEAGVLQTRHNNADDPFRWIFANFDKLREWNAQRIRVDELGRPWRINPDEAARSL

SEQ ID NO: 7793 - protein, 965 aa, unidentified
  REGION 1..965: note = Description of Unknown: Cas Enzyme sequence
MSIIPTSLQSKINEFLPTIRIGVDFGEHAGGIAVVRENEILHGETFIDFHKADLEERRGARRGRRTRQAKRMRLARLRSWVLRQEIPRVIPGGVERGGKYLLPDPYIILNNKKFWVRPDTFQQEKKDPKQTVSWLDLAKNGDVDACGFVRALTLLFKKRGYKWDDRAVSEMNDMQLKGFLDHARIPSEATALRDEIMREIQRRTENPGDPVRGRKKVGPLELTALLEQACSRLSQPRVAEHRSVKEAELKAVVDGFGCSKLPPETLGRWKKELAALLNKVIRPARFDNRVRSGCAWCGKKTPRKAKVREIAYRAAIHNLRALTGGREGALPDEESRQFLDWYLDRKGAPGLATIKKRLLKLNYRQAGMANQIYDLLKNEHPKGRVSLCVPHLEMAAQGKTMKDAGVDWQTISTRNAPNPSREQHDARVLHRLEQIVFVKGKRGDEAWRHGPVTLISLEVPEPQTERAKKGQVPERKSQTFKERLLNEIAGRCIYCDQSATDRDHIFPRSYGGPDIWDNQIATCVNCNQTKGNRTPFEYLRGEPARWQEFKRRVNGLSLAPRKKQILLNESEEFPGGDPTPFARVGARPRQFVVALQKLFTNYGVEPPTLNYVTGRPHIQLVKGGLTNKLRESWQLNSQGEINFGEKERWDLYNHVQDAAIIAACPPHTWRDRIFIHHAIKPGMAVPEIAPDWIGFLQSRQHPTVRILGRYPISWKRSLFKETLWQEPANIQAKKGVVYMPVTRIAASVILKEGENEGIVSPFYREKLKQLVKKLRLEKLDTIPADELSRELPGVRRVKVFRQKVSGVWVSITPKDGPMRKMIVAPESASEGAVYWLNKDTDDELGISIIRPRTLGLFGVSRLDPPIPKGAKRLGAWRRHQMLWLGADSKNGCGEGWYRLKEFSAQDVKLLPENAMPTEIALRLHLKRNGSTEKGMFLKERKLGRREILKFWLERPRRNFRKPPPV

SEQ ID NO: 7794 - protein, 910 aa, unidentified
  REGION 1..910: note = Description of Unknown: Cas Enzyme sequence
MDKTDYVLKNKPEPASNEMVWAFDLGKGSIGEAVRRGNEFLHKASLLIPAEFAETKTAAGRRRMFRTREAHKAREQWLNEVMQAAGIEILKGRQVGKVDDKWIQTAKGDYRLEREFPPRKFQKNKDGKLEPVIYLDGKAKDGAPAKTDEDFSTCYNSALLRIKLLRGEELKPWQVFKAFHSAMQKRGYGKVAWARREQKRLGKSEEDIEKALAKKDPAYREAVEAWPKFKQDVPDKLYHFPAYYDAIKMGLWKAGPPEVLLGRTDCQAQSTRNVRFDRSDVEKEIRALVDGAAKHYHALKGKAEYLLYGPAGKAYASYYPDLREKHDLKEGGENDWQGVLGQKIPRFDNRIVNDCSLLPRFQVCTVHFRFDGKGLPKPESLLAAEVTFLWKLKNLRFTRGDQGFLTPEELKQIFDFPDPSGYRVEAKTWGKFAKQFKWDDSCLPKPIKFPKGKPQNREALTAWFAAQIADTQVLHENGSVEKLKPDEKASIFSEVLLRSYELTPSKLCILLDDLGGRPLPAQNEVEAPKPKGRSRFSRPALRLLREFVLKGLSPDEFRREQETKIPADADPKKGFVRDDLKSFCKERMGNSWQKAYIPNERLAMQVLRAGTTRAERDKAIGDLIAEQNDPIVRHRLSVFTTRLKELEKITKDKIPQFETPDYVVLEFVRDNLPESFLGQQAQFDYGKWARDRKNEAKEALEIVKELGCTSRDAVQKYLLLRSQGFQCVYFPNGSLNINATQKQLSDSPCVYTEQKIGLANLDDLVIDHIVPQQGGYNGPDAIVNKVVTTRHVNEQMKKCRTPFEWFQQDMPEKWAAYVKRVSLLQGALGKKKVRLLTQPDASELVQKYTALAETAWISKLAQAILCIHFGWPFALDEERRRKITVISGGLTGRVRRMYDLNRVLNPDAET

SEQ ID NO: 7795 - protein, 1092 aa, unidentified
  REGION 1..1092: note = Description of Unknown: Cas Enzyme sequence
VSAAIESTQKYVLGLDLGSASLGWAMIALDQAGDPTSLIRTGVRIFEPGVDGTSLEIQQGKDQSKAVDRRTARLHRRQLRRRAARQRELFQLLQQSGFLPTPESGGGASSEQRHNILNLLDQEITRKFEGVPGNASFAQMPLYLLRKRALDHPLEATELGRVLFHLSQRRGFKSNRKETKKSTTENEDQGQVKADIHSLELEIQASGSRTLGEYFSGLDPHNPTQKVRRRWTARKMFETEFEAIWAAQAPHHPSTLKPELHDRVARLLFFQRPIAAQKHLIGTCELERGDDTHPPRRRAPWAAMAAQRFRILQKVNDLRLLDPRTDIASPLTDDERMKLYRLLDSEGTQTFNKIRKHLGIPKEVAFNLERGGDKELQGNRTQKSMLKVFGTRWHEFTEGKQNQIIENWRNSESDDALMQEAIGHLGLDAEAAARLLSEKAPGDYCALSLTAIGKLIPMLLAGRSFKDAETEVYGSRFSGLQVHDKLPQVREALPTLRNPAVERAMTELRKVVNAIVRENGKPFEIRIELARELKKPRGERQKDTDKVRKREKERISVASRISQEFNISDPGRSLIEKALLYEECGGICPYTGLSIRYSSLVNDSEFDIEHIIPRSRFPDNSFQNKTLCHQSMNQLKGNRTPYEMYQGNLEEYEKTLDRIRAWPVKNRGKLDRFRVGEPGVKDDNTLEGFSSRQLNDTRYTSVAAAKLLAALYGGRDLQTTEGPRQVVFATSGSITAALRSSWGLEAILRELVPPQPGEERGKPRIDHRHHAIDAITIAATRPPVIQAMARDSARSIDPRTRPRVPEPWKNFVPSIRPHIEQLLVSHRPEHKLSGELHDETNYGRPYQENKKTMVHVRKRVSGLSAKDLPNIVDSAIRQAVMEKADEIGGDLAVCELKSDWPVLSTHDGSTIPIKKVRLKKVLDVTPIGNDTRRRYVAESSNHHIAIYVQLDAHGKEKRWEGVIVSLLEAYGRSSAAKRTEAYKRRHHIAPLIHRTLPGAEDLQFKFSLMGGDTVELHRKCDHAASACTPEFYRIRTIAANGQISLVRITDARMKKDIQAAKDWWSPTADTLRKLDCRKIVVDLLGRRRYAND

SEQ ID NO: 7796 - protein, 1079 aa, unidentified
  REGION 1..1079: note = Description of Unknown: Cas Enzyme sequence
MNIKRKISNGADANLQISFDVGHSSIGWAVLEKTGAQAADISILGCGSVVFRADDCLASSRRAYRRQRRHIRSTRQRIARMKILLTHLGVLTEAELARPGCAWPWKLAAQILKGGRLLTWPELWDVLRWYAHNRGYDGNRRWSAAEVDAQNKDSEKEANAHGLMGKYGTKSMAETFCALCDIDPLGAKKSANIPGDKRPKGQNAAFPREIVESEVRQILQKHLGQLKNLDISLIRALLGNDHHDKLAWQAITCPDLKLPRRYAGGLLFGQLVPRFDNRIISTCPISGQKVPSRNCPEFLNFRWAMQLANIRLGKKLDRELRPLSGPERVALNQQMRVRGYLTPKELTDAVRHLTNCERDNLDTMFMHPDAKEALLVDPVQKLISSDELQPFWNKLPEQLQKRLRGQWRRGKVFSLRQIRQQLELIGNTSTFDKELQYQLDTQNTKAKKKDQPVTPEKLLQKHFPSRPLKLAGRGAYARHLLKQAYEDVLAGQPHPKEQGGCLFLTEEIRDAQLNLATAKQTNNHLVRHRLSILERLLHDIIKEYAAEKRERIGKITIEVNRDLREMSGKTAKEKAKDLGSRVANHHHVAEKLEKAFAAENLKRPITAGLIRKARIAEDLGWKCPYTGHPYEPKHLVTRYVDKDHIVPRSERASDSLASLAITFSAINKLKGKRTAWQFVSEEQGKTVPDLPNLSILSLTRYRQLVESLESYQGHDDDKHRKKKRKELMLLPKYEEKEFTPGDLTQTSQLVRLGAQILRKNLPHLTTGDVISLPGAVTSTVRKAWKVLGCLSLANPQVLDENNSVKSKTEVRDITHLHHALDACVLGLSSHFIPNNGRVWELIVKRNPNDLEKQQLAVLGVFGFNGDSRFEMHDLADNLKEQIRQRLAEKRVVQHIPARMDGLRVEQNTWRVVTQKDGEVILKQRIRQPDGTRPEKISAEKSSKLLGLNPANGNGKLAKNKGVLVIPDNFGVALDPQPTVIPFHKVWTRLQDLKKANGGKMPRVIRNGQLIRVTEGKYKGVWRVFSAKNNAAGMALDIGAPDVVRLKNKTESHKINVLLSSLTKSGLEPFHASFTGVSSK

SEQ ID NO: 7797 - protein, 1113 aa, unidentified
  REGION 1..1113: note = Description of Unknown: Cas Enzyme sequence
VVLGLDVGLEGIGVCVRRSREILYAKTWLYDVPAAARLEGRRQLRGARHCRANRKTRLNRLRMLFEKHGLTWLAEDSSALLNSDPFILRHRAVASANGLASREALSIAIRNCVAHRGHDYDYFSDEGSYPWGDSTEFKKVMKELETLWLTAKEAEKAHGDAEFFDWKEDEVLTFREAVSKRIAGPELITQHLAEHAKGSMNHVRKRAKGEAFPRKLVRAHLDQIIDRHQHLIADCAAFRTALFLGNKTTAEREHSIFYYHRKTKEEMKGHFEQKRARCPYAPWLNLGNPPTDSRGNIEIRHWSLLEFATMRDVEVQEKKTKKGTVPRRWRVPLGAELVKKLIDWQAAHPNCRKASDIAEIKDEFITAIESAHRAKLAPEGGKSGSELNKHFFTTFRDLLAPSMANRARNAPMSCAAAARLFSIATARGFEREAVHACLENCQPGAEIVSLYNFRRQPMADLYGVYPQVEFLLGQRVKKAKTHPKQGMPKNRGDLAVKGKLQLLFDQLFDGEQAAPDYCVVEVARDLPRNKKQKDEREKLIAGNRERREKLIEKYKEYLPKDGTFTGSMRRRIELHDQQGGICPFTGEPLGDNPLSGALDVEHLYPDSRGGLTVDENLALTFVRLNRSEKKDRTPREYAAAIGKSFDEILTHSVAMRWGKFKREVFAWVDGAKIPEFGNTTRVAQLARQLTAEAARWMQCTDADKHAESIGNPTGFQTAACRRAWGLVEKDRDDLTHHLVDAIILAHIPPCEGQNYVQSGGIFQPKLHTQKRRMVLDVLPLGPDPVTVLRLSAHDAAECPVIKHRSTSNKRSMHDMTHFRVLPGGGLAYRKELPDKATLDPHGLRAMLINMGIPLNYRGNDGKEHALIPSNDALEKWLNSDGKEPLRLLNGTPVRKFWKDGGKGSVENDPTGFQAAWNSQGKLMGVKAILGRWESLELWRGWNTKKKRWEYYKRLIPSRGVFKALRSLGYSWKKKSKRPWRDGSPAMAKPLKQELGGELPPHARRAVHPDTKEPIVFYTGDVFRVGITREGKLAKRGETSASSEWVDVAAVMQEGGGRLRFLSMLSREKRGEPMSADDLAFLAGIPPADDSSSYPTQRPPGPSRPSGEAPFGFE

SEQ ID NO: 7798 - protein, 903 aa, unidentified
  REGION 1..903: note = Description of Unknown: Cas Enzyme sequence
MNANLFLTGLVFGFDVGTGSIGYAVRRGSKFLDVGVLICDSKVSDLSERRGLRRQRRTLRSRKARRKWFAEELIKLGLPKPENPPDDPISLRLRALNGESLKPEELHAALTHLFKRRGYSRVPWANTEKIARENTKPKKDDDEGVIKEKVEEKVKEIVKELAGKHPCQLLAERRAEAGKSPKKEWARKIYWPRDILRNEFLAIVEAQKKYFPKLAEKTDWLLYGGSQPKKKGEDTFHVFFKTTEARNPGVLGLRWPRFDNRGPALDSLQPVDQQGRPLHVVRKNKEAFAKAQWELALMNFRVLDTQTRQKRDPRTDFPIFIENVRNEWNKKSKVTETRLKKLAEPFKDKFLLIEGQKPLAPETGGGRARYSSPTLELIRKEIGEGRRVDPPQPILRRKSESAEQALNRYLADIKHPLVRHRLTLFRRILSQFVSQYGQPDMIVLEAVRSLALGQKAKNELNKRNEKFRKEREDAREQLSSNNESISRKAIQRYRLWHEAKSRCPFCQQTIERTDLGHGADIEHLVPRSVVDCNEFYNLTIAHIKCNRELKGDHTPFAAFSGTSQWEGIKANAEDCFSGRKLEIFLSPNAEELIEQKSDLQHTAYIARVIRHIALIQLGWVNKEGRDPTLDKQNTALSFQVTNGQLTSRLRKAWGLNQILHPLPAGKRWDELMDEEQNQFTEKNRGDLRHHALDAMVIACTLPWLAHRTHGARDELGRHGWWTQDEKQRSIAANPVFPKNGQMHDVVKREIEKVVVRHHVSRSSHQRTYDTTIYGRPKQNGVEIPDCYVSREPITALKPADLKSPKTGKSKIFPPLLGDYLALAWECYCETEPAWEKQIKAKKNCLPETFQKRLCFSAFQRWRADGAPSFSWPEKVIIPIKRVGYIGVEADSAVAPASTGTHGY

SEQ ID NO: 7799 - protein, 1267 aa, unidentified
  REGION 1..1267: note = Description of Unknown: Cas Enzyme sequence
MSTVDYTLKHSATAETPYDWKSDPFYTAAVVLGIDIGLEGIGVWLRKGWKPIYTRTFLFETPDAAPLEGRRGLRAGRRCRQAEQRREVMLKKFCADFGLPWVEITDKGRDDGPFRFRWIATRKDVEGLRDVRALSACLRHIIRHRGYDWHAPDDGGDYPWGDEAKARDAIEWAKTAFCQQEHADKLRYILTDCGWADKERLAFENALNHAVEKYKTQGIDAVLAGHFSESKNNLRFPARRHNFPREMVEEHLKAIVERHPQFVGGVKRVQAALHQLHAIINDHRKEPGALALRKVNRCPLAEILFNGPAPKCDSSKNRHIRRFKLLEFLATRTFVRKNGARDLSGPEVFHWLLDDLLEADIQALDSNGKIQRAKTPMREFKKQFVAKHDASGKTELAGDTQSHNGEFFDQLADLLWPKMSELGGRASLCGRSAEALFDYATKEGFSADQIVIRLKDKRFERAEKKMSFYEIRQTAAAGFGIYKQVEFLLGRWKKNVKPGDQPAVPGKLRRVFAQLIKDGNLPPNKTAPDYVVVETVGDIPRNREQAKEIQEAQATRRKFKDKLRERFKDFERGDLSWEETNKRLLLFDQQRGICPYTGDSLGENPLAHDLEIDHVFPRTRGGISEMVNLVLTYRKTNGELKREQTPYEAFGGKNNSAQWREIRGRVLQMQWNGQKREFFLRSEDTPPDWGNMTRVAQLARQLRFEVARWMDIADDDAKVRQFIGTPTGYQTSVCREAWADKLPGDFWPKKNRDNLRHHMWDAAILSHIPPGKGLNHVWCHGIFWGETNRGNIKLLALPELGPDLKQFEKETADQCLVEKIQPAHNKQSRFQQTIYSPPDENGLMWARDPLDKIAGKKDMVGDKLLKLLREAGIDEKQLPTSRFDEWQERRQAQFFTREEAWSAVEALALPAEHQIPAPFFEDWWTDRLKGDKKRVTDKSLRALLAKARVPKALVTDEQLSGVLINRGNPGPLTCKDGTIIRGISRSASTMTPMAVIPHRNHEGETIGFKLATETFIRAEIWTTEKRDNNGKVIIDEDGKPLLAYHRRLIPHPRGLKNLRLRKLQCTGESLAWERALTDTEITELGLKNNAEVKRLRKEYEKKLKLHEKETSKSKVVESELTLAKAEVPPAKPKPPIISLRKIFTGLPPHAKRLTNALGANISRFAIGDLLLVPLTQDAEICQPKQTPYRKFWFRVAALQANGQVKLLIAERKQTKPLTDQEIKDRKQLTPDQEWLIKAGLKQPGDDEVIAFLLRQTHGHDQPPHSIK

SEQ ID NO: 7800 - protein, 1105 aa, unidentified
  REGION 1..1105: note = Description of Unknown: Cas Enzyme sequence
MSVSAGSEHPYVLGLDLGSASLGWALIGIDAIETPVSLIRAGVRIFEPGVDGSALDIQQGKDQSKAVDRREARLHRRQLRRRVARQRELFGVLQGAGLLPTCDVPGAGIGSEQRHRILNALDMALTVRYRTGADKATFDQMPLYVLRKKALYEPLAFDELGRVFFHLSQRRGFQSNRKDVKKKTKEDEDQGQVKSAIYELEQAIQASDAQTLGEYLAGLDPHEQKVRRQWTGRRMFKEEFERIWVAQQAYHPSLLTPELHDRVWGLLFDQRPVSAQKHLVGKCELEPDKRRSPWAALPAQQFRVLQKVNDLRLLQENGKETPLYPQQRAAVFDLLENHGTQSFVKIKQHLGLPKTAQFNLERGKAKELKGNVTAQSMRKVFGVRWEEFSEGKQNQIIENWRNSEKDEDLKREAIEHWGLDEASANVLLAEKAPADYCALSLTALSKILPLMRAGKSFKEAETEVYDNRFSGAAVHPFIPVLRPHRKHFHNSTPPPQDPLMASIANGLRNPAVERAITEMRKVVNAIVREHGRPYEIRIELARELKKPRSKRLDETANNRKREAENRALAKRMHEECGIPQPPSRKDLEKAKLWVEQATGAGVCECPYTGKKLPFSRLFDDDNGFDVDHILPRSRHPDDSFQNKVLCWGEENRMHKRNQTPYEAYAEQDQERWQEILARVTRWKNPGKLRKFEIRSTDELEAFSSRQLNDTRYTSLLAARLLSTLYGGRDVTENGKNRQVIFASTGAVTATLRRNWGFEQILRGIIPAEPGESSGKPRTDHRHHAIDAIVIALTRNNVIQAMARASALEAWQSGTRSWRHVPQPWRTPDFFRSVEQQVAEVLTSHRPEHKVGGELHRGSNYGRPYMYNGASTIHTRKLISALKIEDIDADDVIVDRVIRDILRAKLAELGGNPKAFEKPENTPYMTTPAGKRIPIRKVRIRETRNPLRVGEGPRERYVASGGIQHVELFVARDEKRREHWLSHVVQTTEMYDLFPKRDHRPGRPKAVTKSIPIRRQMPGQPEAEFLFSLLKNDTIELEKAGCREIFRVKKFEATGKITFVPINNAMPDTLQYGTGSAWSKMPTTLKVMSPQKVVIDLLGRVHPAND

SEQ ID NO: 7801 - protein, 959 aa, unidentified
  REGION 1..959: note = Description of Unknown: Cas Enzyme sequence
MNATPKKTSASSNPELQLAFDVGHSSIGWAVLEKSGAQASDINILGCGSVVFRADDCLASSRRAYRRQRRHIRSTRQRIARMKTLFRHLGVLTGAELDKPGCAWPWKLAAQVLQGGKLLIWPEFWDVLRWYAHNRGYDGNRRWSAAEAEAQSEDSEKEANARTLMGKYGTKSMAESFCAMSGINPLGKKKSANVLGDKRPKGQNAAFPRAIVEGEVRQILQAHAGNLKGVDTNLEKVLFSDWHAIPCPDLKLPKRYEGGLLFGQLVPRFDNRIVSTCPISGEKVPSRNCPEFLNFRWAMQLANIRVGKNLDRELRELSASERVKLDQQMRERGYLTPGQLKEAVRSITACERDNLETMLMHPDAKEALLVDPVQKLISSEDLQPFWNLFPERLQKRLRGQWRRGKSFSLAQIRSQFESLGDVAKFDAELQKQLDAQNTKAKRKDKQLTHDELLQRHFPARSLKLDGRAAFARHLLKLSCEEVIAGKQHPKEAGGCLFITEEIRQQQLSRELADQTNNHLVRHRLLILERLLADIIKENDFADGKEERIAKITIEVNRDLREMSGKTAKEKAQELRSRVADHHAVAEKLEKAFAEESKGKTIPITAGLIRKARIAEDLGWRCPYTGIEYEPKDLVTRRVDRDHIVPRSERASDSLDSLAITFSAINKWKGKRTAWQFVLDEQGKPVPDLPNLSILSQSRYKQFVESLESFKGHDDDKRRKKKRKKLLLLPKYEEKEFTPRDLTQTSQLVRLGAQVLRKNLPHLTAGDVTSLPGSVTGAVRKSWRVLGCLAAANPQILDGNGEVKSKTDIRDITHLHHALDACVLGLASHFIPSNGRVWELIVKRNPNDLEKRQLEALGVFGFNAENRFEMLDLPNKFKEQIRQRLAEKRVVQHIPARMDGLRVEQNTWRVVAVKDDEAVLKQRVRLPDGTRPEKVAEEKPSKLLGLLRSHLYRLHPRDLV

SEQ ID NO: 7802 - protein, 1069 aa, unidentified
  REGION 1..1069: note = Description of Unknown: Cas Enzyme sequence
MDKTDYILNEKPEPAANEIVWAFDLGKGSIGEAVRRGNEFLHKASLLIPAEFAETKTAAGRRRMWRTREAHKARERWLNEVMRAAGIEILHGRNYDAAGNWKPGEPADKRLEQEFPAPGDDTCYTSCLLRIKLLRGEKLEPWQVFKAFHSAIQRRGYDKDIPWKNREARKAKDADDDDAGTEQRMHKFEQDLEYMAPGKTHFHFPAYFDAYQMGLWNPAKPDDLKLRSDCHAKTTRNQIVPRKKVEAEIRQMVEGAAKHYPALAGKADYLLYGNALQSYASYKPELRQKFNLREGGATDWQGVVGQKIPRFENRIIAKCVLIPRLNVCKLREGEKGQPHEKSLVAVEVAFLMKLKNLRVQRPGGNGWLSAKEIRGILENPKRTDWKFTKSAWKKYCVTIGAIPLPGHDEIESPRFSGRSRFCRPALEVLKRLILSGKKPSEFLQEEIASLNENKDPLKGLIEADLKFISDMAAKNDAWEGIYIPNQQLDALVELSNNSAEAITCLIGQQNDPIVRHRLSVFYKRLRELEQTTKSRPDQVVLEFVREDFMGKKAKIEYFSFIKRRAEERIKAREEAASVGATEKSAGLKLELLRAQDGCCLYTNEGLVPSKLDEYQIDHIVPRSKGGPDAVVNYVLTTQKANEAKADRTPYDWFHQEMPDKWDAYVNRVRSRATHLRNKKVQLLVALNAAELADKYTALAETAWIAKLAQAIVGLHFGWRNGVDENGNKRVTVISGGLTGRIRRKYALNQVLNPNAKTEEEAEKKNRDDDRHHALDAMVISFIPSWARDAMKAKFFRFPEAIHQNAKGFFEKEISSVVPQSLCFEKSALAKTIYGARGEGEDKVIVQRSELLQLAFKSIAPGKTKFDLDYLGDQIKAVRDEHIQKLLATFHATMPDEGAWKNFCEHFNLSHKDGSAGSRVLSVLMNVGQPKEYKDLSKDGTGSYRKALKGHKGQIVYVETSVDKKGATKEAAQVRPVYAFESQAQVAKALAERLGDKCRVIGFFQSGCLVVVDKPVFHVKQPLPPGKYRLNTIRTDSKDVKVTTADGKTHPEIPRYSLGNMIAAGFKRSD

SEQ ID NO: 7803 - protein, 1009 aa, unidentified
  REGION 1..1009: note = Description of Unknown: Cas Enzyme sequence
MSETGSLAQNYVLGIDLGSASLGWAAVSLDETGKPSGLLRAGVRIFDPAVDGDYEKGQDESNAVARRTARLIRRQLRRRAARQSELFGLLQRHGLLPPYEGAEADASQQRHAILNTLDKQLAARWESSGGQTAADLPLYLLRKTALDAALEPFELGRVFYHLSQRRGYKSNRKEQAAKKETPGKAKKEGDLGVVEGDIKNLLEEMSRAHARTLGEYFASLDPHTQKVRRRWTGRKMYEDEFAAIWEKQAGLHLELLTEDLHREIKHLLFYQRPIKAQSHLIGGCELEPGERRAAWATLEAQQFRVLQKVNDLEIILPGQVNGIRLTAEQRQTVLGLLEDSETATFDKIRKALKLDKNVGFNLQRGGETKLKGNLTNTHMKAVFAERWPEMPDAEKMQVVEDWRTIPQDDSLIRRAIEHWKLDETGAKWLAGKPAPSGYCMYSRKAIRKLLPLMAAGMRLKAAENDIPEYRNRLTGGEVHDRIPPVRDTLKTLRNPAVERALTELRKVVNALIREHGKPAEVRIELARDLKKPRHERAKATTQNRDREKERETMRKRIAAEFGEGFRPSRADVEKALLFEECGGECPYSGKRFPFSSLFGENSPWQVEHIIPFSRMPDDSFQNKTLCEVHENQYKANRTPYEAYSDPQQYEDICNRVRNWKKPNLGKLKRFELRTTEEVKDLSSRQLNDTRYSSKLACELVGSLYGGRDIQTEDGSRQVVFVSSGMVTATLRRGWGLEGILRELAPAAEVDKKGKPRTDHRHHAIDAITIALSRPKLIAALSRANERDPYWPMTGRRFPRIDPPWKDFVDSIRPQIEQMLVSHRPEHRLTGEMHKATNYGRPRKKDGKIVIHIRKQVDGLTAADIGSIVDEKVKEAVEAKATHFGGTLKDWTPNKAQDDWPFLATKTGKKIPIKKVRIRETLGVETIGKGEKERYVALKNNHHVAIFALLDEWGREKRWESEIVSLFDAMERKRNKKPLIQTSYPEPGDYVFKFSLMGGDTILLHKDCNH

SEQ ID NO: 7804 - protein, 1045 aa, unidentified
  REGION 1..1045: note = Description of Unknown: Cas Enzyme sequence
MKDYVLTNAKQPPAGKDTFFNGLVFGFDVGTGSIGYAVRHGSEFKDVGVLICDSEGSDLSKRRDLRRQRRTLRSKKFRRQWFDKELVKLGLPKSETVLDDPISLRLRALNGDALKPEELHAALTHLFKRRGYSKVPWANVEKATKETAKPKKDDDEGIIKEAVKEMKVKLGDKHPCQFLAEEKVRVGNSPTTNWARKIYWPREVLRDEFLAIVAAQKKKFPKLAEKTDWLLYGDSQSKEKNGETFHVFFKTTEARNPGVLGLRWPRFDNRGPALDSLQPVDEQGRPLHVVRKNKEAFTKAQWELALINFRVIDHATGKLTSPDNKSLIRLREIWESGKRKKKKTPMDSDESESIKISEKVLQRWEKDFSQKYKLVEGQQALTPQTGAGRARYSSLTLERIVAGEHFNPPQPILRRKGENAEQALNRYLADIKHPLVRHRLVLFRRLMMQLVSRYGQPDMIVLEAVRSLALGQKAKNELNKRNERFRKERENAREQLSSNHESFSRKAIQRFRLWQEAKGRCPFCLQPIERTDLGHGADIEHLVPRAIVDCNEFYNLTVAHIKCNRELKGDRTPLTAFGGTSQWEGIKANAENCFSGRKLEIFLSPNAEELIEQKSDLQHTAYIARVIRHISLIQLGWLNDEGRDPTPEKQNPALSFQVTNGQITHRLRKAWGLNQILHPLPPGKRWDELTDAEQNQFTEKNRGDLRHHALDAMVICCTLPWLAHRTVRVKYPATGEDGWWDLDEKTQRSVARNPLFPNEGQMHEVVKQEIEKVVVRHHVSRSNHQQAYATTLYAKKAKDTYVAREVFTSLTPKNLGSIWPETFASYCEAAWRRYADEAANLEGELKRTKNCVPENFTRKLCFSHFQKWRQDDCPEFYWPKEIIIPIRSVRLISLKDDTAVVPFSPGTHAYVKRTGFKEVQIFLAEDEKSFVPVFIPYWKKDKPLCVKPIKENTKPVATIRRGGIVTLKKLSGPKNPLGNYRVVSTMQAKINLVPTHIQDKPEALLASGFLANGVNISWQTFFNAAGYELPHPPPVKPQPSGAAEA

SEQ ID NO: 7805 - protein, 949 aa, unidentified
  REGION 1..949: note = Description of Unknown: Cas Enzyme sequence
MGKRYKLRRNKLIYVLAKLNMLPDQFQLKSDFPDANRIQDIELLPIIRGTEQRDSLEHYELRAKALHNKIELKQLGSILYQYNRLRGYSGGGYADENKKEKKNDDEEEKSKYEVYTKTITLVKVEKSDSTFRVRSGNNKGSELPLYNVTVFDEGQELCGITELQNLQDKINSEIELEIRIKRNKTGEKVTFALPQKTNWRRQMEETEKLLKEKGYFPCQLFVEELRQNKWSKIRNRVFLRQQFTKEFDAVWEEQSKYYPILCNCPTQILSDIVNYIFPGQSDSQKKLRKEGIEKGLKYIIKEQIIYYQRPLKPQTQLIRKCQFEKDETVIPVTHPLFQEFRCWDQINRLFVTSKQDVWNEKKKKFILKYKRRYLTDEQKTTIYNKLLKQKQLSFNEVAKIIKLNTDISEYLNGLQVKSKLKGCDTIIDIQKIIGDTNLNTTTIEAIWQAIFENAHEGSEYDEHSKRVQSIVAVLPKHIIEESKRIELALLLAQKIRYPRQYASLSEKAIKNILPLMRLNPEKISDEAKNKYAKIKHLIDTGEIIDEELPQDYIVDFVKDNPCAIEHGGLMYAFASSLVYGRHTSEEIKPQLTNYHEIEYIERNLRNPIVEQISNETMQVIKSLWKTYHLNPNELEIRVELARDLKNSAAEREKIAKGQRKNKVINERIKNRLVELHKEINDRNIELYKLWSRQGIEDQPKIKDPNNPTHEEIEKMRIWEEQKFIDPYTLKPIPLSKLFTREYDIDHIIPKSRYFDNSMANKVVCKSTVNEEKDNRTAWEYISQQNSNLNICSISDYLEHVNKFFYGKKKKNLLAEKIPSDSVKRQLKDTQYLTIAIKNELAKIVGSDKVKTTTGSVTDCLRSQWGLKEMFMKLTEHRFKQMEFRDLDENGNIREEWIQNYFDKEKNKHVYEIKGWSKRYDHRHHAIDALVVALCNERYIKRLNDLNTYF

SEQ ID NO: 7806 - protein, 1061 aa, unidentified
  REGION 1..1061: note = Description of Unknown: Cas Enzyme sequence
MRRLGLDIGSNSIGWCLIEDDRRIVALGSRIFSDGRDPKSGASLAVDRRLARGMRRRRDRYVRRRSVLLETLVELGLMPADADEARLVATHGPYALRARALDEALAPCEIGRALFHLNQRRGFKSNRKAERRQKDNESGLIETGVRALDAAMHEAGARTLGEFLARRLERGQAARVRLNGKAQAYDFYPQRAHVTAEFAAIWAAQTPHHPALLTDAARDRLARILFFQRPLKEPKVGLCLFAGKSGVPGDEPRLAKAHPLFQERRLYEEVNQLAITEPGEPAVPLTRDQRDTLVMLLQNHRERTFEQLAKALKLQPGQSFNKASAARTKLIGNEVRAVMKDKKRFGDDWLHLSSARQWQIIQRVQDEEDPATLHAFLTGQCNLSDERAQAVAKAPLPDGHGRIGETATQAILEHLKADVIPYSRAVELAGWHHSDERTGEELARLPYYGELLSREIPPGTFAEKDAANPEIYWGKITNPTVHIGLRQLEKVVNAVIAVHGRPDEIVVELARELNLSEEEKKKHQQRIKRDTEDAQRRGLMLEQAGIPDTGSNRARLKLWEELAVKPQDRFCPYCGAGGPIAIHALFSDAVDIDHVIPYSRSLDDGAANKVVVHRACNRDKGNKTPFERWGHDAQRWDKIAAQVAKLPRAKQWRFGPDAMQRFEVEGGFIARQLTDTQYLSRMAGKYLRSLYPETGEGSRKVQVATGRMTALLRRVWGLNSLLPDHNYVANPHSNAPKNRLDHRHHAIDAAVMAVTTPGLLKRIADAAARAEAQDLDRLFADLPQPWAGFREELGEKVNTVTVSHKADHGRKHPPAPGRDSTAGRLHNDTAYGLTGEMAADGKTPIVVHRVPLLSLKPADIASDTRIPDPALRQALADATRGKAGKDFEAALRGLAQAHPVFKDLRRVRVREPLSVIAIRDKAGRAYKAYKGDANARFDVWRLPNGKWVPDIVSMFAAHQPGGGDRRPHPAAHKILSLRQNDMLAIERDGNPAQIVRVVKFSMNGNIVLAKDAEAGPLKARDADADDPFKYVYSSATGLKGLKARQIRVDPLGRVFDPGPRE

SEQ ID NO: 7807 - protein, 1104 aa, unidentified
  REGION 1..1104: note = Description of Unknown: Cas Enzyme sequence
MRLKMTKKIFGDYYLGLDIGTDSIGWAVADKDYNILNFNGKAMWGIHLFDSGNTAEERRIHRIARRRLERRKQRIKLLQEIFADEMNKVDPKFFERLNDSFFQIEDRKHKTHDTIFNDPSFKDKDYFKKYPTIYHVRNALMEWNEKEKPDIRLLYLACHHIIKYRGHFLFENLSTGDIPPFEIVFQELIETLNSECGTEFESAAMSSIAKEILSDKNLGVKEKTKKLQEIFVGEDFPYLIEELCKLLSGGTANLDNMFGNNDADSKLDKLTFKNTDFDEAITKLESQIPEKIEILTRAKTIYDWALLNDLLDGNGRSISKAKIKTYEQHREDLKLLKSILKEDSEKYFDVFKSEDITMKVNNKNIKVNYSAYSGIHRKGTTDTDICSQADFCKYLRTAVFKKEFGDPAFKNKFADMVGRIENDTFMPKQTIKDNSLFPNALHQHELKEILENMEKHYPFLNEKYESEYNSKEKIIKICTFKIPYYVGPLNQKSERAWLERKEGKITPWNFEDKVDLDKSAENFMNELIGDCTYLKGEKVVPKRSLMYQRFELYNEINTLKIADERLFSIDPRLKQDFIKDLFGIDGSKKVTKKVIENWLRKKCQYHKDDEVEISGIDNEIKSSLKSEKQIRDILGSQMDHKIAEDIIRIITVFGGDRSRMKAKLKTDYSDSEILDPDQIDKLSKLTFKDWGRLSEKFLTGIYAAVNGEEMNILTALERTSMNLQELLSENYGFKKQIDELNKTDNTNNSITYDLLDDLYVSPKVKRGIWRSLRIIQDILKITDHPPAKVFIETTRENQESKRTVSRKNKLLELYDACKKDSSELNNILNEVKETEEGRFRSKDLYAYYMQQGKCMYCGQKIDLNDLSNNNKYDLDHIHPRSLKADDSLHNNLVLVCKTCNQEKGKDYPLKPECQKKMSSSWKILKDKGFITKEKYERLIRTKPFDEDELSGFINRQLVETSQSVKAVAETLKRVFEDKTDIVYVKANTVSDFRNGNNGYHGSDSNDRLKFIKCRSVNDYHHAKDAYLNIVIGNVYDTKFTKNYKNFVQTGGKYNLREMFDYNIERNGVQAWKAGNDGTIATVQKYMRRNNILFTRFSYQVSGQL

SEQ ID NO: 7808 - protein, 1024 aa, unidentified
  REGION 1..1024: note = Description of Unknown: Cas Enzyme sequence
CFDSGTGTESEIEQGKDESRNLKRRAARSVRRNQWRRKRRTLKLFNVLRNHGLLPMGKGIHDTPLDRQELINDLDKELASRISLNTDRVAAHLLPYKLRAMALDEKLEPFALGRAFLHLSQRRGFLSNKKTSGGKDEDEGQVKSAISDLQKEMNDRGFRTLGEFFASLDPEEKRIRQRWTGRKMFVEEFNAIWSAQAEKNPILTDELREEIDAALFFQRPLKSQKHLIGKCQLERGKRRAQLASPEAQRFRYWQKILDLEYRDEYGMVPLSKEQQDALAKELEVEEKLTYAQMRKVLGLKQPRLTKEDKARGVKPIYVFNLELDEDSTDKGLKGNTTSSRIKQIIPDRWNVMQDEEREMLVNEILQFEHEDALARRLEKVFQFDSNTASLLAAVQLERDYASLSKQAIRKVLPLMIEKRIRFASARMEIYGEQFDEERKEDFDFLPPVLKAVKDLKNPVVTRTLTELRKVVNAIIREYGKPTTIRVELARDMKKSRPEREKLSKEMKQQEKRRIDAKATILKETGNKEPRRGDILKFLLAEECNWECPYTGRTITISNLFGASPQFDIEHTLPFSRSLDNSYVNKTLCHVDENRHVKKNKTPYEAYGHDPQRWHEIQERVKRFQGSMAEAKLRRFQLEKIPEDFTNRHLSDTRYISRLAGDYLGLLYGGRIDADGTLRIQVSSGGMTAWLRDEWDINAILNDGGDEKNRSDHRHHAIDAAVIAMNDTNTVRMLSRAAEQASLEGHRRFAKGIIEEPIPNFKRLVSEAKDKINVSFRANRKVSGGFHEETNYSDPHKTKDDKGKVQEVRHIRKPIIGMSEGDVASIVDPVIRELVTKKLEQLGLKDAKKLPESELPYLRSKDGNRLIPIRKARIRKNVGTMTVGKNGRQRHVASGNNHHMEIVALLDKEGNETKWESVVVTMFEAYQRKRSKQPIIQRDHGPGKRFKFSLAVNEYVERCDKDDAKEIWRVRSITGSEIKMTRQHDARPAGDALKGSGNRPSVGTLLGKIKKVRIDALGIPHIVND

SEQ ID NO: 7809 - protein, 914 aa, unidentified
  REGION 1..914: note = Description of Unknown: Cas Enzyme sequence
LKKETSVETMCAFLGVDPLSDKISTLKKYFKGNNVAFPREIVVKEVESILDAHIGRLPKCDANFKELIIGNWRDVVGNGINLPKHFTSDSGILFGQYVPRFDNRIISKCPLCGKKVPTKHCLEYLDFRWKMLMSNIGLSIGRFDATKIERLDEMMKLYGSLSKTTLKRLLSEIFEIAPANFENMFLTEEMEDALILDPVKKAILYMLCPNIARTLPDAEKVKRLWNAIPKFVFTQMFRLKTFSLAQIASLTDSSELENAAIDIFAELVNTGKNQLTFGEVFNSKISISKISGRAPYARELMREASKQVMRGIDPRAQEGAIYRSADADSAEIKLPIDSWTNNHLVRHRLKMFQRLYNDIVNNFLGGDKDKVESVAIEVIKDLTSFSGLNIKEKAREIEKLVRQHKNISEFLEKEYPNLETSGGIIRKARIADDMAWKCPYTNKTFSPQELLLDGTMELEHIIPRSVRPSDSLDSLVLTWKEVNDFKGKRTAYEFIKECQGQCVPGRTNLCIVSLKQYEDFVGNLKVSKYSSKSFGDERKTNDEKRVAKRKKLLLTSQYDKRNSEFLPSDLTQTSHINKLAFRAVRQLYAEGDYTPKFVHTPGSVTSAVRKNWNLMPCIGDICPEIFKSTSNGGKYLKTKDEIRDITHLHHAIDAITIGISAVIFPKTKSFNEAVVKRHPNSKDIEELKKTGLFVMSQNGSWKLIELDSHILGNVKDKISETRVVKHVPAKMSGLGIEETLWGIIGETEKGTVKIRQFAEVKDGKFRRSRKITEEPKSKLLGYMPKNAAQSKLARNKAVIVIRDNFGIALEPTPEVIPFHNVWERIKAIADKNAGIYPRILRAGQLIKVSAGKMKGVWRIISVTNDARQGPLINIIHPAYVKHVSGTSYSKRNVSVNTLLKNNMLILTPDLSGIE

SEQ ID NO: 7810 - protein, 968 aa, unidentified
  REGION 1..968: note = Description of Unknown: Cas Enzyme sequence
MEKIGLDIGSSSVGWYISENGDTIKKGVITFDTGMSKGQSGGYVSPTRERREARSKRNLIRARKYRKWELLRIFIKYNLVPLNENEFEIWSKYKKGQMRKFPESVNFLKWLACDFVYENGIKYQNPYDLRVKALDNKLSKHELGRALYHLIQRRGYKDIGESDSETKKQIERRGESGFESSLKLKENRTIAEALSNDFLSKNKRARNQYPYRDEYESELEEICKAQGYDVSKKSKGRYIDNFVQSLWNAIIWQRPLRSQKGNIGKCMLEPSKLRCPVSHPIFEIFRTWQFINTIKYYDKNDQKQNIPQGYRNQLFDFFLKKEKNFKFEEIKELLNKKFGSEKKYNYPIDRKGRYDTSVSGMPVCKGFVQVFGDIAKQAITTIHEYNMGNTPKIIHGYSINDLWHILFAFDEKQSENKKFLEEFAVDKLGITNVVKNEKESNPFAKLRGAFTNGYSDLSFKALCKIIPFLKQGFLYNEAVVLAKIPELLGKSWHAEKENIFKITEKSNELYNWNKSIIGITNNLIDKYKGLDSEEIFAYKDYEYALDDMDSKDIEKACQGYFGEKSWTNRADKDEVINSVKNHYQEFFRDTKRSYRKLPLLTDIFEEKLKENKIEIAGNLYHHSNIENIYGNVVTDRKTGGEVLPEARIDSIKNPMFNKSMSILRKLINKLIIDGIIDSDTEVIIELARELNDNNMRIAIESYQKKRQDIREKYRMFLEEFKEKEQQDINIEESIPVFELWTEQTFANTIDDKGKNIKNSYNDEILREKEAVRRYELWMEQRGQCMYTGKMISLTQLFSNEIDIEHTIPRSLLPDNTMANQTVAYAWYNREKKKTLLPQQCDNFYEEKNGWGTAIEPRIANWIEKREYFKGQYESKLKSKGNEDEGTKNKRIQDKHFWKMHYDYWKDKVERFEAEEVKDSWARRQLVDTQIISKYAREYLKTFFKKVSVQKGRTTADFRKMYGFQPENE

SEQ ID NO: 7811 - protein, 1414 aa, unidentified
  REGION 1..1414: note = Description of Unknown: Cas Enzyme sequence
MKKILGLDLGTTSIGWALVNESENENEKSSIIKLGVRVNPLTVDEQQNFERGKSITTNADRTLKRSMRHNLQRYKLRRENLIEILKENGFIFNETVLSENGNRTTFETYRLRAKAATAEISLEEFARVLLMINKKRGYKSSRKAKGQDEGQLIDGMEVAKRLYNENLTPGQLCLQLLKTGKKYFPDFYRSDLQTEFDRIWEKQQEFYPEILNNELKEELRGKKREAVWVICAKHFVWKETIKEWSNEEAQNIEITKEYKLEGIYGKRKRDEAKIENLTWRSQGLYKKLSLEQFVIILQEINIQINGSSGYLGAISDRSKELYFNKQTVGQYQMAILTENPNASLRNMVFYRQDYLDEFNMIWDKQAEYHKELSEELKNIIRDVIIFYQRKLKSQKGLISFCEFESRKIEVEIDGKKKTKTVGNRVIPRSSPLFQEFKIWQVLNNLEVSVKGRKAKKQKEVSLFAEQEDPLEVYGKRELYQEEKELLAIELSVKDKLTKSEILKLLLKNSQELDLNFREIQGNLTQSNLFDAYIKIIEHSTGEIIDKKKSAAEVIKNIEDTFKILKYNTDILHFNSDKTLDEQPMYKLWHLLYSFEGDNSVTGNEKLINQLSELYGFEKEYVSILANITFQNDYGSLSAKAIRKILPYLKEGNKYDVACEYAGYRHSKSSSNKDEIENKILKDKLDVLPKNSLRNPVVEKILNQMINVINTIIDTYGKPDEIRIELARELKKNSKERDELTKSIAATTRLHDEYKKILSQPPFKLNYISRNDIIRYKLYEELKDNGYHTLYSNTYISPGAVFSGDFDVEHIIPQSRLFDDSFSNKTLELRSINLEKGNKTAYDFINEKYGGNGLEEYLNRIEMLFKQGVISRGKYNKLKMQEKDIPENFINRDLGNTQYITKYAKTMLGDLVKRVVSTTGSITDALREDWQLIDVMKELNWDKYNALGLTYYEENRDGRQLKRIKDWTKRNDHRHHAMDALTVAFTKDAFIQLFNNMNASLTPNSNEFALKNLYVENGKVKPPMPLNEFRIEAKKHLENTLISIKAKNKVVTTNINKTKKKGGTSKKSQETPRGQLHNETIYGSQKKYVIKEEKIGTTFDEVKIMTVSKPTYREVLLKRLQENGNDPKKAFGGKNAPAKNPILINETEQIPEKVKTVIFETVYTIRKEISPDLKLDKIIDVGVRRILENRLNDFNNDPKKAFSNLDENPILNKNGKSIKRVTISGISNAEALHDKCDKDGKLILDGNDKTQAVDFVSTSNNHHVAVYRDADGNLQENVVSFFEAVTRKNLGQPIIDKEYKVSEGWEFLFSMKQNEYFVFPNEKTGFNPKEIDLLNPNNYAMISPNLFRVQKFSKVVYGNSAVRDYVFRLHLETAINDNKELKDITYKSIKSLPVFNDIVKVRVNHIGKIVSVGEY

SEQ ID NO: 7812 - protein, 978 aa, unidentified
  REGION 1..978: note = Description of Unknown: Cas Enzyme sequence
MKNILGLDLGTNSIGWALIDNETKVIIKAGSRIIPMDAATLGDYDKGNLKSGASVRTDFRSMRRLYERAILRRERLLRVLNVMGFLPESFSSEIDFEDHPGKFRNDNEPKIAWRKSMDGKNVFIFMDSFNEMLNDFRNKQPELVANGKKVPYDWTIYYLRKKALTSKISKEELAWILLNFNTKRGYYQLRSEIEEEKETNKLVEYKLLRVANVEKLEEDKRRKGFFWYEIVYENGSAQRKLSVASPRSIGDTVELIVTTELEDDGVVKKDKDGAPKIKLRDPKEDDWTLMKKRTEHEINASGQTVGAYIYDCLLRNPDVKVRGKLIHTIERAYYKDELKRILDKQCEFHSELRDNSLYKACVRELYHNNEAHVLSLKDKNFTSFFLDDIIFYQRPLKSKKSLIANCPYETYHYKDENGQVVERAIKCIPKSNPLYQEFRLWQFVDNLRIYKREEMVNGKLRVNHDVTTSFLKTADDYAALFDWLNQKKEIKQDELLKYKPFGIGNEYKAYRWNYVEDRIYPCNETRYEICKRMKKVDAERSLNEQELYKLWHIAYSVDDPIENVKALTTFAQKLQFDPNDFVAQFKNYSIAKKDYGAYSEKAIKKLLPLMRMGYHWREEDIHPETKERIEKIINGEVDERISMRVREKAMTLRNVSDFSGLPLWFACYVVYDRHSEAEDLTRWEKPEDIDTWLNVKFKQHSLRNPVVEAVLGETLRVVRDIWKSFGKIDEVHIEMGRNLKQDAKSRLADLKRQQENERTNLRIRTLLQELANPDSDVENVRPHSPSQIEILKIFEQEVLNNHEDEMEDELKNIIGNMGNNAKSSHVSHSDVMKYRLWLEQRYQSPYTGRTIPLSKLFTTAYQIEHVIPQSRYFDDSLSNKVICESEVNKEKDRMLGYEFIVKKGGSIIKGAMGQDIRIFTKDEYEDFVKNHYKSQKMKKLLMDDIPQEFVQRQINDTRYMTRKIASVLSMLVREEGEQ

SEQ ID NO: 7813 - protein, 1098 aa, unidentified
  REGION 1..1098: note = Description of Unknown: Cas Enzyme sequence
MNLTFSFDIGVASCGWAVINKDTYEIIECGSNLFTEAAANQNVERRNFRQLRRLHRRHRVRINDYKKLWANKVGDIPTILCNNQLELRNKGLTDKLTKDELYFTLLNLLQHRGISYLDDLDDAKNGGNDYQKGLKINAEELKNSYPCQIQLKRLEKFGEFRGNIKDDSGEEKITLSNVFTTSAYRKEIEALLDKQKEYHDFLTEEFVNEYLKIFDRKRKYYEGPGNEQSRTDYGKYTTVIGDDGEYITEKNIFNKLIGMCSIYKDEQRGAGASYTAQEFNALNDLNNLTVNNRKLTKEEKEKIIDSYKNEKSVSMKAKKVRAIISKVIGEDIDSFKGARINKKEEEIFHTFETYRYMRDKFAEIDVDIEDFDRDTLDDIARVLTLNTERESIEEGFIDAGLNLDDKVISKLIEIRKNSSHFGKWQSFSIRLMKELIPEMYETSNEQMTLLYNMGYIGTDTEKYKDYNKIPTKDLMDKMYNPVVRKSVHITIEILNALLKKYGNPDQIVIEMPRDRNLDDEKKRINEIQTKNEKELKEIIKKIESEYGRKVTDKDFRKQKGLVLRLKLWNEQNGMCLYSGKDIDINDLIDKPRLFEVDHAIPFSISFDDSRNNKVLVYSTENQDKGNKTPYYYLKDLSREADFNQYKARVMSLKYSKKKRENLLNTDDIRKEDVVQGFISRNINDTRYASRVVLNTVQEFFKANNASTKIKVVKGGLTHQIRQKLNLNKDRDESYAHHAEDAAIIAYSQMGFDYYRAELLDVIDFETGEILKQELVDKVMSDDYCADMIYANKLKTIKDEILRVKDKVKYWHKIDKKPNRGICKQTIWGTRTIDDKVYQIGKIDIRNKDDIKKLINDIQSGEDDCYLMKKNDLKTYEILKQILVTYRDQENPILAYEKDNRDVFRKYSKKGNGPRIDRLKYIVREAKSCIDISHKYGFERNKKKVILLGVNPFRTDVYFNKKKGNYRLIGIKYSDLKFEKGKIAIDIDKYNNELIREKLLESGQTMENLHDNGFEFVMSFYKDEIIRYEKDGEMMEERFLSRIKQQDSKNQIETKPIDAPSFKKRNQITLTKTKSIVKIRTDILGNKYICTKEKFSLEI

SEQ ID NO: 7814 - protein, 1225 aa, unidentified
  REGION 1..1225: note = Description of Unknown: Cas Enzyme sequence
MKKRILGLDTGTNSLGWAVVDRDEKNDYSLIDRGSVIFQEGVKIEKGIESSKASERTGHRASRKHYFRRRLRKIETLKVLIKHKLCPPLTNEELDLWHKKKIYPLDDDFMQWQRTNENDEKNPYYYRHLCLHKKLDLSKQTDRFILGRALYHLTQRRGFMSNRLDTTSEDETGKVKQSISDLNKNMEEAGFEFLGDFFYHLYSTEGNRVRLRSRYTDREGHYFKEFNEICRVQGLDEEMINELNKALYFQRPLKSQREGVGKCTFEPKKPRCAASHPDFEEFRMLSLINAIKIQTPKDDEMRPLNEEEKAKIEPLFYRVSSENFDFEDIAKKIALKNNYMYFKDPEYKPYKFNFKMTQGVSGCTTIAQLRAIFGENWKDSIAETYTNMECKKGAKSVDEAVNDIWNVLYSFESIEKLKEFAKEKLQLDDQLAEKFSKIRLTKGFASLSLTAIRKILPFLRAGMIYSEAVFYANIPTIISKELWEKDKDNIMSNLYEAVHNSDTTKSDMHITIEAIIKDYLQNNYNLKPGAADLLYHPSMIETYPDAKKVNGIYQLGSPKTNAIRNPMAMRSLHQVRKLVNALLRDKVIDNTTEVHVEYSRNLNDANKRKAIATYNKEQETLHKKYYSDIKKLYKEETGKDIEPTDSEIKKFQLWEEQDHKCLYTGRQIGIASFIGANPEFDIEHTIPRSVGGDSTMENMTLCENKFNRDVKKAQIPTQLANHDEIMIRLEKWKKQIEDLDKQINARNLRTNSGMEKGMKDFRIQKKHLLKMKKEYLLGKYKRFTMTEVPNGFSRRQGAGIGLVSKYAGLYLKSLFHKPEDRSKSNVYVVKSPTTAEFRKIWGLQDEYEKKERVNHVHHCIDAITIACIGKSEYDELARYYHEYEDYETSHRNKPTFKKPWPTFVEDLNSIENEMLIVRSTPNNLGKKAKKNIKTPNGKVVAKGDSVRGSLHMDTYYGAIERDGEIRYVVRKPLDNTFFDSPNKLDLIVDDTVREIVKEAVAGRNFKEAISAPIYMNKEKGILIKKVRCYMNSVKNPLHIRKQRDLSVKEYKQQYHVSNDSNYLMAIYEGEVKGKKKREFELVNMLDAANYYKSSTDRDEYPTLIPERSTNGYELKWRLTVGTMVILYEKTPDEINFNDLTDISKRLYKVIGMSSMNISGYLYGVISLRYHEEARPSSDVKLKNGAYKVGEELRPGITMLHTQFNALVEGVDFSINELGKIKLLHK

SEQ ID NO: 7815 - protein, 1408 aa, unidentified
  REGION 1..1408: note = Description of Unknown: Cas Enzyme sequence
MEKKDYFIGLDMGTNSIGWAVTDTKYNLLRLKGKDAWGIREFDEAVSAESRRTARTTRRRYRRQKARIGMIKSYFADAIENVDKNFFMRLENSKFYIEDKENGLDSKNCLFDDENFKDKDYYKKYPTMAHLRKALIKGEESGKELYDVRLVYLAVLNIFKARGHFLNSSLKVDNTGIEINKALEDFLYLYNSLTLAEDSHNQPWEEIDDNKYNEIKRIFENKDKTRTQRKEDLIKQLLPEKYDKKDSGTKSKIEMIACMCGLKPKVKTMFPDIIFEDDIEIKIDFTTEDFEEKCEEYKDILGEDNTEILCSLKTIYDTGVLLGILNGKNYISFARVESYEKHKSQLKELKMLLKENHMDKEYDELFRSNSSGSYSAYVKSNNSGKKVRRDFKDSKSKPREELYKNIKKIVEKIEKTASNEELEICNKIKKDMANNNYLLKQRTSDNGTIPYQLHEKELRIILEKASDYLPFFNAIDESGLTCKERIVKLFNFRIPYYIGPLYTDSENNKGNGWVVRKEGHERERVLPWNLEKIIDIPATNERFIKRMIRDCTYISGEKVLPKCSLIYQEYAVLNEINNIKINGERIPSDIKMQVYNELYLTGKKVTRKRLTEWFERNAYIKDPDEISGIDINLNNYLSSYGRFKSIFGDKIKDDTYRNMAEEIIEYATIYGDAKDILAKRIREKYSDKLSEKDIKRICGLKFNDWGRLSKTMLELRGCDKETGESLTLIEALRISDKNFMELINSDDYTFKEALAEKMHKNEKALYDFKYEDLEGQYFSPAVKRMTWQTIRLVREIVEIVGYEPKKLFVEVTRTNKADKKRKDSRADELKKLYENIKDEVDIGLWNKVIDDAEKSGNIKSKKMYLYLRQQGRDMYTGEEIDLSQLFNDNVYDIDHIYARTYVKDDNINNNLVLVKKQINAEKRDEYPLRSEIREKMSSYWYRLRKQGFINDEKYKRLIGKEAFSDEQLKGFVARQIVETSQANKAVFSILQDLMTETKVIPQKAENVTDFRHELKPYKDESEDNYHWEFSKSRNINDFHHAHDAYLNIVVGNCYDVRFTRDIYNYVKEWKENRDKRSMKPSVIFSHNIERNGEIAWVAGESIKTVKNVMKKNTPLLTRRSSIGHGGIYDATLYSGRKANVGKYVPIKTNDPRMLKTVSNGKESYYKYGGYTKASTAYFFMVESEKVKKNNITKIRTIATMPMYLANKISEEEYAEEYLGLINPVIKIRKIKLGSLIEIDGYRVFITGNTGNQLTLSNAVNMYAEEKWYKYIGKLEKAVEKINISNDKENIKLNDDICEEKNIELFDYLLEKHKEDSLIKNKPNSMAEKLKEGKERFIKLSIDKQCSVLIEILKLTKIGIVKGDLSLIGGSKNSGVILISKELKTDKNCYLINQSITGLYEERIDLNKV

SEQ ID NO: 7816 - protein, 1378 aa, unidentified
  REGION 1..1378: note = Description of Unknown: Cas Enzyme sequence
MTNKDYYLGLDMGTNSVGWAVTDKNYNLLRVKGKDMWGVRLFDKANTAEERRIYRINRRRREREVARIGVLKEYFKDEIKNVDENFFERLEESKYFRKDRSEFNCQHNALFNDKGFTDKDYFKTYPTIYHLRKELIESKEPHDVRLLYLALHNMFKRRGHFLNQTLNLDGEVGDVGSVLSSLAKAANENGINFPISFDVETIREIMTDQGKSRKKKLEGLSKLMGISKTDKAPYEILMLICGLVGNPTNIFGEEIYGKDMEVKKFSFRDQDFDEKETEMKTVIGDEAYEVIAKAKDVHDAALLDSILQGETYLSFARVKSYEQHKEDLHLLKELYKKYLPGKYSEMFKELDDKTPSYSSYVGSTRTSHETKRRGGVRSAEELYKKIKKDLEPFSQDDEMAKFVIEEIDAQNFLPKQLTSENGVIPNQLHAREMKKILENASSYFPFLNEKDEYGLTLSDRILRLYTFTIPYYVGPLGQGYLDKEGYNVWSKKKETGKIYPWNLEEKFDTKQSAQKFIERMTQHCTYLTGEKSLPKESLLYEKFMVLNELNNVKINDKKPPVELKQKIYHDLFEKGKKVTCKQLKTYLVDEGAFSSVKDVEVSGINGDFKASLKSYGKFKDIFGDSISNKDVQNKIEQIIFWVTVYGDKKLVYARIKEEMPDFLTEEQLKKVSGYKFNGWGNLSRKFLELKGSCKNCSEDDASMLHMSLIDALYHTNDNLMELMTQNRYTYRDELNNLVLSFEKPLREYTIDDLDDMYLSPSVKRMVWQTVKIVREVQEVTGRDPKRIFVEMPREEGEKKESVSRKQKLLGLYKSLGAEGKDWVKEIESMDEKDFRIQKVYLYYLQMGRCMYSGEVIPKDKLFDDNLYDKDHIYPRHYVKDDSLMNNLVLVNKKINAKKSDEYPLKPEIQSAQKDFWKKLKSYGFISSVKFDRLIRTTEFADTEKADFIARQLTETRQGTKAITGILQSSLPKTKVVFTKAGIVSDFRSPSKFDIPKSRSLNAFHHAHDAYLNIVVGNAYYVKFTNNPLNFINMAKKTHEGYKYHLDKVFERDIVRGEDVAWIAEGNNATIKTVLKTLSRGTPLITRRAYEVHGGISNKVTIKSAKEAKKVGYYPIKTSDKRLLNVKRYGGITSIQNAGYALVEYKANGNTIRSLEAVPIYLGGGGVKDDVLLKYMMDTLTLENKKKKVTDVKVIKKLIRQRELVRIDGYEYYIAGKSGNTIALISAVPLKLDTKWTGYIKVIEQSVKDKSVLDKKHDGKQIISKEENLELYQALTNKLRSKPFVNRKCSILSVLLEGEDKFKDLSIEEQGFVLAKIISWFNTQEQTVDLRLIGGTEHSGKLGINKKIADTGKKTPLFNEFTLISQSMTGLMSSHLRLC

SEQ ID NO: 7817 - protein, 1365 aa, unidentified
  REGION 1..1365: note = Description of Unknown: Cas Enzyme sequence
MKKVLGLDLGTTSIGWAVVNQAEQKDEKSSIIRAGVRVNPIASDEKDAFEKGKSITTNADRTLKRSMRRNLKRYQQRRSNLKELLLKEGWISEDTILAEHGNNSTFETYRLRSESVDREVSLEEFARILLMINKKRGYKSNRKADASEDGTLIDGMEVAKTLYKEHLTPGQYGYRALINGEKVLPDFYRSDLQTELDRIWDMQKAYYPEILTDDFKQQIRGRGRQDVGKNFLGKYKIYTADNKGKEKKVVSYMWRKDALTKQLPIEQVAYVIADISGSIKNSSGYLGEISDRSKELIFNDKTIGQYLYDGIKKDPHFKTKGKVFYRQDYIDEFNKLWESQSRFHPELTDELKGKIKDEIIFFQRRLKSQKGLISVCELEGKKITIEKEGKSKEVLVGPKVAPKSSMVFQEFKIWQVLNNVILTDKETGETRQFSVEEMSKLAEELQCKEKMSAKDALTLLFGKRISYEMNFKSLEGNRTYYTIVSKLMDIVNAIEQSESDVNKMSADEIKSRIKSVFKSKGFNEAILDFDSFLAKEQLEAQPLFKLWHLLYSYEGDDSKTGVESLIAKISDICKMPSEYARMLSSVTFTDDYGSLSNKAMKRILPYMKQGKTYSDACALAGYNHSEHSKTREELDSMQLVDHLEVLPKGALRNPVVEKIVNQMINLVNAVGEEYGRPDEIHVEFARELKQNQKQRQSATERIAKSNKSNEEYAKILKDEFHIVNPRKSDILRYKLYEELKGNAYKSLYSNKQIKHEQLFSNEIDIEHIIPQALIFDDSYSNKTLEFKDINIEKGKRTAAEFVLEKYGEAEFENYKARVNHLFAGDENKSKRKNLLAKTSDLESGFLNRDLVNTQYIAKKATEILETYVPEVVTTTGTITAKLREDWQLVDLMKELNMPKYEKAGLTHYEEHQEGKRVQKIDDWTKRNDHRHHEMDAITIAFTKRSHIKYLNTVHAKVEDEDFDIMKVKNKKILAPPMPLDELRAAFRKELESTLVSIKAKNKVVTRNVNKTKTKGKPNSKVELTPRGQLHKEQVYGQRKVYETYDMTIGGKTTAEEIANVASKREREALLHRLESFGGDPKKAFTGKNSLDKNPIFLDEIHSEKLPLKVKCVRFKTVYSIRKSVAPDLKVDKVLDQGVKKILEARLAEYGGDARKAFSNLDENPIWLNKEKGIQIKSVAIAENFDLDALRVKRDHEGKAILNENGNTIASDFVNLRSNHHSAIYVTADGEYHEKVVSFFEALDRINQGLPVIDKSYKSDEGWTFLFSMKSNEMFVFPDPATGFDPNEIDLMDPKNYALISPNLYRVQSVSSMYYEFTHHLETTKNYILALKDKTWKRIRSLAQFKGIVKVRINHLGEIVAVGEYD

SEQ ID NO: 7818 - protein, 1022 aa, unidentified
  REGION 1..1022: note = Description of Unknown: Cas Enzyme sequence
GSRVIPMGTDKIEYEKGAGITKNADRRIKRTIRKMNKRYKLRRNKLLYILYELGMLPEQFKFKDGIPQPDKIQSLELLPIKKGTMQLDSLAHYILKAHAIENVIDLKDFGKILYQFNQLRGYSGGNNDEDIKKKKENEEEDIEKKKYEIITYKAEILKVEKSDSTYKIRGGKNKGQELYKYDVTILLDGEELEGETELQNLEDKIGKEEEFEIRIKRNKQGELISRVFALPQKTNWRKQMETTEDILKSDHLYVSQFFVRELKDNRWARIRNRVILRHRYQAEFDKIWETQSKEYNFLNNCPKDILEKIALYIFPGKSETQKNLRKEAIEEGLKHIIRNQVIYYQRPLKLQTELISKCQFEKDEQVLANSHPLFQEYRCWDQINRMYITSKKEVWNEKKKKNIFQYTNRFLTNVEKQEIYNKLQIQKQLGFSEVAKIIKLKNDKTEFLNGLNTKAKLKGCDTAIAIKKILVENFEMLYSKDIDIIINVWQAIFNNANNGSEYDPKSLKVSSIAKVLILLNNDTLATELALKFAQNIKFPRKYTSLSEKAIRNILPLMQLNPINIPDKIKHTFNLIQTGEIIDDFPIEHLEDYVINFIEQNPNAIETGGLMYAFASSLFYGKHTRENIKPQIKDYHEIQYLERNFRNPIVSQIANETMQVIKAIWKEYKFKPEELEIRVELARDLKNSAAERDKIYKSQIKNQRTNNEIKERLKVEGIAITEENILKYKLYVQQKFISPYTKNEIIPFGALFDKRQYDIDHIIPKSRYFDDSISNKIICETYINEEKSNRTAWEYILQQNSKFKIRSVEDYINHVNGIFFGKKKKNLLLEKIPTNPVNRQIKDTQYISIAIKTELAKIVGSENVKTTTGEVTSFLRSRWGLKKLFMELTEERFKRMELWDTNSITNKPNEEWVKKYFDEERKKNVYEIKNWNKRYDNRHHAVDALVVALTEQSHINKLNDLNKYLQDELIKRRDEFKLEIKEDENILETFFNLETNRREEIQKKIQSSRHFEPLFEDLLKQAK

SEQ ID NO: 7819 - protein, 1357 aa, unidentified
  REGION 1..1357: note = Description of Unknown: Cas Enzyme sequence
MTQKNFSDYYLGLDIGTDSVGWAVTDKEYNILNFNGKAMWGIHLFDSGKTAEDRRINRIARRRLERRKQRIEFLQNIFSNEINKVEPEFFERLAESRLHFDDRKHQSSNTLFNDPAFNDKDLFKKYPTIYHLRSGLMEQKEKPDIRLFYLACHHIIKYRGHFLFEGLSEGPIPKFEIVFEELITELNSKYETDIRSRDISNNVQEILLNKEFGVSEKSKKLQSILRDEDFSELFKELCVLLSGGTANLDKMFSSSDDVDSGLGKLTFKNTDFDEVLSKLELQSDELEILSCIKKIYDWALLSDYLKGQDSVSKAKIATYNQHKDDLKLLKSILKNDSERYSQVFKSETVTMKVSNKDIKVNYPAYSGMHEKGEKGSENTDVCSQPDFCRYLRAAVFKQEIKDLAFREKYADLVARIEDDTFMPKQTVKENSMFPNKLHKFELEQLLKNMESHYPFLNEKDEDGWTVKDKILKLCTFRIPYYVGPLNPNSDRAWLEREDGKITPWNFEKKVDLDKSAEKFMDNLIGNCTYLKEEPVVPKCSLMYQRYELYNELNTLKIDGERLFKIDIKLKEELVTDLFENQSKKVTKKTIETWLRKKCQYHKDDNVEISGIDTDIKSALKSEKQLKEILGSQMNYAIAEDIVRIITVFGGDKSRMRIKLKKDYSDILKEEQIEKLSKLTFKDWGRFSKKFLTEIYAIVDGESMNLLEALEKTSYNLMELLSISDFAKKIDEINGPVVATGRITYDLVEDLYVSPSVRRGIWRSLKIIEDILSITKHPPSKIFIETTRENQESKRTVSRKKDLIKKYEACKKGSEDITVQLNGTDEGRLRSKDLYAYYMQQGKCMYCGKSIDLNDLCNNNMYDLDHIHPRSLKADDSIHNNLVLVCKKHNQEKSNDYPLNPEWQKKMSSFWKFLKEKEFITKEKYERLIRTSPFEDDELSGFINRQLVETSQSVKAVAETLKRVFGEQVDIVYVKANTISDFRNGNNGFKTNENDERLKFIKCRSVNDYHHAKDAYLNIIVGNVYDTKFTKDYKNFIRTEKNNYNLRRMFDSDVERNGVQAWKAGKDGTIATVQKYMRRNNILFTRFSYQKQGALFKVNPLKKGNGQLSLKKDLSIEKYGGYDKVSGIYFALVEHTKGKKTIRTIYSVLSSVVKSDADDIELIRYMEDVDKLINPKILVRKIPFFSTFEINGYRVHISARTGNDCVYYGAEQLILSENDYIYCKKIENYVMKSKETKDSIPAENYGITAEKNIALYQTLSEKYNNSKYQIFFATVYKTLGEKAKVFEDLDLNNQAKILEQLFHGFQCNAVYLNLELLDGPKLTGRIQKNNNIENLDSIKLIHQSPSGLFENEIDLKKI

SEQ ID NO: 7820 - protein, 1059 aa, unidentified
  REGION 1..1059: note = Description of Unknown: Cas Enzyme sequence
DEIKQKVANLIEYLNEKNEDICQNEIEDLIDFLKEEEKSSKKLDNLKNLFNITKENKVIVDNLCKAFVGHSFNASKIFDIDEKLEMNFSKAFEDYQEKSNELLDEKEYGIIENMKEIYDFAVLQKVMKEKQYISDVYIQKYNNYAEDLKLLKQTYKKLLSQEKYDEMFNSKKEIANYYNYNGKNFKNKESKRNGAKKELRDVEFLYRTIGKDLEKYKNEERVKLILDKISEKTFLSRLNIAENGAIPYQIHCVELEKILENQSKFFDILKENKDKIISIMNFRVPYYVGPLSIKSKFAWIERSNEKIKPWNFNDVVDLEKSAENFITCKRLKCTYLIKEDVMPRQSLLYSKFCVLNEITNITVNGKKLDANMRKLIIDDLFLKNKKINEKKLKEFLKENHFPVEIETVGGFTQISGEKAFLNNRGSYIDMIRIFGNQDFVNKNEEKIEELIKAITLFTERKILEKRIKKIFPQIDQEKVRLILKLKYTGWGKLSKKLLTGLKSIDDYKTIIEKLEYSDSRYEDGNIKMLNFMQIINEKAFGFKEQIEALQKERLKDTFSYEDVAEIPCSPAVKRSLWQTIQIVKEIVKIQKCQPKNIFIEFTRGKDKKKKGKNTDSRIERLKGIYETLKEEGKEVFAELKKEKNSLSDMVYLYYLQNGKCLYSGDNLNLSNLSLTCEIDHIIPQCYIKDDSFANKALIMKKYNQRKAGDKTVLDIVPEKEKSCVEALWINLRKCGLIEEKKYKNLTRKTNFKEEEQEKFIARQLVETSQIIKYVANIFDNIYVDTKIFTIHASLSSNFRGKYKITKCRSVNDFHHAHDAFIASVLGNHAVKYELDSFEYGLKNADKMERKVNEYFKKSRKIAKEKAEKKEESYGAILNVLETDDDFNIKQIKEIISNEKILVTKKLEEQTGKFYNQTLYGKTGYKQSSFVNLKKGLDAAKYGGYRSSNKAYYSIILYKNKKNKKELVLVGITIQEAKLIENRQLNLLKCIENKGYKDVKILKEKILKYQKFTDGQGNLLELTSDKEYSSVKQLIFKPKIVESISEIEKKKYLKYNEEQQ

SEQ ID NO: 7821 - protein, 911 aa, unidentified
  REGION 1..911: note = Description of Unknown: Cas Enzyme sequence
RDELKCEFEAGRVTELETLLKDKKINNSSKKTKLRELLGVENSDKQKMAVVALISGLAGDLAQIFPDSESVKELEKSSVKFSESSYDDKRLEFESTIPEECSIIDTIKTLYDWSILAEILEGGESEGDAYLSVAKVKQYEKHKEDLSRLKTVVKKYIPQEYANIFSSSKEFRKESNEKVGNYANYIGHTSANNKKPSIERCTKEGFYKFLNKKLDTIEEKEDELLADIRNRIEEGNFLKLQITKDNGVIPYQVHMAELEKILERAQEYLPFLKQCGEDGIPNREKIEAIFKFRIPYYVGPLNTYHKNAGGNSWMIRKEGEEGSIRPWNFKQKVDEDASAVEFINRMTNKCTYLLGEDVLPKNSLLYSEYTVLNELNNLKIKGENIDNELKKKIFEDLFKTKSKVTGKALLDYLKCEGYELEPEDLSGFDKDFKSALTSYLDFEKKVFKDAPEQMELHNTKVMVEDIIRWICIYGDDKRMLKRVIEKNYPDELTAEQLKAISSLKYTGWGRFSEKLLVDVFGTENEYGTGEAFSIMEKLRESTNNFRQLLSNHFTFEKAIYEINAQKECKITEIKYENITDDLYVSPSVKRAIWQVVTITEEIRKIMGKQPKKIFVEMARGDKNAQKGDAGRKKSRKNMLIELYENIKDEARDWKAELEKVPEDNFKAKKLYLYYTQKGKCMYTEKSINLSDLSNENMYDIDHIYPQSKTKDDSWNNLVLVDKRANMEKGDGLVSLKTQNNRHNYWKELLESKLITKEKYDRLTRTTPLTEDELAGFINRQLVETRQSSKAVAKLFANLYTTSEVVYVRSELVNSFRQDNEFVKVRTINDYHHAKDAYLNVVVGNVYNEKFTSNPERWLKENRNTQYSLNQVFNHSVEKKGKTIWQKGNQGTIATVKKTMAKNNILYTRHAT

SEQ ID NO: 7822 - protein, 918 aa, unidentified
  REGION 1..918: note = Description of Unknown: Cas Enzyme sequence
LFDKLNQYFENLADDYATITFSLDNFEKIKEIAQNAKLGKRTKNEALRDAFGIVSKNHIEKILAVICGSKVKISEIFPEYEHDEVTHFELEANWETEELKYRAALDDAQFELIFILKEIYDWFTLMRLLKGFANISDAMVDKFNTHKIQLKFLKKLLEERNPALYDTFFRHVNSGDVYKDKEFANYAHYIGSNLVDGKSIVPKGTQDMLYKFLKQELYEKGGFDKQKYKAFLQDENDNFSFEYDGYTLEDMHQDIANKKFLSKLRSGENATIPHQLHKSELNKIVALAEKFNLISKEKDADDWSIKDKIVSLITFRVPYYVGRTHTQYKDVKGRHVWVERTKEYDALPQTANGKLRPWNFNKAIDLDVCGEKFIKRMLSKCTRLRFETVMAKNSLVYAKFSVLNELNKLAINGNPISIEFKQDIFNKLFKMRKKVTTNNLLEFLNNEKGLLNADGKRLTKDDLSGFDLKLGFTTSLSPFMQASLIFGEEVFTNEYFYQTKNGKLFDQVIEWHAIHTEKKLVEKAIIKEYGIYLQDAFKEQAETIIKKLKGLNFSGFGNMSEKFLTTPVQHGSDENNTIIYSTGLVNPKMSILDILWETNENLNEIIWNDAYGFKAFMDAENATEDKDNVEDFKQRIQESYASPSVKRSVWQAIKIVDELIELTGRKPDKIFIEVTRSGSEQKGDKGRTKSRKQKIEEIYKNAKALAKEIKEEGLVEKLVGRSDDELRSDKIFLYFMQGGKCAYSGNRINISDVLGAKSSSYDIDHIIPQALIKDNSFNNLVLVERNLNDAKGSKYPLSQTPSIMANFSKLKILWKKWLDSGLMSLEKYERLSRTTELKEKELEGFIARQLVFTGQATTIVAELLKSRYEAEGNTQVVLYSKAEHVSAFRQKFNILKCREVNDYHHAHDAYLNIVVGSV

SEQ ID NO: 7823 - protein, 177 aa, unidentified
  REGION 1..177: note = Description of Unknown: Cas Enzyme sequence
MNKIIEKAEKIFIGLDIGTESVGYALTDQNYQVPRHGGKPLMGVRLFDAAETAENRRVQRATKVRLKRVKQRIVFLQELLEHKIEEIDPLFFIRLKASSYWQDDKKVMGLNEGDLNSLFADVAYTDKDFYNQFKTLYHLRQFLCDENNWIEKTPDIRLVYLACHHILKSTWALFIRK

SEQ ID NO: 7824 - protein, 1551 aa, unidentified
  REGION 1..1551: note = Description of Unknown: Cas Enzyme sequence
MFSLQHHSFLFFLSSGAFGVINQRGYRLRSPFGIKFHAKTAIFLLICYHFLRNKARAFLYAYFSLYGFRTKASNFHPMPSPFAMFFCGIYLNNGEKSDMLEVDTKHVCKGVVVMDRKKHIIGLDIGTTSVGWAVMDEDFNLVQGKKKIVEIDVAGNVHKRQSRTNLWGVRLFDAAAVAADRRLKRGGRRRLARRKKRLEYLRCIFRQEILAFDDSFFIRMDESFYQNDDDIKTVKVEYPLFNGKKWPGITDTFDNEIEYYDKYPTIYHLRKRLIEDNSQADLRLIYLAMHHILKFRGHFTNQGQKFDLKNIDVAESLLELLHQYEMVRQDSFEFNFDDAKHDEANAILIDRKKSKSWKAFNLTQLFSVLNMDEYFSKYDQEGMGKKTEKFLQNVDGQLKALFTAIVGNSIDVAKIFGKDEYKPSDDNKFVKGGEFKYANENFEEKLAEIESEVTPEEFEVLISGKKVYESVALSNILTAETLASSMVLKYDLHKEQLARLKKFTKSVSYELFEKFFKEDGIYSKFIQGVGNPAKTISREDFYKEIKKAFESEFSGLKFPDAEKEFDFSKADLVEEQEIFLESINEAMRFETYLPKQRMSDNGAIPYQVHEHELIEIIKKQSVYYSFLEGLVETEIEQEDGTFEKVTEYQIQTLFKFRIPYYVGTLATKRDEKGQFVYAKNAWVARKSDDELTPWNFNDVIDKEKSAINFIERMTNFCTYLPSEKVLPDKSLLYQEFKVYNELISSGYYQDGKKCYFSSELRQKIVERLFKENKRVSAKKLIEFLNAELRLNLEHPRQLFGIDTAVKTPGFNNSFSTYKDLIDAGVKSEQINDYRDRFETIIKWQTIFEDKKILKKTITNANEYEWNGFLTGEQVNKLVKKHYTGWGRLSRKLLNGIKANNGKTIIQNLKEEKFNNFMRLLEDEAIAEAIKEAQIEGMEDGQISYNMVADLTGSPALKKGIWQSLKIIKELESYLGKENISKIVVEMAREHSTGRTQTRQKQIENFYNKFKEKTEKELDRNLHDEFKSITDAKNFDNEKLFLYFLQNGKCMYSGNSLNLSHLSEYEVDHIIPQTYIKDDSFDNKALVLRKENQNKGSGVPHEVIVRRMSSFWEILEKSGQVSPKKLKNLKMKRISEGDMESFINRQLVETRQITKHVANILSEHFKETDVEVLTPKSGLTSQFRQGIVYVDKQEFDFESAIASRLYFEDNNKVYLPSGEIIQGKYSNSNFVKVHFHEGFKKNRDLNDYHHAHDAYLNAIVANYIYATRPDLRKAWVYGQYKRNLSRETGNFGKQRQDWHKQLLTGMAEESWIFWDDKTGEVSQEFKRDEILDKIKRYLGFRNVNVVRKIESAKGAFSKEGNLKKGSGSLVRKNNLSLERYGGSNADATNIAFAIRDKKGKIKINSIPLVKKDMIKRNADNFVVKTYQLYKTEAGYYRYLTAPKEAQKATQYTSAVELSQLLEFAVSNSLIPENKISERTFEKFEKLESKDKEEVLKNALKLVRRGTSRGLNAFKLINLPADIRYTTSKDIISNGSTLISQSTTGLFETRRKL

SEQ ID NO: 7825 - protein, 1196 aa, unidentified
  REGION 1..1196: note = Description of Unknown: Cas Enzyme sequence
MNSKNYTIGLDIGTTSVGWAVMDEDFNLVQGKKKITEIDEHGTVRKRKSRTNLWGVRLFSEAEVAEVRRLKRGSRRRIARRKKRLEYLRGIFEQEILATDDSFFIRMDESFYQNDDSVKTVKTNYPLFNGKLGLGESYEDEVEYYDKYPTIYHLRKRLVEDASQADLRLVYLAMHHLLKFRGHFTNQGQKFDLKNVNVAESLLELLRQYEIARQDTENFKFSFDEAKHDEANAILVDRSKSRSWKSFHLTKLFSVLATDEHFLRFNQETNKSTEKSLKNINGQLKALFTAIVGNSIDVAKIFGKEDYKPSEGNEFSKGGDFKYANENFDEKLAEIEADVTPEEFEVLTTGKKVYEAIVLSNILTEDTLAASMVVKYDLHKEQLAKLKEFTKSISFELFEKFFKDEGIYSKFIQGVGNPAKVTPRADFYKAIKKAFEAEFAELKFPDAEKEVDFSKANLTKQQEDFFKSIIEAMKFEAYLPKQRMSDNGAIPYQVHEHELVEIIKNQSTYYPFLGELVETEIEQEDSSVKKVTEYRIQTLFKFRIPYYVGTLATASQFGYAKNAWVVRKSADKLTPWNFNDIIEKEASAVNFIERMTNFCTYLPSEKVLPDKSLLYQEFKIYNELIIGGYYQDGHKCYFSSELRQKIVEQLFKKVKKVSAKQMIEFLNGELMLNLTHPRQLFGIDTFVKSPGYNTSFSTYKDLIDAGIKPQQIADYRDRFELIIKWQTIFEDKKILKKTIKNANTQEWNNFLTAAQINQLAKKHYTGWGRLSKKLLTGIKASNGKTVIENLKEEKFNNFMRLLEDKAINKKIKAAQTEGMENGQLSYSLVADLAGSPALKKGIWQSLKVISELENYLGKENIAKIVVEMAREHSTGRTQTRRKQIENFYSKFKEKTGEELDADVEAEFKSITNAKEFDNEKLFLYFMQNAKCMYSGEPLDRSYFHEYEIDHIIPQTYLKDDSFNNKVLVKRVENQNKGGDVPSAAIIHRMSDFWDLLVKSGQVPPRKLKNLKMKQITDEDKLDFINRQLVETRQITKHVANLLSEHFKATNVEVLTPKSSLTSQFRNGIVYVDKKEFDFESAIEDKLHFEDNYKIYSASDKITDGKYSNSNFVVVHFHSGFKKHRDLNDYHHAHDAYLNAVVANYICGTRPYLKEALIYSQYKRKLPKGIQRKNWHRQLLTGMSEAVWKFCDDETGV

SEQ ID NO: 7826 - protein, 1140 aa, unidentified
  REGION 1..1140: note = Description of Unknown: Cas Enzyme sequence
MPNLLGLSIDVNTIGWTLIDGKTKKIKAMGTRVFPHGSDNFGSGAREVSKKTQRTANRVKRLRYSRKRMRKIFLLKILIPKGMCPMKQEELEAFKSKKSFKSKIFDQWISMNPYELRSRATHEQLTLHELGRIYYHMSLRRGFPFGKRNTSMRDNAIYNGIPAFNRPGINDISSNLKDSTLGAHLYTLLPEMNKSYTAFDERVRNRFVSRQMYREEAHAIWNHQEKFHSELEGELREQLIGKENDFSEIQGAVFYQKPLKSQKFRVGKCLFEPKKSKCCVSSLTYQSVLAYKWINTIQVDGKLLSDEDRERIFFFFNTHRKFNFGQVRQMLNLSSSNSNKKDKEVIIGSFINATLSSNDLFGLDWFEFDPKIKQDIWHALYFFNDKDKLQLQAQLKWGLNEVASKRFSSIAIDKRYAPISEKAAKNILFFLKRGIKYDLSVVLAGVKNSLSAFWDNIAESDIQYIINKVIEIYKENVSGGFMPKLQEFLLDEMQFTDFQITKLYGQYAQVIDFSVKKKFPLGAHEDKEINDFKNPLLINSLFQTRKLINSIVEKHGSIDEIKVELNTNLKTNKFQRYMYRLDQNRLAANRRRIVQKIGALSENLTPMNILKLELWEECKGTCPYSGVSIPLDILFTEKTQIIYIHPWSESLNDSNYNKTLCLYETSLKVGENTPFEYFNTHLPQEWDTVVRRASELFSNTKEYPSNTKKFRKFVKRYYHRNHVENQMNDSNFLSREVACFLSKVCVRVSITSGYTTERMIEMLSLNKILDSSIKKYKYIDHRYHALNSYITAIRDLNYLKVLSEINKYEPQKVKTPFPTPRSDFRDEVEYFINSILVSHKKSSRLISKRKVFTKRGGKVIENSSIAVRGSLHKDSVFGKRTPPNLETAYHMRKSLAAINTLSQIDKIVDSRVKSAVLKTLDDAGISESTNFIPKNVFFNISRDGRMEPKVFLPNANGDPVPVKKVRLRETFNAAVQLSDNVNQHVNLRKNHHVIIYKNSKNEYSEDVVSFWEAVRRERLKQPIYAIPEEDSEFVTTLAINDLFLLGIHDLNDTLKNESRSFLIRHLYRVQKLSSYFYEFRLAFDNELDTTEAPSYVRINNFGSRKTGWLTYNPTKVSLNIIGEISEAKEPYHLKTKKIIL

SEQ ID NO: 7827 - protein, 1127 aa, unidentified
  REGION 1..1127: note = Description of Unknown: Cas Enzyme sequence
MNTKEKRGINYRIGLDLGIASVGWAVLAHDSNEEVCKILARGVRCFDVPEKDKDKGSLMAERRMLRSARRRLRRKKLRTHRIKTLVVQELGFQFDELDIILSSNPKSVYEIRYEALTRKLSKDEWARLLVHLGQRRGFKSNKKSDERKKEAGLLLKAVGENQRIMDEKGYKTVGELLYKEFIKEEQNENAVKRLIINTRNKEKDYKLTVSRESMVREIELLFELQKDLGNSCSDERFKHEYLNIFTAQRGFEEGPGKNSYYQKGDGSNLIEAMVGSCTLFPSEKRAPKSSYSFERFVLLNNINNTKIMTPKGLRVFTEEERGKLIKHAYDKGKLSYEDVRKILGFKLASEEGAQVFDRLNYYQKAKNKEGKFEPLAADEIEKKEMFANLKFCVAIKKVLGANIVEFTPEQLDDIGYIFTFNKSDAKIREALLEKGFSAEVVEKLEKLESFDKVGHLSFGALRALMPFLEQAYTYDKACELVTGESKEVKTRNIKLKFSDVENEMLSPVAKRTVSQAFKVVNAIIEELGSPQLICLEFGRELAKTARERNELETKYKTNQAENSRILTYLKDELQLIDPRGNDIVKYKLWQEQQGICAYSLKKIPIEELFSDNNTEIDHIIPYSISFDDGYRNKVIVYKEENQKKGNRTPLEYFGYNESKADEFRTWVRAFIRNKYKAANLLATEFNQEEFIRRNLHDTQTSSKVVASYLRDNLLFKDSKNHKNKVVAVNGAITSYVRNNLGLKKDRDDDKHHAEDAIIIAACTQGLINKITNYEKAKREYAFDKKTKTYISKMTGEVFDSYGAFKVSNKERRYQLLEFWDGFRDEFLMWFSARPNDEEWKLKRARNLPMYSEEECIEPLFISRMPTRKVTGEVHEATIRGHVQQGNEHYMISRKPITSLSIKDGEISGYFRKEDDILLYDALKVRLLEYDGKGEKAFAEPFYKPLPDNRTGEIVKKVKVFEKTTKFVELGGVGGIAKNSSMVRLDVFEHTKKNKKLYSFVPIYAGDFCRTELPNKAYPGAVEMTDEYKFIFSLFPNDLLYIENDSVFKGINRNKEIEEFNQGFFYYKSFDISVAALMLATHNSVYKIRLGGKTLKQLQKCEVSVLGDKRIISKSEKRNLKTFVRVKK

SEQ ID NO: 7828 - protein, 1270 aa, unidentified
  REGION 1..1270: note = Description of Unknown: Cas Enzyme sequence
VNSAKKTKYSLGLDLGIASIGWSLLEKDENDSLFRIKNLGVRIFPQLEVKGKLENQDRREKRSQRRLKRRKKLRLAEAKILFKEFFNLNFDDVDFRKFLSPFELKIKGLTEKLSKEELSIAIYHYIKYRGFKSNRKIEDAKSEGKLLETLDKLKANLDRDQLTISEYLWKNFMEKPKEDRRLHNSGDLYIFSATRGMYIDEINKLLDKQIELGSVTKEFKDKILFGDGSKEYDNGLFTRQRSFSEGPDPSSPFGAKNGVSLIEKMMGKCKFDQQIRAPKGAFSAESFVLLSFLNNLQIKEGENSNYRSLTSDEINTIYDLALTQGKLTYSNIFKKININVNRVKALDMSREQYRKFITDFKKDNKIDTTSALNEEQYRKFEEYSKKKLYDTAIVSLKNYNEQRKKLEVKLKEADSELEKEIQSFLEDHENFDIISHILMTKKVDTEIIKACKEKGFSERIANIISEMTSISQTINLSLDICRKIIPELKKGITYDKAMENIGFTHSEVSGNIEQVKYLPSIDECLNKLGEPLSNVNVKHCLVELRKLLNEIIKKYGYIDQINIEFARELSKNYNERNKILNTQRENMEKNIYFRTLLMNKYPNVFRSFKSVKGEDILKYRLWREQNFKCAYSNTSIPESKLFDNNECQIDHIMPYSKTFEDRQFNKVLVFTKYNQEKKDRLPSEAFKGEQWDKILAFVNDPNVKIGQKKKEILLSKEIDSEWKQRNINDTKYMSILAKKMIESFLKPNKCIVASGSITDYMKKSYGLMGLTHSYIAGDYRMPRDYSIDLSAIEFKSESKNNYSINFLLNNIKTKQELSVDVKSILEKGKKILSDNEKKLNEALKYFYENQTFFIEHMNKALEYNNTVEVFSKYIMDNFDSSNDTNQNVLFDKMLIILAEIQSEVIKTTSAKDRSNHLHHALDATMIACVNQSIIQKITKFAKYKEDKEPIYDDESGEIIKHPRLELPYKEFRDEVMMRVYERDENILVKRLASLDNYKNRSTNSDDIYVLNPSRSTNKNIKGAFTQETLFGYKNGVITKRVSVKDLKDKDVEKIINKDNGSKALYESVKTWMKSSASERGEFPILVGKGNYIKKVVIEESSNPLKRAKIRDNLYAANTECIRVDVYKKKGDDNKYYMVPIYYYQLVKEKQNVIKKLHGKKTDDIVYELMWAQGENGRDFLASEKLNNDYIKQASLPRYSLIELELVSGGKGLCYSAGATSGMFEVYSILGDDFDLIDSKITPKSKNQITVTISTIKNIKVRNISMVGKIN

SEQ ID NO: 7829 - protein, 1452 aa, unidentified
  REGION 1..1452: note = Description of Unknown: Cas Enzyme sequence
VNGEIAKKGVVRFDSGMSKEQAGYVSPTKERREARSKRNLIRARKYRKWDLLEILVEEYAPLNKIELEVWSKYKKRQIKKFPENEKFLKWLACDFTYEGGIKYKNPYDLRVTALDNPLSKDEFGRVLYHLIQRRGYKDIGESDSETEKQIARRGEGGFQKALDSNRTIAEALVNDFLSKNKRARNQYPYRDEYEYELEKICEAQGYDITKTNKGKYNDKFVQRLWNAIIWQRPLRSQKGNIGKCILEPSKLRCPISHPVFEIFRAWQFINTIKYYDKNEEKQNILQDYREQLFEFFLRQEKNFKFEEIRKFLDKKFGKAQKYNYPINKKGIYNTSVSGMPVCKGFVDVFGNIAKEAISDMHHYNMGNAPKIIRNYSLNDLWHILFSFDEKESENIFFLKEFAISKLGINNEIRKDKEINPFAKLKGNLVKGYSDLSYKAICKIIPFLKMGYLYNEAVVLAKIPDLLGEKWDNEKETIFEIVQQSNEIYNWNKIIIGITNNLIDRYKGLNNNELFAYKDYEYKLDDSDIKDIEEACNGYFGEKSWAKRINKVVIIDSVRKHYQEFFHDAKRAYQKLPLLTDIFNEQLQSKNIEIVGDLYHHSDRENIYGNVDTDKKTGLEILPEARIDSIKNPMFNKSMSILRKLTNMLIKDGVVDSDTEVVVELARELNDNNMRIAIERYQNKRRDTREKYRMFLEEFKEQEQSNINVEENIPIFEMWTEQIFEETENEEGKVIKNRNNGDILKENEEIRRYELWMEQRGQCLYSGKMISITQLFSNEIDIEHTIPRSILPDNTMANQTVAYAWYNRDKKKKQLPKQCDNYSIEKEGWGTAIEPRIANWIEKREHFKTLYEGKLKPRGNEDENAKNKRIQDKHYLKMHYDYWKDKVERFDAEEVKDSWARRQLVDTQMISKYAREYLKTYFKKVSVQKGSTTANFRKIYGFQSESEIKSRNKHTHHAIDALVLTLIPVNSSRRDRILKEYYKALEDDNKTAIKSIKTRELPVGFNSQSFINEIENTTLIVNYEKDNILKQTKKTVRKRGKIQYLKDKKGNFIFDENGKKIKLKAKGDTIRSTLYAQTYLGKIREVERDDFEKEIKVEKLNLDVKVRGLPVKHQNNDWVYKHGKEEFSYVVRKPIKDVLSKIDDIVDPCIKELIRKQKNNAEIKDYQGNIIRHVRIKVKAGKEVKERINYRSKHEHKNKFYSESGSIPYAVLLQKGKSNKYLNADGNILKESVDREMITIPSFEIAKTFKKAESFDLEHYIKEFYSQYSDWNKTLMKVGQKVFVLTNDSDYERINDVDFLMNRMYVITQFSEGSIWLKYHLTAQSKDEIKMSIKEIKDKLLYQHEKTLGIPEIVEDGEIKENKERKEDYETKKYRFDTINAFRFGRLSKIIGEGQTKKIKQELDKYKAIASKIEIDGETPLLKMSKENWNFLFEGIDFKVKLDGTIIFNTENE

SEQ ID NO: 7830 - protein, 1291 aa, unidentified
  REGION 1..1291: note = Description of Unknown: Cas Enzyme sequence
SSRTPLYDWINKIKEFIVTTDLNDDGSIKKDKEGNEKRSFRAPAEDDWGLLKKKTEADIEQSKKTVGTYIYEAILQKPNQKVRGKLVRTIERKFYKKELFRIIEKQKEFHVELNDEALFTQCIEELYTYNESHRSTLQHNDFTKLFLNDIIFYQRPLKSKKSLISNCQYEYRIFKNEAGIYEKTPIKCIAKSHPAYQEFRLWQFLHNLRIYEREKVVNEKLHTDVDVTDELLPDENSRVELFDWLNDRKDITQDILLNKFFKKKKIKNATSYPYRWNYVEDKEYPCNETRGLIITRLQKADIQMDFLNKDTELALWHLLYSVEDKNEIQKALGSFAKKHSLPNSFVEVFSKFPPFKKDYGAYSLKAINKLLPLMRIGKYRDENSIDEVTISRINSINERLESIRKDNLKIEDVSDDDIPKQVLRSFIKTSNKFSGLNTYQACYAVYGRHSEANGISKWNTPQDIDDYLKEFKQHSLRNPIVEQVITETLRVVRDIWKSYGDFSEIHLELGREMKNPADKRKRMTAKVTENENTNLRIKALLMELKNQGDVDNVRPYSPSQQELLKIYEDGVLNSNIEIEEDIIKISKSSNPTKSELIRYKLWLEQKYRSPYTGEFISLSRLFTHEYQIEHIIPQSRYFDDSLNNKVICESVVNANPYKDNQLGYEFIKNNEGRIVSELSTNGKQIKIFNLVEYERFVKDNYGKNKTKMRNLLLEDIPDSFIERQLNDSRYISKEIKGLLSNIVREDNEQEAISKYVIPCTGGVTSTLKQEWGLNDIWNKIITPRFIRMNQLTNSEVFGQWVNKEGKNVFQTEMPLDLQKGFNKKRIDHRHHAMDAIIIACATRSHINYLNNESAKSTTKETRFDLKHQLCYKNKIDDKGNYKWQFHKPWDTFTQDTLSIIENIIISFKQNLRVINKSINYHLSYKNEDGILQLDKNNKPKKILRKQITGDNWAIRKPLHKDTVAGQVNLRLKKQVNLLQAIDQWETIVDKSLKTKIKQLINEGLDKKKIQKFFVSNENKWLGKDVTKPEVYYFSNEKEVLVASRTTLDTSFNSKKIESITDTGIQQILLRHLRKYDEEQDGKITEHPELAFTSEAIEEMNKYISALNNGMFHQPMLKVRTYEPKGNKFNVGYTGNKKHKYVEAAKGTNLFFAIYADENGKRNYETIPLNIVVERLKQGLKEVPELNEKGDKLLFSLSPNDLVYVPTEEEINSENIRGDYNADRIYKMVSSSGAQCFFVPHNIANPIVQTKELGANNKSEKSWDGIMIKQNCLKLVINRIGKMERKNITNKI

SEQ ID NO: 7831 - protein, 1114 aa, unidentified
  REGION 1..1114: note = Description of Unknown: Cas Enzyme sequence
TSVSGMPVCKGFVQVFGDIAKQAIATIYEYNMGNTPKIIHGYSINDLWHILFAFDEKQSENKKFLEEFAVDKLGITNVVKNEKESNPFAKLRGAFTNGYSDLSFKALCKIIPFLKEGFLYNEAVVLAKIPELLGKNWHAEKENIFKITEKSNELYNWNKSIIGITNNLIDKYKGLDSEEIFAYKDYEYALDDMDSKDIEKACQGYFGEKSWTNRADKDEVINSVKNHYQEFFRDTKRSYRKLPLLTDIFEEKLKENKIEIAGKLYHHSNIENIYGNVVTDKKTGREVLPEARIDSIKNPMFNKSMSILRKLINKLIIDGVIDSDTEVIIELARELNDNNMRIAIESYQKKRQDIREKYRMFLEEFKEKEQQDINIEESIPVFELWTEQTFANTIDDKGKNIENSYNDEILREKEAVRRYELWMEQRGQCMYTGKMISLTQLFSNEIDIEHTIPRSLLPDNTMANQTVAYAWYNREKKKALLPQQCDNYYEERNGWGTAIEPRIANWIEKKEYYKNLYESKQKSKGNEDEIVKNKRVQDKHYFKMHYDYWKDKVERFEAEEVKDSWARRQLVDTQIISKYAREYLKTFFKKVSVQKGSTTADFRKMYGFQPEDEIKNRNKHTHHAIDAAILTLIPANSSKRDRLLKEYYKAIEDKNKEAIKLIRVRELPYRFNSQNLIQEIENTTLIVKYEKDNILKQTNKVVRKRGRVQYLKDKKGKFILDKNGDKVLLKANGSTVRSGLYAQTYLGKIREVERDNFEKEIEVERLNLKIKVKGLPAKRLNNDWTYKEGKDEFSYVVRKPIKDVLSKIDDIVDPCIRELIRKQKNNSEIKDYQGNIIRHVRIRTKAGKEVKERINYRSKHEHKNKFYSEAGSIPYAILLQKGNNNKHLTKDGNVPEATINRKMIPIPSFEIAKIFKQIGTFDSEQYIQNYYSQYKDWDKTLLKVGQKVFVLKNDDEYSLIKDINFQRNRLYIITQFKNDGSKIMLQHHLEAQAKNDIDKKIKSIKDNIIKEVELELGIPLIKENENIDNLAERKSNYQKRIEDFAVRLKVIADYSSTEKANIVKKNIEQYKTESSTITIDGQTSILGLSRNNWNFLIEKQDFNLQFDGTIIFTE

SEQ ID NO: 7832 - protein, 999 aa, unidentified
  REGION 1..999: note = Description of Unknown: Cas Enzyme sequence
LAFVISDVNGSISGSSGYLGAISDRSKELYFKKQTVGQFLMVQLDINPNTSLKNQVFYRQDYLDEFNTIWETQAKYHKELTNELKCEVRDVVIFYQRRLKSQKGLINFCEFESREISVEVEGIKKKKTVGLRVCPKSSPLFQEFKIWQVLNNIQVSDRDYRSERFLEQEEKEILFKELSIKKGLSQEEALKILYKNHKELKLNINNIEGNRTQFELFKAYQRIIELSGHGEYDFAKLPVEESTGIVTDVFGALGYENAILSFNPFLDEKEFEKQPLYQLWHLLYSFEGDNSPTGNEKLIDRISERYGFEREYAAIIANVVFQDDYGSLCTKAMRKILPHMKDGNEYSLACELAGYRHSKSSLTKEEIENKVLSEKLDILQKNSLRNPVVEKILNQMINVVNSLINVYGRPDEVRIELARELKKSAKEREDLTAAINKATSEHENIRKTLQSDKFGLTHVSRSDIIRYKLYEELKENGYKTLYSDTYISPAQLFSKDFDIEHIIPQARLFDDSFSNKTLELRSVNIEKGNQTAYDYVLSKYGQERLDEYLNKADKLFKSAPNKQTKLKKLKMTDSDIPDGFIDRDIRDTQYIAKQAKSLLESVVRTVTPTTGLITDRLREDWQLIDVMQELNWDKYNQLGLTEIIEGRDGQKIRRIKDWTKRNDHRHHAMDALTIAFTKRSYIQYLNNLNARTDKTSDIYGIERKELYRDDKGKLKFNPPLPLNDFRAEAKKQLGSLLISIKAKNKVFTTNINRTKKAGSVNTKKQSSPRGQLHLETVYGSIKRYKTTWEKVGGGFDEEQIQMVASKKCREALLKRLHEFDNDSKKAFTGKNSLAKNPIYLDELQTSIVPEKVKVVSMETIYTIRKEISPDLNVDKVVDIKIRKILQKRLDEFGGDSKKAFSNLDENPILLNEAKRIAIKRVTITGISNAVSLHKKRDKEGKLMLDKDGNEQFVDFVNTGNNHHVAVYRDENGELQESVVSFFEAVARVNMGLPIIDKDY

SEQ ID NO: 7833 - protein, 986 aa, unidentified
  REGION 1..986: note = Description of Unknown: Cas Enzyme sequence
VLGLDLGTTSIGWALVKEAEASDEKSSIIKLGVRVNPLSVDELSNFEKGKSITTNAERTLKRSMRRNLQRHKLRRDNLIEILKENNFISGDTILSENGNRTTFETYHLRAKSAKEQISLEELARILLMINKKRGYKSSRKAKSQDEGQLIDGMDIAKKLYEENLTPGQYVYQILNENKKYIPDFYRSDLQMELDRIWSFQQQFYPEILTEEFRGQIQGKGKQNTSKIFLAKYGLYTAENKGVDKKKNTYKWRNDALSRELSKEELAFVISDVNGSISSSSGYLGAISDRSKELYFNKQTVGQFLMAQLDANPNISLKNQVFYRQDYLDEFNTIWETQAKCHKELTNELKCEIRDVVIFYQRRLRSQKGLISFCEFENREISVEAEGVKKKKVVGLRVCPKSSPLFQEFKIWQVLNNIQVSDGDYRSKRFLEQDEKEILFKELSVKRNLSQEEALKILYKNPKELKLNFKSIEGNRTQFELFKAYQRIIELSGHGEYDFTKLSAEESIEIVTDVFNALGYETAILSFDSLVDDKKLELQPLYQLWHLLYSFEGDNSVTGNEKLIAKISEKYGFAKEHAVIIANVVFQDDYGSLCTKAMRKILPHMKDGNEYSLACELAGYRHSKNSLTKEEIENKVLREKLEILPKNSLRNPVVEKILNQMINIVNSLIDIHGKPDEVRIELARELKKSAKEREDLTNAINKTTTEHDNIRKILQNEFGLTYISRNDIIRYKLYEELKENGYKTLYSDTYISPSQLFSKDFDIEHIIPQSRLFDDSFSNKTLELRSINIEKGNQTAYDYILSKYGREKLDEYLNKVDKLFKSMPNKQTKLKKLRMTDADIPDGFIDRDIRDTQYIAKKAKSLLASIVRVVVPTTGSITDCLREDWQLIDVMQELNWDKYNRLGLTEIIEGRDGQKIRRIKDWTKRNDHRHHAMDALTIAFTKRSYIQYLNNLNARTDKTSDIYGIEKKELYRDDKGKLKFIPPMPLN

SEQ ID NO: 7834 - protein, 916 aa, unidentified
  REGION 1..916: note = Description of Unknown: Cas Enzyme sequence
ESFDPRLVYLTIHHIIKYRGNFLYEFDASDKQNEEQEFDVSGTEYIEEKFDKIFNIIKENDDVFDISDEIIDNIIDILKDFNKIKKEKKDELFKLIKEKALASKKILDEIIKALLGDMFDLKKILNDDSIAFDNEEGDAKLKFSDKNYEEKEESYLAILEDDNSETLKLLKEIYDWHIMQTLLKGEKSISKSMISRYEKHKKDLRILKCLVKDTCGKEKYDEVFKDRQIYKKSTKNEKGFVNYYNYISHDQDVGKRDIDQLYVYLNKILKEIESNVEKKGFSVSKIYSKEDFDRDYQYCKESIENKDFLLKLRIKDNGAFPYQLHKKELLEIIDNQGKFYPELEEYKEKIIKLFEFRVPYYVGPLNQYSVFDENNIRIKNSPEHAKFSWMKKIEGKENEKILPWNFDYVVDIDKSAEKFINIMTSKCTYLPREDVLPKNSLLYSEYCVLNELNKVKVGGKLIEAKIKNKFIKEVFENKKTVTEKHFRDFLKCESYQNYTDDTKIDGFGGDKKFLATMGSSVDFKKILGDINDNNREMIEQIIYWSTVFEDKKILRIKIEKSPYKFILSKTQINDISSLNYKGWGRLSKKFLTEIYTDDLEPRNIIDLLKSTERDFSNLNLMEIITHKNLSIKEKIEKELAKYTNKDKITYDDIESLAGSPALKRGIWQTIKIVDEIVKFLKSSPSNIYIEFAREDGKKGKRTVSRYERLEKLYKDLKSDDDFKNISEELSRYSADKKALDNKSLYLYFLQNGKCMYSGKTLNINELATYDIDHIIPRSYIKDDSFDNLVLVERIENQRKGDGALDSDVQCKMNSFWVNLNKKGLMTSKKFSNLNKKEFNDEDKQKFINRQLVETRQIIKHVANLLTQAYNNGGTKNDENTKNTQVFSLKANMISDFREKYGLYKIREINDLHHAHD

SEQ ID NO: 7835 - protein, 1103 aa, unidentified
  REGION 1..1103: note = Description of Unknown: Cas Enzyme sequence
MGYRIGLDIGITSIGYSILKTDEDGNPNRIELLNSVIFPLAEHPKDGSSLAAPRREKRGLRRRNRRKNFRKYRTKRLFIESELLTEKEIQCLFEDVGEMSIYQLRVEALDRPLTNQELFRILYFFAGHRGFKSNRKAELKDSDNGPVLKAINETREEIHNNGYRTLGEYFYKDSKFEDHKRNKEYEYLTTPERSLLIEEIKEIISKQRALGNGKVTLEFEKAFIGDQSNQGIFNQQRDFDEGPGGNSPYAGDQIEKMIGWCTFEKEEKRAPKASYTFQYFDLFSTVNNLRIQEYTGEVYRDLTVEERQLLIDKALEKEKITYADVKKLLNLDEYAKFNLLNYGSKVDAEATEKKTTFVSLKAYHKLKKTMGKEVFNEISPSTIDEIAYILTAFSSDKSRIREFEDKLELSEELVGKLLPITFSKFGNLSIKAMKNVIPYLELGDTYDKACSEAGYDFRQNQINEAYIKENVTNPVVKRAASKTIKVVKQIIRKYGPPDAISIELARELGKSNEERKKIKKRQDENRSYNEKIASQIMELGFAVNGENIIRLKLWQEQKNLDPYTGKSIPLEDVFSYKYDVDHIIPYSKSFDDQFTNKILTSAACNREKGNRIPMEYLGNDTMRVKTLEAVASQIKNVKKREKLLKKTFGKEDMDGWKERNLKDTQYISKILRSYFEQNIEFSDHLDKKQKVFVGNGAVTARLRARWGLNKVRDDGDKHHAMDATVVACITPTLVRMLTLYSRRQEVRDNPNLWHTYNEKEDPDFVKLSKVKREQYEELFSKRFPEPWPGFRDELIIRMSEDPKSLMDNYPAVKTKYTEQEIIDLKPMFVVRLPNHKITGPAHQETIRSAKLLEEGKTVSRISVDKLKLDKNGEIKTTKWGFYKPSDNGWKVTYDVLQKELEKNGGDGTKAFPNGEFTYESNGHSHTVRKVKIVQNSTLTVQLNNGKQAADNGSMVRIDVFKTPKKYVFVPIYINDTVKDELPNKYSEQRKTYEEWPKVEENEFIFSLYSNDMIHVVSKSGFKPIFNNGKKVEIGNQIFDFYGYFGGANIATSSIQVKSHDNEYGGESIGIASLLAFEKYTVDYFGNYHKVNEKTRQTFQRKKG

SEQ ID NO: 7836 - protein, 1532 aa, unidentified
  REGION 1..1532: note = Description of Unknown: Cas Enzyme sequence
MKRILGLDLGTNSIGWALVNSNFDKKEGSIKGIGTRIIPMGQDVLGKFDAGVSISQTADRTNYRGIRRLYQRDNLRRDRINRVLNVLGFLPPHYADQIDFEKFFGQFKKGKEPKLVYRKDDEGNYHFIFQESFNEMVAEFKSSGQDIKIPYDWTIYYLRKKALSKRVSKEELAWILLNFNQKRGYYQLRGEEEENSKDKVEEFYALNVADVQATEDINAKGTWYNVILDNGWIYRRQSKEALFDWKGKIKEFIVTTTLDKDGAIKTDNYGNEKRSFRAVDSEKDWIAIKKRTENDILDSQKTVGQYIYETLLTNPKQKIRGRLVKTIERKFYREELNAILEKQIEFHPELQSESGFYKKCIEELYPRNEAHQQNIAKQDFRYLFVEDIIFYQRPLKSKKSSIADCPYENRIYKNEVGEFVRKPLKAIPKSNPFFQEFRLWQFLQNLKIYKLDEAGDIDVTIDYLNNDEAWVALFDFLNERQDIDQKNLLKNFKLSEKIHRWNYVTDKKYPCNETKGQIKSRLSKVKEADIDLLLTSDFIQSLWHLIYSVTDKNEFEKALSTFAAKNNLDKESFVENFKKIPPFESSYGSYSEKAIKKLLSLMRMGKYWDISKIDDVFKNRVTSILERLETIDFDKEKLDSIQDDDIPKRLLKSFIKSKSHPLSGLNTYQACYAIYNRHSEVGDIKQWKQPSDITTYLNEFKQHSLRNPIVEQITLETLRVVRDIWEHFGTCNETNGVKIYDTLFDEIHVELGREMKNDKKTRERISKSISEKENTNERIKALLQEIKEDPEVYDDVRPFSPSHQEILKLYEEGVYENPNTEYNKVSSDEIEKIRKNTSPTKSEITRYKLWLEQGYISPYTGKPIPLTKLFSTEYQIEHIIPQSRYFDNSLSNKIICESAVNDDKGNETAYSFLKNRGGEIIDLGQGQSVSLFSLENYENHCKHYFKSNKSKLTKLLSEDIPEGFINRQLNDSRYISKLIKGLLSNVVREDGEQEATSKYLVPVNGAITSKLKQDWGLNDKWNEIIAPRFMRLNEMTNSQDFGFWDKDINAFRLQVPDDLAKGFSKKRIDHRHHALDALVIACTTKDHINYITSLNTSRKNYSLVSKLRNTKEKQIKDGKTGSLKTVTVAKAYHQPWQGFTSEAKEALETTVVSFKQNLRVINKTNNKTQQWVNQNGDFKKEMVRQTKGQNWAIRKSLHKDTVAGKVVLKREKGAVAINAAIDSWAMIIDKTLKNSIREKVEEFKGDLTRTKKHFKASPLQVEGKNLSKMTIYENIEAYATRTTLTEKFTRKQLESITDLGIQKILENHVKNYLDDKGNERFDLAFNNGGIDEMNKNIQILNNGKRHEPIKKVRVYEVGNKFSVGEEGAKSSKFVEAAKGTNLFFAIYWDEEKQKRNYETIPLERVIAWQKEEASLPKEQRTEVPIDNTKGKFMFSISPNDLVYVPSDEEIEDNSLINFSNLSKIQKSHIYKTVSSSLTQCFFIKSEVATTIWNKKEYSALNKMERDIEGNMIKDKCWKLQTDKLGNIIKVIK

SEQ ID NO: 7837 - protein, 1068 aa, unidentified
  REGION 1..1068: note = Description of Unknown: Cas Enzyme sequence
MQTYRLGVDLGVNSLGWCALTLDGDGNPNGVLDIGVRLFADGRDPKTGASLAADRRVARQMRRRRDRYLKRRTRLMTLLVRHGLMPADSDERKKLEALDPYELRAKGLDERLEPFAFGRALFHLNQRRGFKSSRKTDKGDDKERGKIDAGARKLKEALSESGLRTLGEYLYKRHVAREAVRVRPIGKGAKAEYPFYPLRALVEDEFDRLWSKQAEFHPDLLTADAKAAIKEAIFFQRPLRPVDPGRCTLDPTDERAPWALPLAQRFRMLQEINHLEIIGRDLKPRKLTLAQRDKIYAKLRTARTDPTFDQIRQLLGLDSDQRFNLENERRTALKGDAVGRALSDKSRFGKAWRTYSDSEQDAIVETILAADDEEELAAIARRDWRLDDDHARAVARVGLPDGYCRLGRKALTRIVDELVSGFVEVTDPATGEVYRAPLTYDQAVRRAGYHHADFRGDGAAPELDYYGKPLQRHMIGATGVPDDPDEKRYGRFPNPTVHIGLNELRRVVNALIRQYGKPAEIAIELARDLKLSRQERRRVEEKIKENTERNEALRKELVALGQKVNRENLQRLKLYHELPPQQRCCIYTGKPISVEMLFSDEVVIDHILPFKDTLDDSLANKVLCLRSANHDKGKRTPYDAFRHHPGYDWTGILLRTEILPKNKRWRFAEDALQRFADNADFIARHLTDTAYVARVAKEYLGQICPSDRVWAIPGKLTSLLRGKWGLNGILSDSNLKNRADHRHHAIDAFVVACTDRALLQRMSTAAGEARLDRALEDLPDPWDGFDRDAFRDRIRSVVVSLKPDHGRQGRLHEDTAYGLVADPAKEDGATVVYRKSFADLNENEIARIRDRDLRARVQAHVAAAANGAKLSQAQLSQALAAFAANDEKYRGIRHVRLLKVEDAATLIRLKDRTGRDYKALMPGVNWCIDIYEQPDGSWVAVPISIFQANQPDGTRQALEAMRANRKLHPTARKVMRVHKGDFLKLEHDGTERIMRAVQLWANLVKLAEHHEAGNLDERHKQPNDVDPFRWLFVSFGQLKKRRARKVFVDPLGHVSDPGPPQLRRAAGA

SEQ ID NO: 7838 - protein, 1073 aa, unidentified
  REGION 1..1073: note = Description of Unknown: Cas Enzyme sequence
  MOD_RES 528: note = Any amino acid
REMQQASSPLRFAFDLGTNSIGWAVYELVRTVSGTLTVSKLVDCGVRLFEDGRNPKDGRSLAEMRRIPRSARRRRDRYVLRRDELIAALVDHGLLPSDPKMRRALADLDPYQLRARALDEPLREFEIGRVLLHLNRRRGFKSNRKADSRDKEKGKIAEGVARLRERLATEGVRTLGEYLWRRHGGPDGSATPRTRLPVRIRLEGEKSQALYDIYPTRDMLEHEYDEIMRAQAAHYPDILTPTVIAELKKIIFRQRELRPVRAGRCTFEPSEERLPRVLPSVEARAIYEVVNQLRYGEGVELKTPLDRAQRDLLAATLLSGKSISFDRIRSVLKLPPTVRFNLEDAGKKDLKDYASKSAANVGKRFGPKWQQLPLSERDLIVRKLLDESDEEALVSWLRTEYGLDEATARAVASWMPPPGTSRLGPTANAEILAELQADHLCTYSEAVRRAGERLGRNWHHSDFRDEELYIPLPYYGRILERHVAFGTGDPNDPPEERFGRLPNPTVHIGLGQLRRVVNRLISVYGKPXQIVVELARELKLSKKQREEEQKKNRENRQANDRRRQQLEKLGQPDTAENRLRLRLFEEQQRANNGVALCPYTLQPISIEKLFSSEIDIDHILPYSRTLDDSVANRILCYRTANRVKRSKSPAEAFGQDARWKDILASAAGLPANKRWRFASDAMERFEKSERDFLARQMNETRYLSRLARLYLSAACHPDNVYVTTGQLTAMLRARWGLNSLLGDDNKKERTDHRHHAIDAIVVGAIDRSLLQEMSRRAAQAEAEDRHDITRDVPEPFAGFREAVTEKVGSIIVSFKPEHGKAGALHEDTAYGLVKNEAEAAEIGNLVFRKPLVDLNPNEIDRVRDPVLRAELKKIASQFTSDDEKLLDAKGLRAALEEFAKTPAPGRMQGIRRVRIGKKEKNVIFIRDRRSANVYKALIPGSNHHIDVVQMRDGSWQGFAASLFEVNQPGWRPAWERNKLGGKLVMRLHKGDMIELDDPDGKRRIKVVHRLQPSQNRIYLAPHNEGGDLQKRHDDKEDLFRWDLANIGRLRERRARKVKVDEIGRVKLAKSNVY

SEQ ID NO: 7839 - protein, 1062 aa, unidentified
  REGION 1..1062: note = Description of Unknown: Cas Enzyme sequence
MKTKNGQVDYVLGIDLGVVSLGWAAIEIDIDGGQSLLGAGVRCWELSNASLEEVEKGKEEPPGQSRRQARQLRRQMFRRAQRLRRTYRVLQEMGLFPTGPRSSTARKAYLETLDQKAQEWLRTNVPGANNDGLLAHTFIYRLRAAALDHPLPPELLGRVFFHLAQRRGFLSNRRTLEKNKDEELGVVKQGISQLQDEIQKSGARTLGEFFSRLNPHEQRIRNRYTSRKMFQDEFEQIWNAQRSHHPNSLTDSKKARLYKAIFFQRPLKLQHGLVGRCPLEVLPRKRPNGQVEYIYPFRRAPMASLEAQRIRYMQRINDLEFTDPQGQRRVLSPEERQKLYDLAERNEDLSFTLIKKTLGIPTGKKGEGWECNLERGGEKKLPGNRASAQIRKVIGDATWEDLGRERQKALVDTLIAFLRADTLEEHLHRVWGFNREVASQLAGLPLEQGYHSFSRRAIRRLLPLLEQGERLNAAIQKVYGGTQRKINQHAELPPVRQVLPTVRNPLLIRALTELRKVVNAIIRKYGIPRCIRVEVARELKRSRKEREEISKRMREQQKRREEAAQRVLQELGRTAAPRDIEKYLLAEECNWICPYTGKQITTQALLGDHPEFDVEHIWPLHRSLDDSFMNKTLCYHQENRSVKAGRTPYEAYATDPVRWQEIITRVRNFRGPFARQKLVRFQAEEIPPDFALRQLSDTRWISKAAADYLGHLYGGRIDPTGQQRVFTVAGGLTGLFRRAWNLNAILGGSPEKNRYDHRHHAIDAIVVALTDPSMIQRFAHEASRLLKAWPRVAVRLDPPWSTFLSDVQRHVEGIVVSFRVSRRLSGALHDQTYYAPPTEQGKTKVRKPLREMSSHEVERIVDPTVRDLVKEKLKRLGTSDPKKAFATDANLPIIRGKNNTALPVKSARIWVSSSVIAVGDGPRQRYVVPGNNHHIEIYALLDGQGQEVRWKGKIVSLYEAYERKKRGEPVVCRDHGPNTRFKFSLAKSEYIEWINDDGQKQLLRVVGISDDNLELRLPHDARPITLIREQRERIRATYRQLFQRRARKVMVTPLGEVLPAND

SEQ ID NO: 7840 - protein, 1028 aa, unidentified
  REGION 1..1028: note = Description of Unknown: Cas Enzyme sequence
MKKVLGLDIGANSVGWVLLDEDENKIIDMGVRVFQAGVNDLDTAKEQSRNAARREARQIRKQLRRRKFRKELLITNLIAFRFIKSDDLENIYTLNPYELRAKAIYEKIELFELARIFLHLCKRRGYKSNRKDSLDEKEKGAIYDGTKDGTKPGISELRAEMEAGGFKTIGEYFYSLNPHEKRIRNRYTERKMYQDEFDLIWEKQKQFYPALLTDENFDLFRNIIIYYQRPLKSQKHLVGKCTLERNKRRAPKSSPLYQEFRMLQQVNSLRISGHERIDEEQKHLTQDERSKLIAYLETHKEAKFNTIMKDVFKLNPKVYRFNLENQDKLNGLSTYFHISKVFKKNTPHYTSDEFHKIWNTIYFALDDSWLVKYAKKTWNLDEEQARDLAKIRLEPDYGNLSIKAIKKIIPFMRDGEMYHDAALHAGYDFSLVNEEVKKTEYLPNPNIVANPIVNVAMFQVKKVVNELIDYYGMPDIIRTEMARDLKLPRQKRLDILKNNREQEKWHNEIKEILIKEHLVDEPKRTDIIKYKLWQECKGICPYTGRSISLHQLYNGEVDIEHIIPYSRSLDNSYMNLTISFREENARKGNKTPYEAYHGDPVVYKKIKERVKDFPHPKATRFTMDNKKLEEIDKIFGDFIHRQLNDTRYIAKLSLHYLKHICDDVQVTTGQTTSTLRRLWGLNSVLRNDSDYDELTNLEKSREDHRHHAVDALVVALTTRSYLQKLSTMNRIFGLRDDDKELIKKFPLPWENFRNDAKKYLNRIIVSHKTNLKARGKLHEETLYGKLKNELGDDLLNENNVPLFAVRKPLNDSLTHSQIHSIIDPVIKQIVLDRLISLGVDVSKKFKVPANAFTEPLYLIGKKKGTKTQIKKVRIRVPASNMINIHNYNVWVEPGSNHHIIIYVDENGKQQGKSVTLYEALQRKKNGLPVIDRELKPQEEFIMSLQRNELIIWGDSLPAAFDETDKATYHTIFDRTYRVQKMSGVNLTFRLHNFTRTDQEKHYSLLFKSTSGVQGKKIKISPAGFIEFV

SEQ ID NO: 7841 - protein, 1514 aa, unidentified
  REGION 1..1514: note = Description of Unknown: Cas Enzyme sequence
MSKKNGSDRLFSPISIDLGAVNTGVSLFHADKPWNYCNAEHRGILYYASVDNITFSQQARRAKRHMVRARKRQKMAKKLVFLILKKKYRINFDFNNTDDLIIINKIRSLMNRRGYTFLTLDDVQKQKDLLEEIIEYKDDIELAAIDTDYKQTDLRAAIEEYGKSPEKLQLIIAKLQEEIIKIVQDSKLQDKIKSGYVTLSENDKKKLEYKEIGRILLMNYLTDMRNELTKNGGHKHRTQYIKNIEHDVEGDETFKTYFAAKKIKPKDLLRIIAHVNNLQLRVLRKYFNNKEYTQRIQWEPERFHKVFTRWVRGWHVVQGQIAYKNKKTILDSMQQEEYVKDPIQFFLKNEPAITIPPFEDQNNRRPPVCQSVLLNVESLDKRFPEWQEITKKILQKYAKDYNLAETDLRGLVEYYNKKPKKNAQIKKEEKSEWVSELSIQLHRILDASAAVDPLHLRLYARGLARERDGEVNKHIKLTEEQENKIANTRKNLAEFLNKKEIAEFENLLVDYYDETRNARAGIWRATSALNLLSKCERKPRQKKNERATLIHAITGIEPEKFPEFEQLWIGRKDAKIGGFLSLHSYAGKLEEFRKNEGGGFKLLLTRAESGSTNGLSAEEIKKIKELKKLNDQIAVAAKKIGEQFNLGPYQTEKFNNWFSFTQIYNIMEGESGGFHKNCHACAQENQWRMQPVEFNGNHYARATRLSNDSGRPFDGQLKKLLERLAEEIAKDKTLQLQDFLNIESNAVLEIPIIIEQNKFEFQYSLQQLKKAGKKNEEKAEQKYKNEQNNFSKKNERIKLASKGICAYTGESIPDGYGEIDHIVPRSYSRDYFGTVFNTEMNLIYVSRNGNQAKGNRVYSLENLHRNYLSVQYPGFSVDQIKSQIETTVDTLLDKNEPIVFDALSEEMQRDLRHSLLHNNLRAKVGKLIVRGNQTIVNGTQLYFTKVLMEKLEDRIRTKLGYTGKIDFYTESFDPLRNNAVTYRDYLAASEPVYKKEGAQGFASHILDAVMLLAEHIDEKMSKSKGHEDKILRLKPKNIKALLPGTMHVKVIQKRPKNRKSNQKAVSHFKDSMYAERYLPLIVTKEGGGFGFHLKNYIEIGQGGIDNAFAILAGLIEMNKKPVEKDVLYFRKNIKKGKKFFYFPVNRKKAAQFLFDYRKGKIEQTKENKNLFGLLNSIQYTTMKTNIVDYLTDDKSRKKPSENVEPEKLNKPLKVTIEKKHIPKLEKTVEGLLALPVYSTHWEKILNDKNLKASANSNTMDNPELWEGIQDTYFKNTIPSPEKKHKSVRKVYSLPIVDGPSGGIVFRRKSGIDGNVYQLQAIDGEKYSGFANEDGKAIFKKSVLLPHYLQSPNIVPLDEIIDTKDVVKMYETRKLECKKETLAKYPWFTEMWITPATDSRRLIEVTVSLQKFFNDVVPLLKGYSAETIDSLAWTIPAGTMKLEEPERNSDNLFNQIDSVPRERIRVLAINRIEKTITFQFSRDKGCIADKEIKDALIIWGAKSIEDLYNASTLYR

SEQ ID NO: 7842 - protein, 1024 aa, unidentified
  REGION 1..1024: note = Description of Unknown: Cas Enzyme sequence
MKKILGLDLGVSSIGWTVIEENESGNNILGMGTRIVPLTSDDIKEFTSGNAITRNQERRQKRTQRRRYDRFQIRRENLTRALKEKNMFPDENLIHTDKIYLWGLRNKAVTEQVELKELGRVLLHLNQKRGYKSIKREAQSDKLQKDTDYVAEVKNRYEKLKETGQTIGQYFFEKISNDRNYRIKNQIFPREAYIEEFDSIMTSQKKYYPELLTDEFIKRLRNEIIYYQRPLKSQKKLVSLCEFEKRKVLIDDGKGGKIEAFKGPRVAHRSSPLFQICRIWENINNIKIKDKLGEEYLIPLEKKIEIFNFLDNNEKLKFNELLKILNLKNKDQWTGNAMLEKGIKGNATKIKIAQCFNDPEKVNEFLTFDLNIINTGRTFEFVDTKTGEVKNVQEKYINPSFEKKPYYKLWHTIYSISDENECIHAMIRNFNIDEETAYKLARIDFAADGYGNKSVKSIRKILPYLMDGYDYSSACQFAGYNHSRTLTKEEKSNRDLLEKLPLLEKNTLRQPIVEKILNQMINLVNAIIDKFCRNEEGKIIPFSEIRIELARELKQSREERRSTSLNINKRERENETIKKRLENEYGIRATRNNVLKWRLFHSVKEDESKVNNYCIYCGKPFGITDALAGNEVDIEHILPKTIFFDDSENNKILSHRKCNQDKGNMTAFDFMKSKGETEFNSFIERVNYLYLQGIISKIKRERLLTPANKIPQNFILRQLRETQYISRKAVEILSMICRNVNTTTGSVTEFLRRLWGWDDILMNIHLPAYKSEGLTELIEIEKDGNKTIKEIIPEWTKRLDHRHHAIDALVIACTKQGYIQRINNLSSEITREDMYKDVSEIEDFKAGRKTLLEKYMAGKQPFPTSYVEKEVSKILVSFKAGKRVATYGKRKIKIKGHKKIVQKGIIIPRGPLSEESVYGRVKILEKNRPLKYLFENSHLIFKKRIKKLVEERIEKYNGNAKKAYNSFKKEPIYLDESKKIKLEYGTCYKEKYVIKYPVNAIKPEDINSIVDDEIRKKFQKRLEE

SEQ ID NO: 7843 - protein, 1352 aa, unidentified
  REGION 1..1352: note = Description of Unknown: Cas Enzyme sequence
MKKVLGLDLGTNSIGWTIREVNSTDNQIADKGVLTFEKGVGEDQGKEVPLVQKRTESRSKRRNYQAKKYRKWELLETLILNDPKLCPLPIEELNGWRKYEKGIERIYPQSESFINWLRLDFNGDGKSDYKNPYELRREASEKKLDDAHALGRVFYHMVQRRGFRGRDEEESKTILEGSKEKETVGANEIQKIREEEKTTLGGALYLVQQKYNKRIRNRYNLRTDIEEELKTVCKVQGIDENSDLFRKLHKSIIWQRPLRTQKGNVGRCTLEPSKPRCPLSHPLYEEYRMWSFINNIRVSSKIETDKKEIPLNDEQKNIVIQKVFFGKKKNKEDFEFTEIMKSLDKKGDTLTFNYKPYTTVSGCPVTFSLKDIFDCALSEIKIAHKPNEKRKSKKDYYDYHDLWHVHFTFDSKEKLETYAKEKLNLDDEKAKSFSKIRIPKGYASLSLNAINKILPYLHKGFIYSEAVYLANLPKVFNRKLSDDEVNRIAEDIRKQMKLHKSIKEELSIINSLIGDYLNQPSEEQAGRYPNYILIKKDKELVEQKIAEQLGNKRWAELDSERKSEIKQFVEKKYQEFLQTPRNTELRLLYHKLPRLDDLIKDYLKNEWNIEETNFKYLYHPSETELYPPAKETNGKKYLGDPVPISRGFKNPMALKTLHHLKNLINYLIKEDKIDDETRVVVEIARELNDANKRKAIERWQRDREKQNQEFTKAINEFAEHENLTIETTDEIIDKYRLWMEQEKQCIYTGKIISLTELFDGTKFDFEHTIPADISFDNELKNLTIADSVYNRQVKQKQIPTELPNYEKDVEIDGIIYNAIKPRLKFIEDKVKHFKEQVEHWKKESKRAQNKERKDQCIQNRHYNQFELDYWDKKLHTFTMKEYKPQWRNSQLRDTQIITKYALHYLKTVFDRVEVQKGTITAEFRKIFNVGFEKDRSKHTHHAIDAAVLTLIPSPTIRDRLLKEHFAAMENNIHFHTKPNDWNNFNPSTILDIENDTLINYISQDRTLVPTKKNVRKRGRIQYVKEKLENGKWQYKLDENGNRIPLIAQGDSIRGQLHKETFYGAIKENSNEEVTYVVRKPVKDFKSEKEFEDIVDPVVKDILSKTVAERIKNGKSFKEAITEPIWMVDSSGNFKKTDKHGNPLLPIRHVRCKARAGRGYFTKALQLKEHIFKSEQEHKQWYYVQNEINYLFLLYENQTDGKISRAYRIMNLLDLVNMDIKNSNELYQIPSYQVLEKGKGKKKTLYQLKHILKVGQRVLLWKENSDELRDLEKKELLKRLYKIYKFNEISVTAYVYLKHHNEARPDIDLPEGDKNFDLGKYQPVITLTPDKLNCLFEGIDFEITLDGEIRIKR

SEQ ID NO: 7844 - protein, 1043 aa, unidentified
  REGION 1..1043: note = Description of Unknown: Cas Enzyme sequence
MENKTIFSFDIGTGSLGTCVRKEKEILDLSVDLLPSDYATLKEAQKRRRQIRTRIAHKEREKWWKERAKAAGIEIPETGHLDEKGNFVKPDERMSREFPKDGDNTIYNSALLRIALLQGKKLEGWQIFKAIWSSIQHRGYDSNIPWISEPKRNTNEDNLKNKKDEEENKERVKRYREELERIFGKKEEFYYPCYYEAYKMGIWSPDDPNNLNKKISDNPQAARNKGEKVDLVTPRELVEKELKDMLINTGIKENLDFILWGPAKSKYATYNLKDYKKFRGKNWEWQGLISQKTPRFDNRIISKCILIPRLNVCKAKDQLNKEVTFLMQLKNVRYFSTINGEEKRLNNKEINEIFEKFKDKLKITKPVWTKYVKEKLKGDYATPEKIEAPKASGRSSFCRPALRIIKELILSGKKPSELYSELTSQNTNTDPQKGLIKEDYNFLLKLTDDYNFYVPDTREDDAELDSAERINKINELISKISNPVVRHRLKLFYDKLEDLKKKYGEPEKIIIEFVRDPEEGFYGKKKREKIISEQKKKREENDSAYKEVKSLGLKGKNSVLKVKLFREQNALDIYDGQPIKSTEIDNYEIDHIVPREDGGPDAYMNKVLTSRENNESKGKKTPYEWLKSTDKWNSYLERVKKLKIIDKKKSLLTSPDAKDLVEKYTQLAETAHIAKLSQRICHLFFGWGQGTKGSIKRVIIANGSLTAKMRNYYQLNRILHPDINKEEYIKIISSGEIDEKNRANPRHHALDALVLSMLPEIKMNDKNKDFFPIWFTPEYCKQEIEKCFPKWIRHEKPKLAETIYGLRRIKGSDKYVFVNRRIGDVKSIKGYYDIKTAKKYLDRIFSPEIQKDFREKLNSNPTQEEWKQFLDKYSRGGKPKKILLKEGKPIDYEDIKDFLDGKVKNYGEFIKGKMPGQFLKQKKDSYGYVVYKNDKGKWIREPIYAFESPYSKLKEIKDKHPQSYYFRTKMLIEIQKDCEVTLSQIKKDGGGRVKSIKTTIKAGRYHLNSINKLSTCKIEDFYKNEYVVSLNKIMEIGKMVPIS

SEQ ID NO: 7845 - protein, 913 aa, unidentified
  REGION 1..913: note = Description of Unknown: Cas Enzyme sequence
MEWRLGLDMGTNSIGWAALETKSGVPFDLMDLGVRIFHDGRDPKSGESLNQARRQARLMRRQRYRTQRRMKVVKNLLIRSGFFPADSTTQQEIKKMNPYNLRVKALTEKLPPFELGRVLLHLSGRRGFLSNRKSDSEEDKNLSQLKEKMKSLKEKLEDKTRYRTLGEYLWETSKTVGQGLRFRPELTNIFPLREMYLEEWETIRKEQVKFHPTLPWEELRNKTYFQRPLKPQIRGLCLFTGEPRAWNFLPTLQRFRIYQEVNALKIYTETGKEELTQTQKDLLYRLLEGKEAAKWKGKGRERTLGWPEIKKKLGISSNQTFSLENDPKRADGLQGDWISEKFRQPDFVGPQWDELSDKLQDQIVEAVASENDDDIIRGLFQTLILSEEQMGKMLDFSIANPQTASVSISFAQKVLDYLRQGQIYSTAVESAGFHHSLLTSAYGDGLGKHLPYYGEILWDQAVRRTDKKTIAPEKNDTSYMVRAIEHFGRITNPTVHIALNQLRLLVNKLIQRFGNPNEVVLEMGRDLKQTKKQKDETSKQQAANQKLNQRIKEELRHIGIAHPSSWDLKKYKLWEELGKDQAARCCLYSGKPISLRQLFSDEVEIEHILPYSRTLLDGMSNLTVSYKTANAYKGKRSPWEAFHSSPAGYSWESISDRVKRTYPGIERYNVSKRGKFTKEAMEDFDESEEFVQRQLTDNHYIAKAATRYLSVVCPRNKIWNSIGNITFAFRSTHGLNALLTRRKYDDDKDYPARKNRSDHRHHAVDAVAIALIDRSILQHVQRKSGLRELEHHDWKEILPVLPFPRKRLEEMVKNILPSIRVDREPMGQLFEETAMSKRFPPVRKKTKEITQGELPLIVSDKIREEFEEQLATLKKWSAVIGVMSDIYPEVVVKEPQWISRKPVTRFSIVIYHL

SEQ ID NO: 7846 - protein, 908 aa, unidentified
  REGION 1..908: note = Description of Unknown: Cas Enzyme sequence
VPIKLKFPLIFTPARSLLRQELSLILKQQAQYFPVLNQVITVKHYTQADAPETLTLQEYLLDSVHGPIFGQRNFDDGPGTESGQSQYQKEIGRDPFNHQLRLAHASWTAAEFILDQKINLLQWRTAEEATFHPLTAEQRTQLQQLCLTAAKTPSYSQIATQVLGKKYAQVSFNLDVGQRKSTKFINGLDDFYALKEALQTIPDLVQQRAAFDEVARILLFFKTDLNRLRALQSSKLLQAYRTEFTEQSVCFQKLCQITGNKTVHLSRATILKLLPYLQTGAEYSQALQQAGLDARRVSLSLTDINNSITNPVVKQLVLQSIQIVDRLIKKYGSQPDYITVEMARDVAKTPAERQQITKQIKMNQIQKDKIRQFLQQQHAVVNDRNVLKMRLWQEQQECDFYQPQQKLSLAMVLSSQTEIDHIIPRSFSLDNSYSNKVLTTKRHNQEKGNRLPLQAFNAERQRQIANYAEQLLQEHHISLRKYHNLMQTEVSRQWTNQMLQDTRYATTVLADYLEVHKVKQDGQKRLLRPQGKITADLRSFLNLPKDRQTNYHHAVDALLLAALTPNFLQQLQDYYTQAEQGTTADTGPNLEHYFWTNFPQEIRLFADPDPQTRLQDDQLKQTILQRQVYPVAQIEQLQPIFIYYPEDRRSHGAMFKDSLYGSQYFDQGYLKTYVPVCHLVPTVDPQTGQTILRKGLDKVYPYGRKQNPVAQAGIPPQVFQAIVQNFQQTKQRLLQQQVITPTTSDQKVLAYLPETLVVNQQAIRTVPALRKSNNAYYNARRQVVQIPTHIHYVDLYQNQQQEWLYVPTYTYEHQPSHLICTPHQPRSTWDAITPQDHFQTRLYRYSLVRLAIKRDRQGDLTMQAHQWYYLYFVKFSQNVLTFSDGNNNQIRLSGQSLEKITKVHPFTK

SEQ ID NO: 7847 - protein, 1278 aa, unidentified
  REGION 1..1278: note = Description of Unknown: Cas Enzyme sequence
MNNDYNVGLDIGKSSVGWAVIDDQYHVVEARGKNLMGARLFQEASTAENRRMYRTTRRRLSRRRWRIRLLNEIFSEELMKIDPNFLQRLKYSWVHPLDQKNHNYYYGGTIFGNKAADKKFYKKYPTIYHLRLTLMNDDQKHDLREVYIAVHHLIKYRGHFLTGGKINPKNAFDIKKFADNLEHFNETFYPDGDLFRLKNQELVNEKLLNFQITKTQRVEEALKYFEPCSEDNKKLVKSVVTAILTGIVGNTVNLINIFNLKSEIAKDEEKDYKFKFSDENIDEELETISGKLNQEENQFINVLREAYDGITLKSILKDSNSLSQAMVQRYKNHHHDLILLKEKFRNKDTKKDFDKAYMNVLSADDKKQSAGKKYFRKKVIAAIENYFSGELDFNEIKKALTSNNEKEVAKATTRLVKITEDRVNHLEPNAIKDYQLICLLQDINLDNFLLTQRNKDNGAIPHQLHENELRQIIKKQGKYYPFLNETFNKENKTENKIVGLLTFRVPYYVGPLVEPEKVTGDSSNHWLVRKELGEITPWNLADKVDLDESAKKFIHRLTNKDSFLIKEETLPDNSMIYQKFKVLQELNNVRYSFTSDSSNRRYRLSPSLKQKIFQNLFKTHVNVTASMVEDFILNSESRSVKLYGLSDQHNFNNSLKTYNYFVKIFGREFVERQSSQDLLENIVEIQTIFEDRKLIKHQLENLKKLTHSQIKQLSYKHYTGWGRLSRKFLTTKKIHTAILNNPIQQDYSIMDLLYFTSNNLMEIINNPKYKVNKWIEEENVDKTDSKIDVYSLIDNLKGSPAIKRGIHQSFRILDDIQRVMNGVAPKNVYLEFARETQQSRITNSRIKRLKSLYQNESIKSDYAELSNDLEKVTQEQIKDDRLYLYFLQLGRDMYKGDKIDRNQISQNYDIDHIIPRSYKKDDSLNNRVLVNRSENARKSDSIFLKPDVIAKMRPFWSYLLRSNLISQKKFDLLIRKEDFTEEEKKSFIARDLVETRQIIKNVAMMIDQKYDGKTKAVAIRSSLTSDMRRYTHKLKSREINDYHHAHDALMIATVGEYIQKRGFDDQGEFTYEAFDRYNKNRIKEFRKKNSSPNTNELDSPIFQNNNRLDPFGFVVGSMKSPNLIQQTNSDTGEIVWTKDNYNYLLSQLENPYILFTRKIGDSKGKLYNETRYPSSLKDSKTKGKIPFNKNQSIELYGGFDSSQQAYSALIYYKKRYRLLGIKRAWIAEIQKDEEFIVNKVQEIAPGAKIILDHVPNEQAVIRNGNWMTIGSATELHNA

SEQ ID NO: 7848 - protein, 1042 aa, unidentified
  REGION 1..1042: note = Description of Unknown: Cas Enzyme sequence
  MOD_RES 206: note = Any amino acid
  MOD_RES 208: note = Any amino acid
  MOD_RES 217: note = Any amino acid
  MOD_RES 853: note = Any amino acid
  MOD_RES 863: note = Any amino acid
RSIAKKLLLAYDLYVNNRHGRLLEAKTEFKQDGTLTKEDFYKTVKNNLDDSELARKIAQEIATDNFMPKQRTNSNGVIPFQLHQIELDKIIANQSKYYPFLAAENPVEDHRKQAPYKLDELVRFRVPYYVGPMITADEQEKTSGKNFAWMVRKEDGQITPWNFEQKVDRQESANKFIKRMTIKDTYLLGEDVLPANSLLYQRFEVXNXLNNITVNRXRLDPEIKQDIYNKLFKTKKSVSRRDLINYLKEEQNVDHVLIEGLKDKELTTKFNSSLASYYYLKKLHVFDKELADLQYQKDFEKIIEYSSIFEDKKIFQDKLRANFKWLTPKQFKAISTWRLQGWGRLSRKLLVELHDANGQNIMEQLWDSQKNFMQIVTEPDFKEAIAKENQNVTQENGVEAILEDAYTSPANKKAVRQVIKVVDDIVKATGGKAPDQFAIEFTREPQRNSELLHIRGTKLLKTYEETASELVDQDLTDSLKEAMTSRKLLRDKYFLYFMQAGRDAYTGQKINFDDIIKDYDIDHILPRPFIKDDSFDNRVLTAKTLNAEKSDDVPYKRFANNYVSDLKMTVGEMWKTWQRVGIISKFKLNNLLLNPNKLDKYQKSGFINRQLVETSQIIKLVSVILQNKYPDAEIITVKSGDNSALRQRLNLYKSREVNDYHHAIDAYLSIICGNFLYQVYPKLRPYFVYGQFKKFSQNRNLEKDILKNIKLQNFLWPLLQENNPKRKAPEKIKENNSDRIVFYKHPDIFDKLRKAYNYKYMLVSRETTTENSSMFKMTVYPRGERDRKKTRQLIPKGNGLDPKIYGGYSGNTDAYMVIVKIDKAKESIYKVIGVPMRALASLNQAKKQGNYNXELHKVLEPQXMFDNKGKPKRGVKGFRVIKDHVPFKQVVLDGNKKFMLYSAQYEANAKQLTLSQETMRIVTDNLKKGEEQDQLLVKAYDEILEKVDQFLPLFDVNGFRSGLHQGREKFIDLAVNDKKITLTNILNGLHDNIVTPNLKNIGIKTPFGQMQFSSNINLSSNAILIFQSPTGLFEKRVKIADL

SEQ ID NO: 7849 - protein, 1033 aa, unidentified
  REGION 1..1033: note = Description of Unknown: Cas Enzyme sequence
  MOD_RES 925: note = Any amino acid
LLLAYDLYVNNRHGHLLEAKTEFKQDGTLTKEDFYKTVKDNLDDSELAHKIAQEIAADNFMPKQRTNSNGVIPFQLHQIELDKIIANQSKYYPFLAAENPVEDHRKQAPYKLDELVRFRVPYYVGPMITADEQEKTSGKSFAWMVRKEQGQITPWNFEQKVDRQESANKFIKRMTIKDTYLLGEDVLPANSLLYQRFEVLNELNNIRVNGSRISVDLKQQIFNDLFEEKKTVTEKALISYLKQNLHLPTVELKGLADPTKFNSSLASYYHLKNLHVFDKELADPQYQKEFEKIIEYSSIFEDKKIFQDKLHAEFKWLTPAQFKAISTWRLQGWGRLSRKLLVELHDTNGQNIIEQLWDSQKNFMQIVTEPDFKEAIAKENQNITQENGVEEILADAYTSPANKKAIRQVVKVVADVVKAAGGKAPAQFAIEFTRDPDKNPQLSHIRGTKLLKAYQETAGELVDQNLTNSLKEAMTSRKLLKDKYFLYFMQTGRDAYTGKKINIDEVSTNYQIDHILPQSFIKDDSFDNRVLTATPLNAEKSDDVPYKRFANNYVSDLKMTVGEMWKHWQRAGIINKHKLGNLLLDPDRLSKFQKSGFINRQLVETSQIVKLVSVILQNKYPDAEIITVKAGDNSALRQRLDLYKSRDVNDYHHAIDAYLSIVCGNFLYQVYPKYRPYFVYGQFKKFSQDPDLQKDLIKHFKGFTFMWPLLQKDNSERKALEEIKENNSDRIVFYKHPDIFDKLRKAYNYKYMLVSRETSTENSNMFKVTIYPRGERDLAKTRKLIPKGNGLDPKIYGGYSGNTDAYMVIVKIEKAKESIYKVIGIPMRALAGLKQAKKQGNYKKELHKVLDPQIMFDKNGKPKRGVKGFRVVKDYVPFKQVILDGNKKFMLNSSTYEINAKQLTLTKETMRIVTDNLKKGEDQDXLLVKAYDEILQKVDQYLPLFEKNNFRNGLHEGKEKFFKLTAKDKKITLSNILNGLHDNLVTPSLKNIGIKTPFGKIQVLPNIILSPNAVLIFQSPTGLFEKRVRIANL

SEQ ID NO: 7850 - protein, 1422 aa, unidentified
  REGION 1..1422: note = Description of Unknown: Cas Enzyme sequence
VFSQQNNLYCKLLQNCDANLIPLQKQTKKTMKKVLGLDLGIASIGWALVNEAQDESEESIIIKLGVRVIQYDTFSVIDKSGNVKESKNPIEDFSGGKGLSPNASRTKKRGARRNLHRFKLRRKMLIKTLKEEGIFSNKTLIAEEGEGSTHSLLELRAKAAEDKIPLEDFGRVLLSINKKRGYKSNRKANTEEKGEVVDSLGIAKLLKKNNWTPGQFVHQRLEEGKSSIPEFYRSDLRNEFDRIWRNQATKYPQIFSNHHRKELEGKNKKDTADYFRSKMGITRAEFKGEKQEKLAEQYKWRAKAAVEAVEPDITAEILVELNNQINSSSDYLGKIGDRSKILAFNNYTVGQYLNKQIQINPNTRLKNQVFYRQDYEDEFDKIWDTQAKFYPKQLTKELKERIKEVIIFFQRPLKSQKGLISTCEFESEVKEINVNGKTRKQQMGPRVAPKSSPVFQEFKVWQVLNNVEIMVEGDSPRRLTIEEKEKLYDALCQSEKLTTTEVTKILGVRRGGLEITNYDQLDGNITKAKIFEAFNQIVDAAGHDTVKIKKKSASEVRKAFSEIFKMLGIDERITTFDSSRTGKDWAKQPYYELWHLLYSYVGDKSRTGSASLIEKLQEKYGFDEEGAKILSKVTFDNDYGSLSAKAMRKILPHLRKGLEYSKACEMAGYKHSDYLTRQEQKDRVLKDYLDPIKKNSLRNPVVEKILNQMVNVVNEIIKTYGKPDEVRVELARELKKSAGEREEMTKAINKAKRDHEKYRKKIKEEFGLPYVSRNDLIKYKLYMELAENVFSTLYLNKEIDRGKLFSKDIDIEHIIPKAKLFDDSFANKTLEYRKENLEKGDMTAYDYVASKGDIMLEQYVARVNSMKNLSPQKKKLLLTSEKDIPEDFLARDLRNSQYIAKKALGMLTEVFRTVIPTTGKITQTLREDWQIVDVLKELNWPKYDKLGMTYFVENKNGQKLSRIKEWDKRNDHRHHAMDALAVAFTSRGHIQYLNNLNAESAEGWSIPRLRKKLMFKNKFGKWSFKPPMPIKKFRQEAKDHLSRILVSNKAKNKVTTPNVNRIQTKNGVKEVIQSTPRGQLHKETIYGTNKRYQTKENVRVDSSFDRETIMKVAKKSYRNALLKRLDEFDGSPKKAFTGKNSLSKNPVYVDEYRSSKVPERVKLVWQETIFTVRKEVNGDLNVKKVIDPKVREILKKRLEEFGGDPKKAFADIEDNPIWYNKDEGIPIKRVKITGVSNAIPIHDQRNHRGEKMMDESGKTGDAAFVSTGNNHHIAIYKDEEGNLYEEPVSFFEAVVRKNRGLPIVNPIFENGAPLLFTMKQNEYFVFPNKETGFDPKAIDLMDPENYQEISPNLFRVQKISSLKYGNSIVRDFVFRHHLETNVENDKQLKGITWESIKNLTDLQYLQKIRLNHLGEIVYVGEY

SEQ ID NO: 7851 - protein, 1287 aa, unidentified
  REGION 1..1287: note = Description of Unknown: Cas Enzyme sequence
MRTLGLDLGTNSIGWAVIDSEGRKVSLLDKGVYLFPKGVGEEKNNEYSLAAQRTGYRSARRLIMRRRWRKQATLETLVKHELCPGLTLEDVKNWKQDRHQYPASETFRQWLNIKAETPDGKPAGPYYCRWRCATGKLDLSLPEERYCLGRAIYHLAQRRGYKSNRISGEEKDGAVSGEIAKLDAARGAKTLGQYFYEECLGKEPVRGSQHYTGRAQYEQEFDVICKKQVLPADLVETLRYNLFMQRPLRSQKGTVGKCLFEPTKARAADSHPLTERFRQLQVVNNIRLACPGETEMRALTSAERETALAWLQKQSATVNFDKLARVLTPKKVSLIFGSDEKRGEIDLGAWRFNYRGDSGLPGSPFTARMIKLFGEDWRFELHRRYLKTGSKTEAQVVDDIWHAIFSFDDEQKLKAFGVEQLGLLEEQATLFAKPLAGGYGRLSLAAMRRIMPFLEKGAIYSHAVFMAKVPDILKRKGIDWEQNKGDIEQAIRSVLDFHEQAAWSEKAANSLIKTYRENHEDPAHLMITEATKLRFMDEIEAVARAEAGASRWRELAVDVRRGVIEKTAADVLHWASRREGYVAVKRLDERVKGMLIERLGLKPEDLEVLYHPSEVESYKAAEKDRHGILQLGSPRIDSIRNPVFMRAMFQLRKLVNTMLREGIIDGDTRIRIEMARELNTANMRAAIERDQRERQKDRDRIRSEIASLPCAPATVTDRDILKYMLWEEQDRRCLYTGATIEVSAFLGDNPAYDIEHTMPRSRRLDNSRANLTLCDRHFNRTVKRNRLPAELPQAEEIQQRVNLLWDEKIEALQKSVEKRKASSRSAQDKATKDTIRQRLHYEQIQLSYLKTKRKLFFLKDVPEGFRNSQLVDTRIICKYAMEYLKTAFPKVYSVKAGAVNAVKEIWGLDQKFRGDHVHHAIDAIVTGCLSPSWYAELAAYYHEYERYLYSEARKPDVPQPWPGFDRDLNEKVSQELLVVHYTPDNLLKQTKKVVRRRGKIVRENGKPRYAMGDSARGSLHQDTIYAKIKDPAEQKNGETGSFKAVVRRTLDTNFKDFDKIVDPQIRAKVLEQKEKLKTGEPIWFDEPNQIPIRKVRCYASNKADSLIPLNAHRDQSLQEHKQRRYAANDGNYITALYRGVINGKPKADWKVVNNFDAVQAKKKGDWEAILPEVDEKGLLLRHVLKKNTLVLFKRNEDENLTSLSQVELSRRLYRVTVMKGDRIKVMHHRCGLAVGEIEKWPSKIDFDQAPMRGHLFSVNGIHIAVAGADFKFDPMGHIHWQEAGEDA

SEQ ID NO: 7852 - protein, 1308 aa, unidentified
  REGION 1..1308: note = Description of Unknown: Cas Enzyme sequence
GGGIAANANNERTNRRRHMRTLGLDLGTNSIGWAVVESVGRRVSLVDKGVYLFPKGVGENKSGEYSLATQRTGYRSARRLIMRRRWRKQATLETLVKHDLCPGLTVQDVKDWKQDRHKYPASEAFKQWLNIKTETPDGKPAGPYYCRWRCATEQLNLSLPEDRYCLGRAIYHLAQRRGYKSNRISGEEKDGAVNAEISKLDVARGSKTLGQYFYEECLGKEPVRGSQHYTSRAQYEQEFTIICTKQALPADLTETLRYNLFMQRPLRSQKGTVGKCLFEPTKARAADSHPLTERFRQLQIVNNIRVACPGETEMRALKRAERENALAWLQKQSATVNFDKLARVLTPRKVSLIFGSNEKCAEIDLGAWRFNYRGDSGLPGSPFTARMIKLFGEEWRFELHRRYLKTGSKTEAQVVDDIWHAIFSFDDEQKLKAFGVEQLGLVEEQAALFAKRLAGGYGRLSLAAMRRIIPFLEKGAIYSHAVFMAKLPDILKRKGIDWKQIEGDVEQAIRSVLDSHEQSAWSERAANSLIKTYRENHEDPAHLMITEATKLRFMDEIEAAARLEAGAARWGDLAADLRKGIIEKTAADVLHWASRREGFVAVKRLDERVKDMLIERFDLQPKDIEGLYHPSEVESYKAAEKDHDGVLQLGSPRIDSIRNPVFMRAMFQLRKLVNTMLREGIIDSDTRVRIEMARELNTANMRAAIERDQRERQRERDRIRSEIASLPCAPAMVTDRDILKYMLWEEQDRRCLYTGATIEVSAFLGDNPAYDIEHTMPRSRRLDNSRANLTLCDRDFNRKVKRNRLPAELPQAEEIQQRVGLLWDDKIEALQKSIERRRSSSRSAQDKETKDRVRRSLHYEQIQLSYLKTKRRLFFLNDVPEGFTNSQIVDTRVICKYAMEFLKTAFPKVYSVKAGAVHAVKEIWGLDEKFRGDHVHHAIDAIVTACLSPSWYAELAAYYHEYERYLYSEAKRPEVPQPWPGFDRDLNEQISRELLVVHYTRDNLLKQTKKVVRRRGKIVRENGKPRYAMGDSARGSLHQDTIYAKIKDPSEQKNGESGSLKAVVRRTLDKNFKEKDLRNIVDKQIQAKVMAQKEKLKKGETIWFDESNRIPIRKVRCYASNKANSLIELNAHRDQSAHEHKQRRYAANDGNYITALYRGMIKGKLKPDWKVANNFDAIQARKTGDWETILPEIDENGLTRRHILKKNTLVIFKRTEDEDLTSLSQMELSRRLYRVTVLERERIKAIHHRCGQPDKEIEDTSSKIDFEGSAPSNLVRLSVNTIHIAVAGADFTLDPMGHIHWQKVEEDA

SEQ ID NO: 7853 - protein, 1462 aa, unidentified
  REGION 1..1462: note = Description of Unknown: Cas Enzyme sequence
MAKILGLDLGTNSIGWTVVEKTGNSFKFAEVSGKPTKGVIIFPEGVKIEKGNEKSRAAERTAYRSARRLKYRRKSRKYKTLFVLSENNMCPIPILDLQSWKSSGFKEYPSNENFLNWLRTDHDKNKNPYFYRDKFSRKKYNWESNQTLAFELGRAFYHMAQRRGFKSNRLEQSDENIIANIKEQVQDTLQHCKDDTQLSEELKNTFIEYDFENRKSDELDATEKKIRIIWKHIDNVLKNKIKRKNLTNLVDKKNEIGKFINRKENLGAVKGGIKELSKEIEEAGCETLGQYFWMLYQKDRNNQENKIRCNYTAREEHYEKEFEIICDKQQISEEIKNKLYKAIFFQRPLKSQKGLVGKCTFEKNKPRCPVSYPDFEEFRMWAFINTIKIKTHDDDKLRPLTGDEKARIVPKFYRVKPRFKIKDLTKAIEPQRKFVYYKDRERSNSDYLINYSLNTTISGCPVSANLKNIMGDDWKNKTFSYSTLDANGKQVNRKVNYLDLWHILFTFEDKDKLFEYASEKLKLDTKLARSFSKIGIQQGYANLSLKAIRKITPWLKKGLIYSHAVFMANMDKVVKSEIWSNENNRKIIENAIGEIIDSHTDEVRTANAINSLVREYRGNGHVHFEDNDQIKNELTEKLKIIYGAKKWAERDDKDVIVDETFAILQKQLRRIKSKDAFLRVKRIDERIVEYLRENKFLAESKRNNSLYHPSDIEPFKPNPAMDSQGNPVVINGEQIKILPNPRTDAIKNPVVMRVMHQLRKLINELLIEGIIDNKTRINLELARELNDANKRIAWKQWQDTLRDKRENAINEIKKLYKEETGKDIEPTNDDITRYILWEEQDKREIYEDECRNISISDIIGSNPKYDIEHTIPRSVSWDNSMMNKTLCSKKFNREVKRNHIPYELDNHKDILQRIDGWKKRFLELDNEIKRINTSNVTDKETKDRLIQKRHRLIFQRDYWKGKNERFTMDEVPEGFKISQIGDTGIITRYARTYLSCLFKTPIGNSNVFVVNGQTVSEFRKAWGLQKEYERKSRENHVHHCMDAATIACMTKEKYDSFVEEWRKAEEQKEKYDVKEKYEIKKPWQTFTEDVKNLENEVLVVNRHRDNVPKQTKKKLRERGKIQYKDEDKSQPIYLQGDTARGSLHKETYYGAIKRNDEMMYVVRKKIDEFKENEINNIVDDKVRDIVSNAKKEEKQLKKEIEKLKKNQMKVPEEQIDELESQIKEIRHRIENELYVIPPKPGKDTYTPIKSVRIKAHVSEPLQDFKKQKDIKKNKEGSDKFPYKQWYYVQNDENYCLALYESDDRRKRSSEIVRLIDAAYYFKLSNMAYRIENPIVEPEKKGMKLKGLLKPGTMVIFYKDKPEEIWTLNEHELRNRLYFVKKTSKNGQVTFQFHQESRNDEQLKNDYKKQHGVDAPKSLTNGESKVDYSRLPIPKLLLSPKNMNILIEGIDFEIMTIGKIVKK

SEQ ID NO: 7854 - protein, 1206 aa, unidentified
  REGION 1..1206: note = Description of Unknown: Cas Enzyme sequence
MAKILGLDLGTNSIGWAVVEKYKENSGKIVDMGVRIFPEGVENLGMGEEREISRNASRREARQIRRQYFRRKIRKQLLLEVLSKQNMCPVSIEEVRYWKTTGNFPDTPALRNWFKLNPYLLRNNAVKSKVSLYELGRILYHFSQRRGFLSNSRSSAKSENESVKLENGDPSERKSGIKETKNEMEGKTLGQYLYSIYPKDGNTYIDGLPRIRNRYTTREMYLEEFDKIWEVQRQYHDLNRDITINSIKVIGNPETKENKDKLQKLKKRNIKFSIEKDKNDITRTKLIINKSISLKDFLKGEKEGIIYFQRPLRSQKYLVGKCTFETSKPRCPISHPDFELFRAYQFVNSIECNGERLSEKDRNIAFNILLSVEKPKFKRIRKKLNKEDHGYNFNYQDDDNCPGCYTISKLSSNKYFGKKWFDLSEKEKDDIWHVLFFFDDKEKLRKYAINNWGFDEKTAKELSKIDLKQGYASLSRKAIRNTLPFLKMGYQYDVAVSIGGIKNAFGDKWDNLSEKNKNFIFQETENIVRSGKRGGYIEDLREMLQQEFGFNQREFKKLYHHSVNIHATETTPKLPVGKEADREIVSIRNPIVIQSLFEIRKLVNSLIDMHGPMDEIKLEIARDLKVNKRKRFEIRREQKRLEAVNDYVISRLREYSQNISRENILKYKLWEECEHRCPYTNREISITQLFTGEVQIEHIFPWDRSLDDSYLNKTLCFADENIKKGNRTPYEYFTQDFGDEKWEEVKSRLIQTFKDHRYFDVNNPISYFPNRYKKFKRFISEKFDDDFISRQLNDTRYISRESKSYLSKICNKVTVASGGVTANLRDKWGLNSLINDLNEKERTDHRHHAIDALVMACFNAGHLKEISKWNRYKRTYDLKDFPKPWEGFYEDAEKYINDILVSHKKTDRIITPRNVKIRKLGKSLTNKSRAARGQLHKESIYGKRTPPDNMTSYHIRKNLEELTTKKQVAKIVDPVIREIIEKRIESMGGYDGNKIPKGTFFSINESGKKMPFIRIPNKNGDYVPVYKVRIRENIGNAKRLYENNNKYVNPRKNHHVIVYKDHNNVMRELVVSFWEVVQRKLKKEPVFQLPSDGKKLVEVLQENDMFILGLTNEEFEKNKDNTKYLSDHLYRIQKITSGDYYFRHHLAATLKFDEERIYIKNFGNGKTGWKKHNPIKVYITNTGRLVPSENKNEVVSYRVEIDNKQH

SEQ ID NO: 7855 - protein, 1004 aa, unidentified
  REGION 1..1004: note = Description of Unknown: Cas Enzyme sequence
LKVLAFDIGSSAIGYTYINIDTGEIYHLGVRRFNRPYKKFNTSKEKSLTSIRSTYRSSRKTNKRKIKRQKNVLRILQKYKFLEGFEKNTSKSYTRDHIIKKIDKILKNKYIKNNPNISKETEHNLESSLLYNLRAKALDEKIELYEFARIIYHLMQRRGFKSNRKDFSKIDYEDAVGVVKKGISYLEKKMNNTNSRTIGEYLSKINITEESIRNRYLSRDMIIYEFNMVWEKQSKFYPNIFTKKLYKKLYNEIFYQNPIKSPEPGECEFEKNIKRSSKSTLIFQEFRIVQQIYNLKLEEYNNTRNLNYEEKKLLKNRLYNEGDLAFEEIKELLKISHESKFNYEYEGNEKLLGNRIYKKLKDIFGDDFNSFSKEYIDSIVEDINSFEKIEPLYKKAINIWELSEEKANKICKIIFENGYSNLSKKAMKKLLKEMEVNDITYSEAVKNVYPRHDKIKKMEFLPNIESVPFEIYNPLVKKALAEMGKITNELIKKYGKPDKIVIELARDLKKNNKQRKEISIKNKKNEKRRKDAKDYLEKNGIYNPSNKDITKYLLWVECDKVCPYTGKNIGFNLLFNEYPQFDIEHIIPQSKTLIDGEINKTLCYHEENRSVKGNKTPYETYGGTDKWDVIKNRVRKCFSKEKYNLFVKKDLDNIDEYLTRSLNDTKYASKMAVKYLSLLYGGVCDENNKQKVFTTNGMITSKLRNSWKLNTILNNENKKSRDDHRHHAIDAIIIAYTLKIKNLNMNNYRKFNIPYDNFYSYIETKINNIKTSHEVDKRIGKKLHEDNFYSYSEESNKVYLRKSIDNLSSTMIKNNAIVDGYINNKIKKIVENKDPNDKLETVFKKDPPINKNGNNIKKVNTHIGGGVFPIGKGCRKKYVKTNTTHHLEIRECVEKGKKKWKGKLIDQFEATRRKNLKEKIINDTDNDDGKFIMSLTRNEVVSFTVDDIIKYYIISSLEENNIEFKEINDARDKLPRKGRTCSLNKLKNYCFKKHKTNILGEIVY

SEQ ID NO: 7856 - protein, 947 aa, unidentified
  REGION 1..947: note = Description of Unknown: Cas Enzyme sequence
VGKMRYRLGLDLGSTSIGWAMLRLDADNNPCAVIKAGVRIFSDGRNPKDGSSLAVTRRLARAMRRRRDRLLKRKQRMLGLLIKHGFFPADESERKALELLDPYELRARGLDRALEPGEFARAVFHINQRRGFKSNRKTDKKDNDAGALKSAISSVREALDSAGCRTVGEWLHKRKINGQSVRARYRAYDVISDSGKKKQEFKYDLYIDREMVKQELALIWEKQASLNPALFTEVARRDIEDCLLFQRPLKPVKPGRCTLLPSEERAPLALPSQQRFRILQEVNNLRWIGDDLTEQSLTKTQRDKVVEALEKNGRRTFNQLRKLLGIDAEFNLEDAKRSDLKGNATAAILSKDDHFGSVWHVLSLSQQDRIVTQLLTEENTGTLVAWLIENTEIEEATAQRIAETRLPEGYGNLSEKALSKILPQLYSEVVSYADAVIKAGFEHHSNISHASTGEILESLPYYGEYLQRHVGFGSGNLEDTPEKRFGKLANPTVHIGLNQLRVVVNELIRRYGHPSEVIVEVARDLKQSQEQRREEQRRQAENQKRNERLRSQAAELLGITPDRVKIDDLHKLILWEELNLGNAADRRCPYSGLQISAEMLLGPEVEIEHILPFSRTLDDSLSNKTVSLRQANRIKGNRSPWESKEDFERMGWSAEAMIERAKKMPKNKRYRFGETAWTEWDKEGQGFLARALNDTRYLSRIAREYLSLICPQQTRVIPGQMTALLRRKFGLNNVLSHDGDKNRNDHRHHAVDACVVASTDQRLLQQFAKASANARSSQVGRLVDDMPLPWPSFREHVQRAVNQIWVSHKPDHGFEGAMHNDTAYGLLEDGMVKVRKNVDGVRVTEITKLNVIPISDQRKIDRHGQLPDGSPKPYKGYKGDSNFCIEIVSDEEGRWLGEVITTYQAYQVMRTHGSVRLKDKTLSLSGKTLVMRLMINDTVVMQVEGKT

SEQ ID NO: 7857 - protein, 1021 aa, unidentified
  REGION 1..1021: note = Description of Unknown: Cas Enzyme sequence
MLPKMRYRLGLDLGSTSIGWCMVRLNSQNEPVAVIRMGTRIFSDGRNPKDGTSLAVTRRLARQMRRRRDRLLKRKERMLNALIKHGFFPEKKEQRKKLAVLDPYVLRKKGVREALTGPEFARALFHINQRRGFLSNRKTDRNDSESGLLKKAIRDLREKLEQEKCETLGEWLANRHELGLSVRARLRGKTQKDKQYDFYADRAMIEHEFDTLWEKQNSLNPELYHDAARDELKDILLHQRPLRPVKPGRCTLLPDEERAPLALPSMQRFRIYQELNNLRLLTPDLQEHPLTLEQRDELASLLEAGDATFTKIRKKLGVSGSTRFNLEDIKREKLIGNKTTASLSKDQHFGAAWHDFDSRTQDTIVEHLLNEASESVLASWLQETTNVDEATAERIANARLPEGYGGISRKAVDLVLPELVRDVVVYSTAVERAGLGSHSALSHAQRTGEIMDELPYYGEPLQRHVAFGSGDPNDPPEKHYGKIANPTVHIGLNQLRRVVNGIIRRYGHPSEVIVEVARELKFGREKKLEIQKEQKARQDRNAKYMDDACKALGLSAANLDKAKRREISQKMQLWYELNPKDVSNRQCPYTGEQISIQRLLSNEVEIEHILPYSRTLDDSLNNKTVALRSANRDKGNRTPYEAFGQDRLPSYDYEAILERAALMPKNKAKRFAQDGYERWLKDDKDFLARALNDTAYLSRISKEYLSLICPPNKVRAIPGRMTALLRAKFGLNELISGSPTKNRNDHRHHAVDAAVIAVTDQGLLKRFSDASARAREKDLDKLVDEMPYPWPTYREHVYRALHHIIVSHKPDHGYQGAMHEETAWGFTEDGQAIRRVRPEDGGPRERETKNRTLIPINSTRDIERHGTDPDGHPKPYKGYVGGGNYCIEISANENGKWEGEVISRFQAYQIIREHGENAGQALLRDPCLTQSGKPLAMRLMINDLLRLKVDGGYRIMRIATVKGRGEILMCEHNEANADSRNRDKTDAFKYVSKLPGSLQKTNAHPLIVSEIGDVRLKPLRN

SEQ ID NO: 7858 - protein, 1374 aa, unidentified
  REGION 1..1374: note = Description of Unknown: Cas Enzyme sequence
MKKILGLDLGVASIGWALVSEAEKENEVSSIIKLGVRVNPLTVDESSNFEKGKSITTNADRTLKRSMRRNLQRYKLRRENLIEILKQHGFISDDSILSEHGNNTTFQTYHFRAKAATEQVTLQQFAKILLMINKKRGYKSSRKAKSQDEGQLIDGMEVARRLYEENLTPGQLTYRLLTNGKKFIPDFYRSDLQTELDRIWDFQKQFYPDMLTDDFKKKIEGQGKENISKYFLAIHGVYTADNKDKDKRLQASKWRVDGLMKQLTAEEVAFVVRQLSGEIKESSGYLGAISDRSKELIFNKQTVGQSLMEQLVKNPHTRLKNQVFYRQDYLNEFETIWETQAKFYPILTPELKSEIRDVIIFYQRKLKSQKGLISFCEFESKQIEIIEDGKKKIKINGMRVCPKSSPIFQEFKIWQVLNNIEITDKDNILAKRFLNQEEKETLFDELSLKKELKGTDALKLLYKNHKELELNIETIEGNRTQAALFEAYQRIIELSGHGKYDFQKMRSKDVLDIVKSVFEVLSYNTAILKFDSALEKNAFEKQAFYQLWHLLYSFEGDQSNTGNEKLIQKLSDLYGFEKEYAHVLACVSFQDDYGSLSTKAIRKILPFMKEGNEYSVACGYAGYRHSKNSLTNEEKENKAYRDRLEILPKNSLRNPVVEKILNQMVNVINSIIDTYGKPDEIRIELARELKKNAKQREKMTRDINQAAANHEEYRKILKAQFGLSRVSRNDIIRYRLYDELKNNGYHTLYSNTYISPDKLFSKEFDIEHIIPQSRLFDDSFSNKTLELSSINRDKGNDPAYDYVSRKYGTEGLDEYKKRIDILYQQGIIKKAKYTKLMMPFSEIPEDFINRDLNDTQYIAKKAKEMLEELVKDVVSTTGSITDRLREDWQLVDVMQELNWDKYDKLGLTEIIENREGHKIKRITDWTKRNDHRHHAMDALTVAFTKRSLIQYLNTLNARSDKNSEIYEIETKYLKRDTKGKLRFIPPMPLSIFRAEAKKQLENILISIKAKNKVVTVNVNKTKKSGGVNKKKQLTPRGQLHNETIYGSIQCPNVREEKVGGGFDEAQIAKVASKRYREALLARLAAFGNDTKKAFTGKNALTKNPIYLGERQMECVPEKVKIVDVETIYTIRKEISPDLKLDKVIDSGIQAILKVRLDEYGGDAKRAFSNLDENPIWLNKDKGISIKRVTIRGINNANSLHDKKDKDGNLILGKNGKKQPVDFINTGNNHHVAIYKDNEGNLQEVVVSFYEATMRANQKLPIVDKTYKQSEGWCFLFTMKQNEYFVFPNPNTGFDPHGIDLKDPDKYAEISPNLFRVQKIATKNYFFRHHLETSVEEKRELKGITYKPQLGLAAVNNMVKVRINHVGQIVDVGEY

SEQ ID NO: 7859 - protein, 962 aa, unidentified
  REGION 1..962: note = Description of Unknown: Cas Enzyme sequence
MVDGGGASFPSGARPGKPWQLGLDMGTDSIGWATFDCAAAPERPKATRFRHGGVRLFHSGRDEKEHTSKQKDRGLKRRARRQPRARHWRKAQLIMFLSNAGLPEDTCAENPYALRRAALDRPLTGAELRRVLLHLLQHRGFRSNRLAAQAPDTPAREDKSTGKRTKAAKPKTDDDAGFWRGAEQALRQRLRAEGKRTVGDLLASDLDRGRPVRMRDNRHDTDGVYAPTRALIAEELAAIRAHQEPAFPDLDWEEITALVLEQRPLRFKDEGPCEFLAGETRCLRALPSAQRFIVLQTLANLRVPQGPVDPARPLTPEEHAQAVALLDTCRSMTWPEFRKVIGVGRTKFTIETEAGGGKAASRMIQGNQTNAGLGGLVPGWSDLSLEDRDAIFLALWDQRQNRRGLRALCLDPTGPLRLTDPDAAEAVADAIQFDLPTGRLSVSARAARMISSQLGPGVPWHEAVRAATGRDHSDRRPTLRLARLPYYAEIMPEVGMDGTHDPKHHNQPELFYGRIGNISVHIALNEVRKVVNALIDRYGEPPRLIVVETTRELKAGAEERKRRLRQQADREKENAAIDAEIRAQGGWMRNARERRRRWRLWKRQKELCPYTGDRISGADLFSERYEIDHVIPLSRGGRDGDGNMVLCVGEANRTKGDRTPWEAFGSLPGWSDRRDHFLAGLDGDTRALLEWRLGDKAGARAAKYVVDDDGEGFLPRQLTDAGYIARVALRYLAHVVPDAPFNGVVATQGRLTAWLRAAWELMPDVRPQHLFPIPKEALDNDDTARAAVNALTPDHLRKALDRLMDKARAAAPPDATEATVLDIALRGAPALKNRADHRHHFVDAAVIAVTDRALVHAVNTLHGRKGSDALPAPQDLPQPLPEPYEGFRAEIVRAYPHIWPSLRPSHEAGGELHKETIYGVRPEVTRDGEPALRLQVRKSAAALFQGDTGKPLPDTKAREVLD

SEQ ID NO: 7860 - protein, 1107 aa, unidentified
  REGION 1..1107: note = Description of Unknown: Cas Enzyme sequence
MKTSSTTPEVSFSFDIGHASIGWAAFRCAQNSVYPEILGTGVMLFPKEDCQNHLRAGFRRQRRHIAATRNRISRIRSLLVSMGVLTEEEASAQAAVSSGVMMPWLYAARALSGTDNGKLNWMELWQVLRWYAHNRGYDGNARWAHEEDSKDDTDKVKKANALMEQFSTKTMAETVCAFIGVNVNDAIPCIPENAPYFKGQSVAFDRKIVRDEVERVVRAQFGHLQGCDEAFLSLLMGRDLTREEKRRFKLPERYAGGLLFGQMIPRFDNRIIPNCRISGEKTPSKHCADYYRFRWAMLVANIFVDDSVCGRRPLSPSERMELTRRMEMVGGMTAKALRDTVEDVTGASAKTLDDQFFSPETEKALVLDPVRDRLRSAVFASVWPLVPEPLQRRLAGVFFKRKSLSLAEILAAMADAGMDTAEMENTIRLDYAKAAKRKRTEPLTYETYLRDRVGLAAASGRAPYSRVLMRKAYEESMAGMHPTSIADSQPQTALERRNGCIAITEGVTERAVQDDLDEHTNNHLVRQRIRMFQRLFKDMYALYAGGDVRRVGDVTVEVARDMQEYAGKNSKEKAAVFSEKAKPFQRAEAKLRKDFEEAGIQMRISYRMIRKARIAMAQNWTCPYTGRRFSAAHIAYDKVDFEHIIPHAQRKSDALEGLAITFREVNAMKGKRSAVDFIRECQGQSISITGENNSEIWTESHFRNFVSDLYPKMRPSRSASDEDKINWRRKVWLLKEDYDERDADFTKGALTITSHLNKLAALEARKFLREEAKAAAGDDGLEVDVLPEHRVGHMQGSITSEFRKGWHLLGCLAPVCPEVIDQADPEKRILPKGEIRNITHLHHALDAISIGLARNIFRNNVVSREVCEAILSRNPNPKQRQILESLGVFGFDSGGRPHLYDLPDDVLDNIESRLGEYRVVQHVPKSMHGLRAEQTQWRVVRTDGDTGRVHLSQYGPRDPKNGNVRHKKEAAENPNRLLGYNPSGDSKLKSRQAVVVISDNFGIALVKEPVVIPFHNVWQRLGDLAALNDGKIPQVLRIGNVIEIPSGRYKGRWKIHSTKANAKGVSVDMAWPHLVKAENKKAGSKINVLLKTIITDGMTILHPSLVG

SEQ ID NO: 7861 - protein, 1084 aa, unidentified
  REGION 1..1084: note = Description of Unknown: Cas Enzyme sequence
MVRQYRSSHSKTKGGYHMQNNYILGLDIGVTSVGWGIIDKQDNVIGKGVRLFEEADASNNEKRREKRGARRVKRRRQQRITEMRRLLVKEGLIDSTDFRPLDKPYEIRVKGLDHELSDKELATALLHIVKRRGSTLDIADFDEDDKEDMKAKANLAANTRELKENKKYICEIQLDRLRKDRSLRGHANIFKTEDYAAEAKAILKAQDKSSAFIEKAIELITRKRHYSDGPGSATSPTPYGRYRIDEKTGEIIKVNLIEEMRGRCSVYPEELRAPLMAFSAELFNFLNDLNNLKIAGEQPKLTTEQKKKTIDTILDKGYLKPKNDQPNGLATLLGLLPETISGFRVDSKGKPIMTEFKGYQKFLKAFKDAEENISTHLDKLDRIAEILSSHKLYDERYEAFNEMELSDKLKESLAKLSGFEKYHSFSLKAIREINEEMKVTDKNQMQIITDNALTHLEKPRRLKIDDAAILSPVAKRAHKEALGIVEALQKKYGYFDKIVIETTRAKNNKEERDNIRKAQDKNRMRKQDAAKLVVDKFGESQAESLSGTQLLKLRLYKEQNGKCAYTYNPLDIRPIVERTDAYEIDHIIPYSISLDNSYNNKVLVENSANQKKGNRTPFAYFKSGKAYGVITDYESFKKEVLSNKNYSRHKKTNLLNEEDITKFDALEEFTARNLVDTSYAVRSLMGSMKQYYKAHELPTKIFTVRGKVTNLFRGLGIRELYKDNPGLDENPLEKNRDQYHHHAIDALIAARLSEQKLIRNLLWMDRTKEIDEETGEVIFNNSPIEDGRLIRFVKSLAEFGPEDFRYSWKVDKKPNRSFSDETIYSTRTINDEEMVIKKEKDIYSLTSDNIARFFTEGKKRRELLAYHHDRETYDRLKAIYEQYNHEKYPYAAYKEEHGDIRKYAKKDNGPAIKQLKYIDSRLGSHLDISHNYNPNDKKIVLQQISPYRTDFYQNPDGAIKFVTIKYADMKKEGDEFLIDSDLYQKKLKDKKIMPEARFIGSFNRNEIIRITNKEKDGLRSESWRFIATNSDKQNKVEVKSIAEKDQKIQIMKTIGKKTVLVEKFSASPLGEISKVENNVLKLRV

SEQ ID NO: 7862 - protein, 1427 aa, unidentified
  REGION 1..1427: note = Description of Unknown: Cas Enzyme sequence
MKKVLGLDIGTNSIGWALVNLDFDNAEGEIINIGSRIVPMDADLIKDFEAGNSISKTRARTMTRGARRLKQRYKLRRERLIKTMKILGWLSDEFPENFDGLIKHNINDYLPFSKTAIEECAQYLNIDKTNLPNDWVIYYLRKKALKENIEIKELARILYHFNQRRGFKSNRKANDEITLDIEDLQSEKEKPKSEKRIEILNISSVIDTGEIVKGKKVYKLITNKEITDGLFEGYIQRHSYPDWQGKEQELEVRIKRNKEGTKIEFALPDKSQWKEAKEALESDIKNSGLHPGEYFIEQLKNNPNYRIRQRVVDRNFYKNELTDIWKAQTKFHNELKNTKHLDKIAHALYQNNKEKQKELKANDLLHVFLNDIIYYQRDLKSQRSSVGECRFEKKNVTLKDNKGIEYQPALKAAPVSCPLFQKFRIWKTIHNIRIIALQKNVNNKVLTDVDETNKFLNFEKKAELFDEFDSKEQIKPSAILKFLNLSPSQYKLNYPNETELPGNETKHFFRKAFKKLDYDDGLELLNDDNTFNELWHLYYSVENFDAIANSLIKRFSVPEKIAKQLSKLPPFTSRYTVYSQKALSKLIEVMRCGKYWSYDNISKETKNRIEKLITAEDDPEVNIQTREKLKELNNEEQFQGLPEWMATYVVYGTHSEKGVKQVDHPEQIQSPVQNTLRNPIVEQIVNETMQLTKDIWKKHGKPDEIRVEMARDMKRTAKERDNISKIRDKNRVDKLRIKAILQELNIGNPNSPGDIEKLRLLEENGNFAWKNSKEKFFSKQTEPTKTEIEKYRLWVEQNCVSPYTGKPIMLSKLFTREYEVEHIMPRSRFFDDSFGNKVIVETWANEEKGNLTAMQYIRRGSSKGRLLSVEDYVSHVNKVFFKKKRKHLLSDKIPEDSFIQRQLNDTRYITKQVNKYLAQIVRDDKVNITIGEITNELKVKWGLNELMKKILIPRFERLEQITGEKFITYETNEQGQRKIHLEGNDKRIDHRHHALDALITACTTQSHVQYLNNLNAQTDDSTRFKFGKILNSSKVRDFRLPWKTFIPDAHKALESIIVSHKNRNRILNKSVNRYYKFVNLNGKWVKRLITQNNENLYAIRQQLHKDTFAGKIRLREYKNVNIKEAIQNIDYVADKRVKNSLKQLIKETGDDLKKIKKEIKENPLIDKKNNKVEGKITIWYFKEYAVNRVELDESFTEKKIKEKIAEYDTNKEKGLKNLLLKHLEEHNNKPKEAFTGEGLEALWKKTKRPVTTVSIYEPIGKKFQIRPDKTPNQYVEAAKGTNLFFVIYENIHTGERDFETLNFLEVVTAKMEKLPVVKPREGYNHFTLSPNDLVYVPDQDENIDLIDWDKDKERISKRIYKMVKSPTDNQCYFIPHNIANLVIPYDSKTKIGEFGSQNCSEKSLDDLIIKRHCVKLKHDRMGNVKPA

SEQ ID NO: 7863 - protein, 1068 aa, unidentified
  REGION 1..1068: note = Description of Unknown: Cas Enzyme sequence
LGLDIGVTSVGWGLIDREGNIIDKGVRLFEEATADNNEKRREKRGWRRVKRRRQQRVLEMRRLLAAEGLVGKDFTPSENPYEIRVKGLHEELTNQELATALLHIVKRRGSTLDIEDVALDATGDKDAQQAKETLASNTRELENEGRHVAEIQLERLRERGYVRGEDNIFKTEDYLAEFDTIMQNQNVSEELIKKARELISRKRHYSEGPGSEHSRTPYGRYRYDDEGNPIKVDLIEEMRGNCSVYPEEKRAPLRSFTAELFNFLNDLNNLKIPGEQERLTEEQKHSIIEVIRKQGYLKPKTNQPKGLAEFLKVKLDTIAGFRINEKDKPLLTEFKGYQKLLEVFEKHDGIENIPDAYLDWISEVLTSKKLPSERKQAFLEDGMQESLAADLSQLDGFNDYHSLSLKAMREIIEEMLQTSKNQMEIITENNLRQKEIPQQLTLDENAILSPVAKRAHREALRVVESIMKRYGYPDRIVIETTRAKNSKEERDQIKRIQRLNKERKDEARTLVEGHYGESFAERLSGTKLLKIRLYKEQDGKCAYTNHALDLQSIVEGRDDYEIDHIIPFSVSLDDSYNNKVLCEYRANQLKGNRSPYAYFKTGSAYGAIQDFESFKELVQANRNLHPKKKELLLREDDITKYETLQEFTRRNLVDTSYAVRTLMGTLKDYFKHHEIPTTVVPMRGKLTNLFRNIGAMHYLKERPHLTENPLEKNRNVYKHHAIDALIAARLSEQSLVRELLRIDRSTAVDETTGEIFHKATPKEDGELIKFVKRLADLDAQDFKYSWKVDRKPNRAFSDETIYSTRTVSGQERVVKKHKDIYNLESGKLEKILGKDKEKLLVYQNDYKTFEKLQSIYEQYAHERYPFAAYRNEHGPIRKYARKGDGPVIRKLKYIEDRLGNHVDISHKYDTKDKRVVLLQISPYRTDFYRNPDGTIKFVTIRYADLQPIEMTVYHPEEQRFHIDKDLYEEKKRDKKVHPEASFLFSMHRNEILDIVKKEKGAEVKERYRFIVTNNDKTNSIEVKPIEAISEKPQIMKTIGRKILDVKKYAVSPLGEMQEIKKESLKLRL

SEQ ID NO: 7864 - protein, 1416 aa, unidentified
  REGION 1..1416: note = Description of Unknown: Cas Enzyme sequence
MKKILGLDLGTNSIGWALINLDFDNEKGNIIDMGSRIVPMDSDLIKNFEQGNSISRTANRRNSRGARRLKQRYKLRRERLIMTLKILGWIPNDFPEKFEGINNHNINDFLPFSLKLKQECSEFLKIEPDSLPTDWIIYYLRKKALTEKIELAELARVFYHFNQRRGFKSNRKGVDAITLDIDELESENKKPDSENKIEILKIINAIDTGELSRGKKVFQITTEKEIADGINTATIIRENMPEWENTEQELEVRIKRSKSGTRIELAVPNKTEWKKEKEAIEKSIEESDMHPGTYFLNQIKKNPNYRIKQRVIDRSYFQKELEAIWVNQKKHHPELSEKSKLPEIAKSLYKHNKQKQREIINNEIYHTLINDIIYYQRPLKSQKSSIGNCKFETKNIELKNKKGEPYKPFLKAAPVSCPLFQTFRIWKTIHTLKVFALQKEVDGQVFTDFDETAIQLNFDKKVELFKKIDSKEKITAAEIIKSVLGLSTSEYKLNFDEDTVFPGNETKHFFRKAFNRLGFEAGTELLENENKFNQLWHLFYSVEESESISKALIKHFGFPDDIAQKLALLPPFNPRYSAYSQKALRKLTALMKCGDLWNYNDIDAGTYERIQKIMDGEDDDKISLQTRELLLNKTEREHFQGLPEHLATYLVYGRHSERDGEPVENPDQIKVPEQNSLRNPIVEQVINETMQLTKAVWRKYGRPDEIRVEMARDMNRTAKEREKLSKIRDKNRDDKLRIKAILRELRLGNPDSASDIEKLRLLEENGNYDRHNYSEKFFKKITEPTSAEIDKYRLWIEQNCVSPYTGKPIMLSKLFTREYEVEHIIPRSRFFDDSLGNKVIVEAWANDEKGNQTAMQYIRRGSSVGTLMTVDDYIAHINKTFTRKKRDFLLRDSIPESFIERQKNDTRYIGKQVTFYLSQIVPQNKVRISSGIITNELKQKWGMNEMMKKLLISRFERLEKITGEKLIHFETTEQGQRKIILDGYDKRIDHRHHALDALITACTTNSHVQYLSTLSGAADPTARFKFGKLLKSDKTRDFKLPWPNFIPDSFEAMQKIIVSHKNRNRILSKGFNKYFRYVYDDGIWVKKLINQNSQNLYSIRKALHKETIAGTIKLRRYKKVSLKEALENIDFVADKRVKRSLKQLVNETGGDLKKIKKEIAINPLVDKNNNQITDKIVIWYFERFAVSREKLDESFTEKKIQEKIAEYDNKKGKGLKNLLLKHLESYGNKPKEAFTGEGLEALWKKAGHPIIKVSTYEPIGKKFEVRPGQLVESAKGTNLFFVIYENLEAGEREFETLGFNEVVAAKINKLPIVKAREGYRHFTLSPNDLVYIPDPDENIKAIDWNDTKSISNRIYKMVNTSQDRVFFLPHNVSELIQEKKEFGAANKIELDQFGRNIKNILVKIIHDRLGNIKPLK

SEQ ID NO: 7865 - protein, 1122 aa, unidentified
  REGION 1..1122: note = Description of Unknown: Cas Enzyme sequence
MAKILGLDLGTNSIGWAVVEKNKDDFSLIDKGVRIFQEGVKIEKGIENSKAAERTSYRSARRLKYRRKLRKIKTLQALSKYGYCPPLSNEELDKWRFEKKYPQNTAFFNWWKTSDTDHKTPYHYRYLAASKQLDLSREKDRFVIGRAMYHLAQRRGFLSNRLEGTKESDGEVSKSIEAISEAKGDKTLGQYFYEKYLRSEKIRDQYTHREHHYLEEFNRICEVQGLDSKLSQKLYDAIFYQRPLKSQKGLIGRCVFEPKKQRCAVSHPLFEEYRMLCFVNNIKIKTPDDEKMRFLNTQERKKAIERFYLKRDYFPFEDIAKQLAPKNQYKYLKGNNINSEDYLFNYRMDTSVSGNPLSAKLKHLFGEDFLNLRIEYTRNKDGKISYLDVHDLWHVLATFKDEENIKYWAKEKLGLEDEKAVEFAKIRPKSDYASLSLNAIKKILPYLRNGMIYSHAVVLANMEGSVPKTIWNNPEKQAEIKKTVKDLINSQNEEMAITEVVNGLIKETRDNGECWSEEAISYYLRDLIHGFENYYGKKKYASLPEFERATLENDALQLFRKQMSKNLGRGEFLKVPTIDERVKDFLIKKYSLDKKSIGNIYHPSAIETYQQAKKSKDGNKYLGSPLISSVRNPMAMRALHQLRKMINELIRQEIIDENTRIHIEMSRGLLNANERKALQNWQRDRETQRKHFAEKIAEHYKAQGVAAEPNADDILKYQLWEEQQHKCVYTGDEIALNAFLGSDPVYDIEHTIPRSLSYDNSQENKTLCQNRFNRSVKRNKIPSDLSNHEEIISRVDTLWKDRIEELEKQIQGAIKQSIGALDKEKKDSAIQKRHRLMYEKRYWQGKYTRFFMKDIPQGFKNSQIVDTGIITKYARLYLKSLFGNVYTVKGNTVAEFRRSWGLQTTYEKKERINHVHHCMDAVVIACMTKDNYEKLANYYHNKEDSFLKGISIAHNVKKPWPSFTEDIKDLENQILVSHHTPDVLSKQTKKKLRKQGLVIKDKQGQPIYQQGDTARGSLHKETFYGAIERKVKNKKGGNEKQIKYVVRKPLDQLEDSNIKNIVDDRIREIVLEGREKEKELKREIENLKKKLSKAEEHEEAGIKHETSNLRQVISRLYALPTK

SEQ ID NO: 7866 - protein, 1377 aa, unidentified
  REGION 1..1377: note = Description of Unknown: Cas Enzyme sequence
MKRILGLDLGTTSIGWAYVNQAENENEESSIIKTGVRVVPLSTDEENDFKKGNSITINADRTLKRGARRNKFRYQLRRKALIDELKGIGFIDDKTKLTETGTNSTHELLNLRNKAVTDKIEKEEFARILLSINKKRGYKSSRKANNSEEGELIDSMGITKQLYENNWTPGEFSYQLLKDEKKTLPDYYRSDLESEFEKVWHKQKEFYPEILNEKLFTELAGKNKNQTWKICEKPFDIKGIKLEGDRNQKKLETFRLRKIALTEQVELEHLAIVFQEINNEINQSSGYLSEISDRSKELHFNDLTVGQYLYNQISKNPHSSLKNQVFYRQDYLNEFQSIWNKQAEFYPELTDDLKDKIQNEVIFYQRRLKSQKGLISYCEFESWEQDVTIDGEKKRKIVGHRVVPKSSPLFQEFKVWQNLNSIRITNMKTNEVYHIEEDSNTELFQKLNWTDKLSDKQVLKEFGLKPEEWKINFQKIEGNRTNHNLLEAYKEILKIEGYDNINFTNIGADELQKTLEQCFDEIGIDKQILDFNATLEGNEFSKQKSYELWHLLYSYEDDFSRTGTSSLEEKLKINFGFKDEHLPYLINIRFQDDYGNLSARAIRKLMPHLQDGKIYSDACELSGYNHSNSLTKKQNEERELKPKLEILKKNNLRNPVVEKILNQCINVVNAIIEDEKMGRPDEIRIELARELKNTKDQRSEMTKAIGRATREHEQYREEIKTKFGLPHVSRNDLIRYKLYKELESNGYRTLYTDEYIKPEDLFSKKYDIEHIIPKSRLFDDSFSNKTLETRESNLDKGDETALDFVERKYGKEGLDKYRNRVEELYKAGKIKGSKHRKLLMSLKDIPEDFLNRDLGNSAYIAKKAAEILLDVTKRVSLTSGTITSKLREDWGLIQVMQELNWDKYEKVGLTYYKENKEGKKLPRIKDWTKRNDHRHHAMDAITVAFTKPGMIQYLNNLNAKSNKEIYKLENAYTFKDERGKRKFKAPFSNIRKASKEHLSQILISHKTKNKVTTKNKNKINIKGKNTYKYQTVETPRGQLHKETVYGKSKYYETKLEKVGGKFDKDYINLVANQSYRNALLKRLEEFENNPKKAFTGKNSLTKNPVYLNGTQETVPEKVKLAWLEERFTIRKEVTPDLKIDKVVDEGIKQILHKRLKDFNNKPKEAFADLDKNPIWLNKEKGIKIKRVKINGVSNAEPLHHSKNHLGEVILDNKNNPIPNDYVSTGNNHHVAIYKDEKGNLQEEVVSFYEAVARKNAGLPIINKDHKKGWEFLFTMKQNEMFVFPNEEKGFNPTEIDLLNPENKALISENLFRVQKISTKNYMFCNHLHTLAITGDDLKNKKMLSTFIYHFIQTPEKLINIVKIRLNHLGDLVQVGEY

SEQ ID NO: 7867 - protein, 1403 aa, unidentified
  REGION 1..1403: note = Description of Unknown: Cas Enzyme sequence
MKKRLGLDIGTTSIGWALVLEAENSKEKSVIRKTGVRAIQYDSFHKVEKNGKVSESKSPKDDFIAGKGLSSCASRTQKRAARRNLQRYKLRRKKLIDVLIRNNIVTLQSPLTETGKGATHETLFLRAKAAKEKIQLEELARVLLSINKKRGYKSNRTIKNKEDGILIDGMTIAKELYDNNLTAGQYVWSLLREYKKIIPNFYRSDLQREFDLIWEFQKKFHTSVLDEKLYLELTGSPKKQTWAICDKKFHLKGLERTVKGFDLTRENYKWRAEGVYQKLDLEKLAIVFQEINNDLSKSSGYLGAIGDRSKELYFKNETVGENLYKQIVSNQHRSLKNQVFYRQDYIDEFERIWETQAKFHSELTSKLKVEIRDIVIFYQRKLKSQKHLIKHCRFEKNHKVIPIDSPLFQEFKTWSVLNNLQFFNKKTKAISTSSIELKKELFERLTIFGKLSEKEILKLMGRQPSEWKTNYPEGISGNSTHHKFLKIYRKIAEMEGYGLDWKCKTHQEIYSELQAVFSSIGVSPDLLAFDSSIPGNQFDKQKSYQLWHLLYAAQDGGKVSNNDKGVYGVSNVALKKKLHHKYGFNPSYADWVTRINFQRGYGNVSAKAIKKILPFLKEGHPFKEACQLAKYCHASDQALKQQKTTGLEDRLELLPKNSLQNPVVLKIINQLVNIISQIIEEYGKPDEVRIELESVLKKSAKERTKTYAHVQEATKAHQKIRKILETEFGLKRPTKNEVTRYKLYQELKFNGYKTLLTNKEIPKEKLFTKEIDIEHIIPKAKVFDDSFSNKTLAYRIVNIEKADSLAYDFVENNRQIDLRSYEDRVEKALKSKSISKGKHKKLLLSEIDLRKNLIQKNQSNNEYITKKITQILEKVFRKVTITSEKITEKLRSDWDLTQVLKELNLPKYRAIGLTEFQEGKAGNMIEIIPNWTKINDYRHRALDALIVAFTSENHILYLNNLNASRSERSSKSYAQKNNTAINLYAIRKKITKNYDQKNGHKKRKFTPPTATFKFDAFTHLAGVFVSFKAKNKLVTKNKNFIKVKGDYIEKNQWTVRGQLHKETVYGKRKGEIIQLEKVNSKFGLHKIHQVTKPTHRSALLKRLAQFDGNPKKAFGGAFAIAKKPIYNANNQLVPELIKTKEIVDTYTIRKKINAENFKDLKSIQKIIDVGVRRIVEQRFTNAHYNAKEAFSNLEKNPLWLHKEKGICIKKVRIRGIKNAKNLHLKKDHFGNEILDKHANKIAVDFVSTGNNHHIAIYKDEEGVLKDVAVSFFEAINRVNKGVPVIDKEWNKKLGWTFLFTIKQNEMFVFPSKRFNPLTIDFNEESNQNQISDHLYRVQKISKVQYGTSIVRDYVFRHHLETQIMDKKELKGTSFRACKSLKLLDKVVKVRINHIGKIVQIGEY

SEQ ID NO: 7868 - protein, 1067 aa, unidentified
  REGION 1..1067: note = Description of Unknown: Cas Enzyme sequence
MKRILGLDLGTTSIGWALVEESENKAESKIIKLGVRVNPLTVDERINFEGGKPITTNAQRTLKRGARRNLDRYQLRRDYLIRELIKEGFITDETPLTEVGKDTTYETLSLRAIAARNKVSLEDLSKILLAINKKRGYKSSRKSKDENNGVAIEGMAVAKILYNQKLTPGQYAYRLLNQHKKYIPDFYPSDLKAEFDTVWKKQQEYYAKSLTDKLYQELQGKNKGQTWTICSKPFQIEGIKLEGNRAEQKLKRYALRVEALSNKLNLEHLAIVLQEINNDINGTSGYLGKISDRSKVLYIDKVTVGEYLYDQIKKNPHTPLKNKVFYRQDYLDEFEQVWETQAKFHSELTQKLKAKIRDVIIFYQRPLKSQKRLLSFCLFESWEQEYFDEVKQKKRKRTIGQRVIPKSSPLFQEFKVWQNINDLEFKYVGKLQDIAEKEVLKLDERDRMLLFAEANLRGDLKTVAVLKLLGLSPKEWRINFKEGMRGNTTNEKLFNVYQEIAAREGYGIDWKKNSAPEILEELKSIFPAIGIDASILEFDGNIKGNAHSKQTSYELWHLLYSSGDDSIISEEDKLVYGNSDVNLKKKLHLKYGFKPEYATMLANVAFPKDYGSLSARAIKKILPHLQDGLSYYEACDKAEYNHSNSLTYEENDKRELKESLEILGKNSLRNPVVEKILNQMINVVNQICDTYGKPDEIRIELARELKKSAKERLETAKFINSATKVNLDIAKKIQQQFGFVPTKNDVVKYKLWEELAPRGHKSLFSDTYIPLEELYSKKIDIEHILPKALIYDDSFSNKTLAYRNINLKKANRTAIDYITQVNNVDLEDYIQRVEVLYNKGKGTISRGKHDRLLKSAKDIKEGFIERDLRNSQYIAKKARTMLLEVFKNVTPTTGRITDRLREDWGIINVLKELNLPKYRAVGLVEIEERKNNKKIEKIKDWTKRNDHRHHAVDALAVAFTTHNHIQYINNLNARRDETQDKHKVIQNIENLITHKVEDDKGNYKRKFVKPLPKFRNEAKKHLEAVLVSFKAKKKVVTRNVNKTKTKRGFNTSLELTPRGQLHMETVY

SEQ ID NO: 7869 - protein, 1439 aa, unidentified
  REGION 1..1439: note = Description of Unknown: Cas Enzyme sequence
MKKLGLDLGSSSIGWFLRDDEEVLNYGSIIFNSGMVKGTSGYSSPTKDRREYRLKRNPIKARKYRKKIILQTLIDNGMVPLENYELKKWTNYKKGEQKEFPRNLNFKNWLACDFRFDEGAVFKNPYELRVKALNEKLTKLELGRALYHLAQRRGFKDIGETNKETQKQIDRRKESGFQDALSNHRTIAEALQKEYLEKGMRARDNYPYRDEYEDELFKILSKQGFSLKKNDKGEFENKFVSDTHKAIIWQQPLKTQKGNIGKCTLEPKKRRCAVSHPLFEVNRAWQFINTIKYKENTDGNFEFIPNEYRDTLFNSIFLNQSANFKFEKLRKALDKLFQKKLIYNYRLDEKKGTYETTVAGMPFCKGMIKIFGDRALNDILSIEEYTQSSLPKNYDNYSLLDIWHNITEFDNESLSEFGNQKLNLDFIERKRKGEIESISPLLILKETLPQGYCNLSQYVLRKIIPLLKKGYIYNDAVLLANLKEALGVNYEQHKDKVSAVLDEATKFYKERKTTITITNKLIENYKGEIEANLNGEQNRLFAQGNYQYLIEESDKKDIIKACENHFGQNIWKNEVNKNNIINELGKEYQEFFFDEKRAFRKLETLQDIFENLLNVEGIILEKPLYHHSNRDNIYGKPIKYRNTEIEILPLAKTNSIKNPMFNKAMSVIRKLVNQLIVDGIIDNDTQIIVEVARELNDNNKRIAIERYQKQREAKRNKIREFLEEYKVKEKPSLSVEENIHQFELWDEQIFEETEDDAGSKFKNADRKEILKENKAIKRYELWMEQKGQCMYTGKMISISQLFSSVTNIEHTIPRKLLPDNTLANETIAFADYNTKIKGIVLPIYLPNFYKNVDGVGTGIEPRLQQWKTIRDGFKKAFEKRQKPSGAEDENIKNTRIQEKHFYKMHYDYWNDKLDRFTRTDITDKWARRQLTDTQNISKYAREFLKTYFHKVEVQKGSTTAEFRKMLGLEDKDNPKDRSAHTHHTIDAAVLTYIPTNASRRDKLIKKSYALKDEKNIQLHYIPHPKFDAQLVKGNIENNTLIYNYTKDNITTQTFKKVRVAGKIQYKKDSNGNKILSEPLISRGDTIRESLFKDSFLGKIRDVERFEDGQPKRNEDNTDWVYKKGEEEFIFVKKEPISKINKAKIKDVVDPALAKLIESQLGKNKILDWQGNVIRHVRIKKKAGKQVKSRVNYKSEKDYKNSYYAESGSIPYGIMLFNPKNEERILLQVHAYQIAEVFREKRKFDIDLFVDKFYPNYSSFKKLLLRVGQNLIVLNNDEEFDKRFEKQFQKNRLYKISKIDNGSLWLKYHLTSIADSDLDSVVKEKKDELLWKYEKELGLSKVKEDDSIEDLKTRREVYERQKFSFTSYNDFRIKRIVENFGKQKASEIKSELSKYKKVASFIEVEGETPLLKLNTSSSWNFLYEKTDFDMSILGKIKFKE

SEQ ID NO: 7870 - protein, 1077 aa, unidentified
  REGION 1..1077: note = Description of Unknown: Cas Enzyme sequence
MRLGLDIGTNSVGWWLYGTKDGQITEVVDGGVRIFSNGRDPKSKASLAVDRRAARAQRRRRDRYLRRKAALMKRMAQVGLMPANPAEAKALEVLDPYALRAEGLDRALPLTHFGRALFHLNQRRGFKSNRKTDRGDNESGKIKDATKRLDEEMKSKKARTYGEFLHMRRAAAPDPKSVPSVRTRLTVARRDNVEKEEAGYDFYPDREHLSDEFDWLWAAQARHAPDVLTDDLRDEIATIIFHQRPLKTPEVGLCLFTDERRIPSAHPLNQRRILLETVNNLRIAARGEAARALTREERDQIVYALDNKAHTKSLSGMAMKLKALGKVIKLRLEQSFTLETANRDAIACDPVRASLSHPDRFGPRWSTLEWDGQWDVVQRIRAVQSDIEHAELVAWLMEAHGLDRDHAEATANAPLPEGYGRLGLTATTRILAALESDVLTYSAAVAACGWHHSDGRTGEVLENLPYYGKILERHVIPGTYDPKDDDVTRYGRITNPTVHIGLNQLRRLVNRIISVYGRPDEIVVELARDLKLSEDQKKDVERDIKKNTEAAIARGKKLEEMGVPNTGANRMKLRLWEELGPTIGPRCCPYTGNPISAAMIFTPEVDVDHILPFSRTLDDGFANRTLCLKKANRQKTNKTPWEAWGETDQWGVIAGNLKNLPANKAWRFAPDAMERFEGENDFSARALKDTQYLSRIARAYLDALYDGGDSKSHVWVVPGRLTEMLRRHWGLNGLTALTDSDAQTVKAKNRTDHRHHAIDAAVIAATDRGLIKRIADMAQRDEMNGAEEVARSVPPPWEGFRDDISAQVPQIIVSHRADHGRIDPAARKSGRDSTSGQLHNDTAYGIGQDGTVVSRKPLASLSPNDIAVTKRGPNIRDGDLQKHLARVTRGLDGKAFEAALLSFADSPKLPDNSDNPYFGLRRVRLEETLQESARVEVADKDGKAYKAYKGDSNHCYEIWRLPDGKIKPQVVTTFEAHQSDAEKKPHPAAKRLMRIFKRDMVMLERDGETIVGYVQSMHVANGLYIAPHTESNADARNRDKADPFKFLQIGAGPLIKAKARRVHVDEMGRLRDPGPTA

SEQ ID NO: 7871 - protein, 1434 aa, unidentified
  REGION 1..1434: note = Description of Unknown: Cas Enzyme sequence
MNKPNNTKLIFGLDVGTNSVGWAAVESNFDQSTGAILGLGSRILPMDQAEIGDFNKGNLQSAAAQRTQYRGVRRLRERQLKRRERLIKVLKIMGMVDESWYPNNRYSYAFEPYEGKTRFKFQESYSKMRDEFIAVHPNLKSVTHDWTIYFLRAKAKREKISLEELAWIILQFNVKRGYFQLRGDDELKTDDSKYFVSDTVDKIIDAEDDVRGRKLLMIHLRSGIVGEYRSREIPDWINKSVEFIVTEKNVKDELKVTLTSPDAEDWTLRKKKTESIIQASEFTVGEYIYRKLLEDPGTKIRGKEVHTIDRGLYKQELQEILSCQVKFHPCLRDKDMLEESAKMLYKRNTAHRENLIKRGTVRMIIDDIIYYQRPLKTKKHLIANCKYEIYSYKDKNGVSHQKAVKGIAKSHPLFQEFRIWDIIHNIRVYQLSKTNDKGIIETDVDISVSVLDGVGKARLFLAFDQKKELSHNQILKALGLNGKEYKINYEEGSKLKGNELKAVIRKACKDVPNVQVEQLMSDAGRLEAVWHVIYSLGDKEVTLKAGLANNNIGLSEEMQQALMNVPSFSKDYGSLSKKALGKLLPLMRSGSMWSAAEIHPKVSARINDIITAEVNDEIKDFARAKLSNFTEVADFQGLSLVLASYAVYNRHSEVIDASIFSSPEDMDVNKMMPNHSLRNPTAEKVIRETLLVVKDMWKKYGKPTEIHVEMARELKLPNDKRKEYTYRRNENYLRNQRAKAMLIELSKNDKNINPFSKGHLETFKIFEEGAVKNEKSLDKEIVAIRKKGDPSKSELTRYKLWLEQKYTSPYTGKIIPLSKLFTTAYEIEHIIPKTLFFDDSFNNKIICERSANKYKDNRTAYEMICNSGGTEVEKGITLLSKDEYERQVKTMFASINYKKYKNLMQYDPPKGFSERQLNNTRYINRKLLELLSPVVREKDEEGARSKHIVVMQGGVTSELKNDWGLHDVWKRLLAPRFERMNKLTDSTDYYNKVGNRIDLSGYENELKRLDHRHHALDALVIACTDRRHIVYKNSLRSDSKRYDLRDKLMKKKSTDGRRSYVLPWESIASDAYEMLSKVIISFKNNKRVINKTVNYYQKYLEQPDGSWKKGYVKQKTNHDHWAIRKPMHKETIYGRLAQTEYKMVTLSVALRDIESIANGQIKRSLRKLVEIYKGNVAKIKKYLKAHPLEIDGDEVTKIAVRVVNDNWATSKLTLDANVKKAQLLKIVDPNLKNKLIRHFEDNDEKADIAFSDTGLAKFNANRHQPVKKVKVKQDLGIAFPLGESDLTKNKYGKGAKGTNLYFVIYRNLETGEHLITKDSTMSFNDLLEVEKSNEEYAEHKEGYEFFTLSPGDLVYLDEDDSTVLPVGIITSSIYKCVSFTKHQCFFVPHHISSLVVEGKELSVKNKMEKSLDDIMIKSRCIKLKVDRLGTIMKE

SEQ ID NO: 7872 - protein, 1419 aa, unidentified
  REGION 1..1419: note = Description of Unknown: Cas Enzyme sequence
MKKILGLDLGTASIGWALVNEAENLNEQSHIIKLGVRVIQYDTFSKVDKLGNVSESKNPIEDFASGKGLSSNAKRTKQRGARRNLQRFKLRRKNLIEILNKNQIISDQTPLTEIGKNTTHQTLELRAKAASEKISLEDFVKVLLVINKKRGYKSSRKSIDEGGGVAIDGMSVAKELYEKQLTPGQYVYELLKDGKKYIPEFYKSDLQNEFTNIWNQQKQYYSDILSDELYKELQGKNKGTTWKICEKPFNIVGIKLEGNSKQQKLKKYELRCSGLYNQLSLEHLAIVLQEINNDSNKSSGYLGAISDRSKELYFNKITVGQYLYHQIKENPHTSLKSQVFYRQDYLDEFEQIWKTQAKYHAVLTDQLKEEIRDIVIFYQRKLKSQKGLISFCQFESWEEDRKDEKGNIVINKLTGLPKKIIVGQRVVPKSSLLFQEFKIWQNLNNLQFKRVDSNTKDLTNQSIETDYTLADETKQLLFEELNIRGELSANEVLKFLGKKPKEWKCNFEKIEGNITNQALYAIYQKIVEVEGYGFDWSQKTALEIKKELKIVFPEIGINPEILDFDGNATNFDKQSSYQLWHLLYSAEDDHAISNQDKLLYGNANVNLKKKLETKYGFKPDYSKWLVNLKLQQDYGSLSSRAIRKILPHLQAGNLFSEACSLAGYNHSKSLTREQLNNKILKDKLELLPKNSLRNPVVEKILNQMVNLVNQVIEKYGSLDEIRIELARELKKSATERKEATQFINKRTKENDDIRNLITKEFGIPNPTKNDVIRYRLWEELAPLGYKSVFTGKEISPTQLFSKEIDIEHIIPKALLFDDSFSNKTLAYKKINLQKRDRTAIDFIESDFNSEIGNYKNRVEILYNNGKGVISKGKYKKLLMSQQNLPDGFIERDLRNSQYIAKKAKQMLQELVREPIVSTSGKITDKLREDWDLINVMKELNLPKYEVLGLTELEQRKNGKKVKVIKDWTKRNDHRHHAMDALTVAFTTHNHIQYLNNMSARKDITHKKHKNIIGIEDKIKYKDENGKKKFKPPIANFRYQAKEHIESILISFKAKNKVVTNNINKIKKEGGLNIQEPKTPRGQLHKETVYGRSKQPMVKPIKVSKRITSEHIKNIIHPKIREIIINHLEKFYNNIPLAFDTKTLKKEPLLYKDEPIKEVYCYEYIYTVRKEVNADNFKNEKSIEKVIDNNVKQILKQRLKAYNNKPKEAFSNLEKNPIWLNKEKGIALKRVTISGVRNAIPINFKKNYLGQVILSLKGKEIPSDFVELGNNHHIAIYQNPESNELQEEPVSFFMAVKRKVLGYDIVNKTNSLGWPLLFTLKQNEMFIFPDNDFEPSSIDLTDSKNYKKISKYLFRVQSISSKYYIFRHHLETTSANGSLFKDFKQMSNVTYRFYQNEKYLLGALKVRINHLGQIVQVGEY

SEQ ID NO: 7873 - protein, 1364 aa, unidentified
  REGION 1..1364: note = Description of Unknown: Cas Enzyme sequence
MKKILGLDLGTTSIGWAYVHEAEKESEESKIVKLGVRVVPLTTDENKNFTEGKSITTNSSRTLKRQARRNKDRYKMRRQLLKNVLIEEGWITKDSKLDESFADSTHNTYKLRAEAAESKISLKDLGKVLLMINKKRGYKSNRKAKNEDETGSIISEMDIAIKLNEESISPSEYALRLLSDGKKEIPVFYRSDLLSEFDSIWNKNKNKFSEILTPEFKDQIKGRAQKVTTKIFYAKYKINTVKLVSKNKKIEEYQHRVDAYRSDVDIAVVAFALASINGSISNSSGYLGAIGDRSKILHMRKITVGQYLYNRLKENPHINIKNSIFYRQDYIDEFERIWKTQSSFYTQLNAELKEKIRDKIIFYQRKLKSQKGLISFCEFESSTKEVIYNGKKMEKQIGARVIPRSSPLFQEFKIWSLLENVIVTNIESKKTTKLDLDAKMLLHKHLSVRQKLSENQVLKILFNKNAKNWKINYTEVEGNKTQSLLISAFEKMLFLEGNDMNFSKMEPDNILDTLTSYFKSIGVNTDILKFNDTLKKHELVKQPAYLLWHLLYSFEGDESRTGTDSLLAKLSSKFGFSKQHSRILVSIDFLDDYGSLSAKAIRKILPFLKENEYSIACSYAGYNHSALSLSKEENSKRILSEKLDLVKRNSLRNPVVEKILNQMINVVNYILDDPDMGKPDEIRIELARNLKKSKSERESLTKHIKTATKVHDDIRKVLKLSPFNIKSPSRNDVIRYKLYQELAFNGYKDIYTNEPIKSYDLFSNKFDIEHIIPKAICFDDSFSNKTLCPRDFNARVKGSQTAYDCIANNRSDSLGDYVNRVEDAYNSGISKAKYQKLLKKREDIGEGFIERDLRNTQYISRQTRLILLKICRHVQSTTGKITDRLRSDWDLINVMRELNFKKYKAAGLTETIERKDQKIERIKDWSKRNDHRHHAMDALVVAFTKVEHVQVLNNLHAKSDRSQKFFKMYNKITITQNRKTVFIKPLEGFRAIAKKHLESILISIKAKNKVVTTNINKIKVKGGYKNQTTMTPRGQLHEETIYGLSKFYDTKFEKIGSKFDEKKIATVAKKSYRNALFERLKEYGSDPRKAFTGENSLSKNPVNLNDGRLVPEKVKTVMLRGQYTISKPINKDLKLDKIIDKKIKKKLIEYKTQSDNPKEAFSNLELNPIWLDNDKTKSLKRVKITGVRNAISIHSKISDVRVNKGVDFVSPGNNHHVAIYKDDKGKLQEDVVSLFKAVTRKRLSFPIVDKLYKEDDGWTFLFTLKQNEMFIIPKDGFEVSSIDILDPKNKLLISPYLFRVQKISTKNYFFNHHLNTMAITGDDLKYKKSLKGITYYNFQSLEKLKNIFKVRIDHLGDIVQVGEF

SEQ ID NO: 7874 - protein, 1190 aa, unidentified
  REGION 1..1190: note = Description of Unknown: Cas Enzyme sequence
MNLLKFGYDLGANSVGWAVVKYYDEGVDILGMGSRIVPSDPDFHGKFYSGNTASKNAERTLKRGIRRNNQRWKQRRDALKALLIDYGWYDENLINLGSLQLYGLRDRAIKQKLTLQELGRIFIHLNQRRGFKSNRIGSSEEENETDYKERIKQLTASLGEKTIGQKIYEELLEDPKKLIRNRVYFRSDYRREFDKIWSTQQKFHPELTGSPHTKDKSTLYGRIADQIIFYQRPLKSAKHLVSQCRYEPSLKVAPVTSPYYQLFVIYQQVNNVELTHLDTGSAVRLNMKQRSLIFDALHDPALVNKAGKLSLTKLYRILQIKKDEVAINYAELNGNKTYLTLLRAIKELKINKDILSFDWRQSDDQLMRGGGLYRLWHTLYSIPEEVHVVKSLIKNFQLSEAEAKSLSHKIKFSTDHGRVSTKAIRKLLPHLREGLMYSAACNAVDYDHSGYKTEVALLDSLPLLSKHELRNPVVEQVINQMVNITNALIDKYGKPDEICVELSRDIRNNAKRRKEMTARNKSNKKRNDQIRKTLSEELGYKIVNGRDVQRYKLWEETDKLCLYCGQNISQQELISGLANIEHVLPRSRSFNDSLSNKIISHQTCNSDKNQMTARDYMTTKGQHEVDRYLNICSSLYNDRKISKVKYDNLMRSGKEIPNDFINRQAQDTSYISTAAVTHLKKICAKISVSSGYVTDYLRSEWKLKHLLRELNQPKYEAAGLTSKKTIKTGKDQTKEITLLEGWTKRDDQRHHAIDALLTALTTPRIIFALNNRNKLYQYQNEQFSDEQFDELKNQWMETTGEEWIGSIFDMARIQEHFISPPIPDLRRVVGHHLNSMLISFKKSDSKALSVSYNRVKNSQKPAIKTLVPRGALHEDTVRGKTKRYKKVSIDRKLKNHNLIVDTDIREYLVTRLMKYDNSPTKAYTPKALKKDPIILKNKILIHITIWEDVYTKRVDIKQLSSAQLKKIMDKRISSVVNEYVLSHNGDLKKAWNGLNSKPIKINGNILKKVTVEDNGTYESLRIKSRVDQTPIDYVKLGNNHHALIYKNDEGVYSSRLISLYEAVVIGIQNYDEQGILTSVIDLSPHPDTGAPCVMSLQKNDLVIIDCNKDSIKHRDLPEISKHLYRVQKISTTGKSLDIMFRHHLETSVDKSKTTASVRGITWEQFQADKHFARLRKVKVNNLGDILSVEG

SEQ ID NO: 7875 - protein, 1429 aa, unidentified
  REGION 1..1429: note = Description of Unknown: Cas Enzyme sequence
MKRILGLDIGTNSIGWAIINQNFEKKKGEILGLGSRIIPMSQDMISDFNKGVLQSSTSMRTAYRGVRRLRERSLNRRKRLIKTLKILGFIDDNFIVNHKTSIAYEVRGDKSVFKFETSYHEMKTLFKIKHKQSISISHDWTIFYLRKKALKEKISKEELAWVILQFNTKRGYFQLRGDDSLDPDSKKYFVSDIVDRVSENEGNRRGIKAFTIELRNEIVGEFSSKVAPDFIGKNIEFVVSEKRLKDGSLKVTLATPGENDWTLRKKKTENEIEVSNKTIGEFIFDKLLLNPKTKIRGKEVHTIDRKYYRNELIKILEKQKEFHSELNDPNIFSKIAHTLYKNNKSHRNNLLKKSISHTIIDDIIYYQRPLKSKKYLISNCKYESYCFKVNNEWVKKPIKVIAKSHPLFQEFRIWGLIHNLKVFQKEKRGNDGILKIDFEITDTVLNEEVKGKVFKYFNTKKEVSQAQFLKLLGLTKVEYKWNYEENIKLKGNEILASLLKVVKGIEKEKETVEIFHDPIKLEKIWHALYSLAGSEEAIAAALQHPSINLTKEAIKQIIEIPAFSKEYGSLSKKAISKLIPLMRCGKYWNQNNIDDQTVQRIENIVNGEVDENITERVRAKTKDLHDITHFQGLQDWLASYVVYGRHSELAEIQIYTNPNDIDVNKLVPQHSLRNPTVEKILRETMLVVRDIWLEYGKPDEIHVEMAREMKLPGKQRYKYTMRRNENRRTNMRAKAMLRELQKNDININPFSIGQLELFKLYEEGVVNSFAEMDDDIKAIRRKDDPSSSELIKYKLWLDQKYISPYTGQPIPLSKLFTPQFEIEHVIPKSKFYDDSFANKIICEKEANQIKDNRTAYQFINEFGGTKLVNGSCILDKDSYESLVMKMFKGKFRKIKNLLSYDVPKSFNSNQLNNTRYISKKLLSLLDPVVRDDQDKGERTRHIIPMVGGITHKLKNDWGLHKIWKKLLAPRFQRMNEITNSKDFYNVSNQQIHLSGNDVELKRLDHRHHALDALIIACTTRQHVQYINSYSNEKIRYDLKKKLFRVSENGLQRIEYDKPWPSITMDAYNQLKEVIVSFKQNTRIINRTTNYYQKYIEKKGEFAKTFVKQKKSHDYWSIRRPMHKDTIHGRRTIREFKEVNISKAIENISLVADRQVKIELKKRLKHFDQNIKALKKDLKINPINIDGHNITRVKLIHYNKNYASKRKVLDESFDRATVVKKVLGGNTKRILLDHLKKYDDNPKEAFSINGLIELNNDANILIKKVTVVEDMGKKFPLGESPISNHKYVESAKGTNMFFIIYRNKESNEHLITKNSTLSFGETIALMKAGLPLVEEKENHNYFTLSPGDLVYCYQDEDRKQLPEKINVGRIYKCVSFTKQQCFFIPIHSSVPILNKQEYSSLNKQEKSLDDIMIKAHCFKLKVNRLGKIIK

SEQ ID NO: 7876 - protein, 1237 aa, unidentified
  REGION 1..1237: note = Description of Unknown: Cas Enzyme sequence
MKKKQKAERLVLGLDIGVASIGWALIVEHPEQSKRRIVDMGVRIPPLVNERDDFKKGRAVSLNAKRTQMRGARRNLQREKQRREKVRRLLKENNMYPSEELMHLRTYANTAYNIEENDPVNYKLYALRSRAAQKGKKITLEELGRVLFHMAQKRGYQSNRKTQGGDEGTDYLRDIAINDGDIDSENNETIGIHIFKQFEKARRDLKKSRENKEKITLEMPRTKSDASNAPKPKEKKEGIRTNSENRVKSRSMYEAEFEQIWSVQKEFHSKVLTCELKKQLGERGIFFQRPLKSQKGKVSRCRFFKNNKVVAKSSPFFQAFRIWQNVNALLLEDDQLRGHVLSVQEKSEIFKHLNVVKEMKGEAVIKKILKLDYHRKYTLNLNKKEGHPINFEKIEGNRYNYELLRIFKKEKELFKNIDTQKFLEFDPFVADPESQVSYKLWHVLYSVSDPEQLYTTLQKDKFGFDRKQAEKLSKIYLEDDYASLSTRAIKKLLPYMIPGIETEEGFIYSRACDSVGLRHSDWENNEERDERKTKLKEKMSLLSPIRKNELRNPIVEKVLNQVINLVNEILAHKDYGGKNQPLDEIRIEFSRELKQNRDQRADTQKRIKQGKDRNDAIVVEIKKYNQAHNANIKISRKNIERFKLWEDGGKICIYSGEPIQKAHIFSQDYNIEHIVPKALRYDDSLTNKVLAKFEENQKKGAKTAKDYMLEKGEKAYMEYIARIKDNVKSFARIQKLQTGVKDLEDDTFVKRQLKESQYIARELKGRLEKVCTNVTTTTGSITAHLRNEWGLNQVMHELFPKNDKGKTDKRSDHRHHAVDALVVACTKHKIIHYLNTLSGRKNGEKLGKKDVWNINLPWLGFAAEAKSKIREILISFKSKRRVATVNTNKYTAKIGKGKRKVIGTQKVLTPRGFLHKETVYGRMKKCQKSKVKVSKILKDKMLEHIVHPAERNAAEQYLALYDGDTQAAIKALKKNPIQIQGRKHPLTEVVVWKWVYTIRKPLVDLNKKQAGEIIAKDIREEALHRFEQGEDLKKAIHTKPLKSNYGKGTAVKRVKVVTDLKNPQALHENENGEPIDFVNLRNNHHAAVYRDEKGKYYNEVVSFWEAFERYKEQWEAIRNLPRGIKSPPIEVIKKTGLPEGHQFVVSLSINEMLVKDLDLSPEEFKDPKNRTLISKHLYRVQKLANKDYFLRYHLATTLENKNEEVRIRKLSNLENYTKVKINRLGIITDVQKIYNNG

SEQ ID NO: 7877 - protein, 1258 aa, unidentified
  REGION 1..1258: note = Description of Unknown: Cas Enzyme sequence
MKNPRKVLGIDVGVASIGWAYIIEDENNSEIIDMGSRIVPLGKEKDDFARGQSTSINANRTRFRGARRSNQRWKQRRNKLSQVLERLDIYPSEDLIHLDKIDPYNLKAAYCKDLGIDIEQMDKDEQDSLPKVPVSLKLYHLRARAATKDLKNPKANKITLEELGRVLLHLCQKRGYQSNRNPTKAKKKEDTEYLKDIKKNNEMLRENEETFGQHYFKKFEQHYKTQLKYSLDTIKYEKGELNTLPIAPIHVLPRVKTEKDVVNRVFSRTYFEQEFNRIWENQKQFYDILTDDLKKEIGDKILFYQRPLKSQKSNVGTCRYRPNYRVAPKSSPFYQLFRIWQNLNNIEIADDQNRDHPLVQSEKEYLFSMLNEREKMTNKQILREVSKEFSRKYNINFKPNDKEYEPINFDKIEGNRTNHELIKALKKVGFKSKQCKEIIKFDPQKHPERQLIYRLWHLLYSVRNPEQLHEAMIKHFEEAGFALTEEQAEIIDENITLEGGYGSISTKFIKEILPHMINGAKYHDACEMLGETHSDSPTKKEIENWEAKPLETIPKGKLRNPIVEKILNQAINLVNELIDPEKGYGRPHEIRVELTRELKQNKQTREARDKSNKLRANENKRIRAEIKRYHPKLDIRNKHVERWKLWEETQQTCIYSKKHISPKQVFGNNHNIDHIIDKAHRFDDSYENKVLVLRKENDKKQDRTAKDYMIAEYGEKGYMEYVARVNNFIKNPRKKANLMLSYDDLKDGFINRQIKDTQYIAKALRKILENVCPVTSTTGSITAHLRNKWELNEIMRESFARDSEGKWSKRNDHRHHAVDALVVACTKQAMITHLNTLNSGGEVAYKGWDIKKPWLSFKSDTKAKIQEILISFVSISKVSTQNINRTPSGKIDKKKSKPGKKPKKIMHEQRIITPRGELHEQTIRGTIKKYIEFTSKQALANPKLIYNQDVKKAIQQILNEHNNDIEKASKYLNENPLTINGKPVERIIGFKIHYTKRIDLATEMTKPEKAKSTSSKLKNIESIVNDNVKRTVKQRLDKFNGDFIKAFSEYSKNPIYLDKAKTIPIKRVKIIEDGQYIPIRKIYDKNGQPIVGDNNKPIKANFAASGSNHHMAFYDTGEGEFVFEKVSFWDAFHRKKNGKDVVKEKNDVGLSLAFTLSINEMFVFPQDNENIDEAFILNKKNKATISKHLYRVQKLSSKFTDKGKESPNIVFRHHLATESKGKSTQIHVQSLSPLHNIYKVTINRLGIITDVQKIYNNG

SEQ ID NO: 7878 - protein, 1474 aa, unidentified
  REGION 1..1474: note = Description of Unknown: Cas Enzyme sequence
MKKVLGLDLGTNSIGWALVESNFENNEGNILGSGSRIIPMNKKMLDDFDSGQSISQTADRTSSRSMRRLYQRSKLRRERLHRVLNVIQFLPEHYASKIDFTTKLGQFINGEEVKINYRPFKSEGRICHNFLFEESFQEMISDFKKRGQNKNVPKDWTIFYLRQKALSQKITKEELAWIILNFNTKRGYYQLRGENLDETKNKEFIELNVKNLIPTGEQKKGKNTYKVLFSNGWEYDKPITEKNEWEGRKKEFIVTTKILNDNTIKRSFKAVDSETDWPAIKAKTENDIVSLNKTIGQYIYENLLLDPTIKIKGGLVKTIERKFYKTELIKILNEQKKYHDELIDQSLFFKSIEELYPKNKQHANQLKQRNIIDLLVEDVIFYQRPLKSKKSSVGRCNFEFRKYIIKDDRSGENKSVKEFLKAIPKSHPLFQEFRLWQFVKNLRLFDKTTFIKGSEVDVTPNYLQNELAYVKLFDFLNEKKEIGEKTIIEYFVKNNLIEKSEKNKYRWNYVDGKKYPCNETRAELLTLLKKAKVKNGDIFLTVELELHLWHLIYSVTDKIEFKTALTNFAVKNNLVVTNFVNAFLKLSPYPSDFSSLSYKAINKLLPLMRMGKYWNEDVIDLNTKNRIAKIINGEYDEKIQDRIRTKAIGLNSILDFKGLPLWLSSYIVYGRHSEAGNIQKWSKPDQINQFLSNFKQHSLRNPTVEKVIIETLRVVRDIWIKFGNGDESFFDEIHIELSREMKNPAAKRKEISDRIKNNQKTNQRIKEVLQELMKDTEIEGDIRSYSLSHQELLKLYEEGIYQNPNANYDLVSENEIQKIRQSITPSKSDITKYKLWLKQGYLSPYTGKVISLSKLFTTEYEIEHIIPKSRYFDNSLSNKIICETDINKDKGNKTAFEYLKQNGNSQVDGHDLLDVKHYEEHCKKYFKRNRNKLRNLLAEDVPEGFINRQMNDTRYISKMVNGLLSNIVREANENESTAKRMIPMNGAITNKLKHDWGLNDKWNELISPRFKRLNKILNTTDFGYWDKKINAFRIQVPESAGQNFNKKRIDHRHHALDAIIIALTNRKHINYLNALNNDKVKFELKSSLFNKNERGQYSKYFKSPWKGFQKDVINILESIIISYKQDTRIINKSNNKTWQWKEGVNGLKKVLTKQTKGKNWSIRKPLHKETIAGLINMKAPKGKVVTASRVSLETITSLKHIKKVTDKSIQKILLKHLENYKAEDKYNYSLAFSKEGIEDLNKNIVLLNNGKNHHPIKKVRSFEIGKKFTLGSSYINSKKYVETAQGTNLFFAVYWDDKKQKRNFETVPLNEVIEHQKQVACLPLSEKLPVQPNEALGKFLFTLSPNDLVYVPSEDEMQNPSLVHLALLNKFQLGQVYKMVSCTEKECHFVPHQLSSQIVKNESGTNNKSERIQLFDDDNDLLDSKGKGVMIKERCWKLNVDRLGYISSVDLGSHIEDNTNVVLSEKNVKTKNDL

SEQ ID NO: 7879 - protein, 1257 aa, unidentified
  REGION 1..1257: note = Description of Unknown: Cas Enzyme sequence
MEKILGIDLGTNSIGWAIRDITETDNQIIDYGVLRFDKGVAEEKGNEKPKVQERTNARGTRRNYQAAKYRKWLLLECLIKNNMCPLTLTELNKWKHYRIGFNREYPINNKEFIRWLRFDFDGDGKPDFHLFSAGKNESHYLFRANAIKSDSKIKNVYESNPMILGRVFYHLVQRRGFKGRDEEEAKTILEGSEKAGTAGREMLNDFVLKYKSIGAALYHYQKEKGGRIRCRYTLRTDFENEINLICENHNIPEQLRKKILKAVVWQRPLRSQKGLVGLCTFEKNKRRAPISHPLYEEYRTWVFINNLKIQAPKNIDYTLYIEKNILPIFYKVGNDFKLSSILRQVKKDFAKVTSKYAEKGKDKVVSAKILNLFETIFESDWKEKLGYKSSFKRSPKQPKKEVTGNYTYEDIWHVLHTFDSKELLLDFATKKLKLNEEHAQKFAEFNTQQGYATLSLSAIKKILPFLKKGYLYSKAVYLANLQQVLGETDVTDELVDAFATDINEIIENVDLQKQINFSINSLYQKFLVGKDKFQIENDRDLDTDEEYDVTQDLENTFGIKSWDSLESNLKEKIKQEVDSNYLDFLKMSMAEKRSNVFKKNPRLHDEIFKVLQEKYNLSDDRKKYLWHPSEQENYPSAKEYIVYKVKDEFKAVLPNNKKSFLHQNPNAQFEGLKTQLLGKPEPISKGFKNPMALKTLHNLKKLINHLLITGKIDEDTRVVVEIARELNDANKRKAIEKWQRDREKDNDRIIEKIKELKPGYDKNDKTLIRKYRLWEEQGKKCLYTGATIKCTDIFNASKYDLEHTIPASLSFDSELKNLTLADKHYNQQIKQKKIPFDLPNYAKSATIDNIEYSPIKPRFEFIKKKVKHFEDLVKEWLIKTKYASTKGQKDGCIINRHIYKMELEYWKKKLHTFECEEWKAGWKNSQLRDTQIITKYALPYLKTVFRRVEVQKGKVVAAFREIFSIDPKLEKKNRDKHSHHAKDAAVLTLIPKTALLEKILKEYFERKDLGFDKVYHTKPTYYQNFNINHILSIDNKVLINYLPDDRVLVPTYKKVRKRGKIQYQKIKDEYGKWHFKKDKDGNKIPLWAKGDSMRGQLHKESYFGAIKKAKRDEDEKVIREENGGLILDEVPTMVIRKPLKFKKGDDGEGFKSLEEINDCIVDLHLFEMIKKQVNQYNSFEDILNEGIFFLDKKGNRVNKIRHIRCKVKAGRRFFTFDKALQLSEHSYVSKSPYKNYHYAKMLKIFIVYFMKVTKQIN

SEQ ID NO: 7880 - protein, 1781 aa, unidentified
  REGION 1..1781: note = Description of Unknown: Cas Enzyme sequence
MKRILGLDLGSNSIGWALIEIDNEKHVVNVAGLGSRIIPMNAAEIGDFESSGKIKSTASIRTTQRGARRLNERFILRRERLHLVLNLLQALPEHYKNNIELLNKSGKRSGKFKVYTQPKIAYKLRSKRKYEFIFQDAYDEMIKDLRQDNPSIQNKKKHRIPFDWTIYYLRQKAMKEKISLEEFAWVVMSYNQKRGYEKLEVEDNDSQSKLTEKLDLKVTNVTPSNIENTSCYEIELENGYKYYEYSNVQLTEKGDIKEVERISEVDDEGNINENKTVYKITDICELEIDSFSYEKLDLGKKKHKYTITLNNGWTKEEIKANQNKYLNKIVWIFSNSGTLTKEEDKQLLNMYQKKADYIIKTEYNFKGKIKPVQGKNRTIKKPDYSEKSSDWTLLKKKTEKAIIKFNNEIGLIDKKKNTIKNVSNYIYHQIIKDDVKANKRSKIIGGLIQVIERDFYRNELKAIIKTQQKFHTQLNDETVFEKCANVLYPNNEIHRKALLKNKDALLNLIVNDIIFYQRPLKSKKSEIKNCKYEVKYFKDEVDEETGEISAIPVFNKATKVSNPLYQEFRIWDKIHNLKLIQNEKVSDGKLETNVDVTSDFLQTTDDYQDLFKLFNNRVKVKQADFLLFCKNLKNIKDKSFTKEFVWNYPDDEELPGNETRTKFITRFNRNGIANYNEILNKENTYKIWQYLDSTTYKERIVNTNKSNAKKNNNEKTENEVKPGFFERLLKDFNLEASTIQNLAKDFTAFPKFKSQYGSFSVKALKKIVPLINLGNKEFSGSYSIPIEFESHFKNIKDSKVKVAKYCKEKGIKRKKRHQFYKYFEQFSINERVDKILEKLESIDQNPKRINEVVDLNSKVKFPKGLFNTFISFRNAEDFRYLNLTQASYLVYGRHSEIQKVIQWKTPCQIKEGLNKELKHNSLNNPIAEKVLRETMQVVADIWEHYGKGEPNFFSNIHLEVGRELKNNAKQKEKYTQSNKANRLVNERIKNILREHLKPLGANELNKKHFDKLKLIEDAVITKTRLLKKDAPFFFKEVKSTKDEILKWMATDKISSSDFAKYKLWLEQGYRSPYTDETIKLSDLFDERKYDIDHIFPQQLVTNNSFSNKVVCEREVNKLKSNSTGRAFIKNNTVRELDLTTTIGKKVKILDDQRYCKLVDEQFTGNKRFILKSYDIPSAYTNSQLNNAKYIARKAMELVSHVVREDNEVEFRSKNVLPVVGRITSDLRKAWRFNNIWNRLLTPRFIRMNKLTKSNLFGQYEFDQKGNKYFNCEAHDLIKKKFDKKRLDHRNHALDALIIALCTVNHVNYINNINSGLETKKQGKHARAAIEKHRIGLKRQIKFSIKNKENPKKKDWHFMLPGESRMKDAEVYDISSVTKMNYSFKNGKAIKYDYLEVFYQAISSVVTSYKQPKAVIRKATNKYYSYYNLDGSLRTDKNGMPVKKLIEQIDKSSDKVANNKKRNIATRKKMHDEQPYGRKSYKYELLKIVDNLSEEKRSLIVDEELQLQLEELKINHNLIKVADFKKHLKQYPLINSNGSPIVKTVFKVNENSTNFKYTIRKSLNEIKNEKNINKIASISIRNELKAHLLKFDDNYELAFSQQGLNELNRNRKVPLQKVKMVEDGTKRYELRPFDKDKDIKLTKSNKWVEGAQHYFVIDRVDGNNFETISLRTHLENYHAEKGNQHSINTLNKFTLKANDLVYYPSDIELEKLNNDAYVDLDVNRIYRFVNSSDGTANFCLANVSSILFKYNDKSKEDKEWFNELLKLNDFTNPLSLSKKLKN

SEQ ID NO: 7881 - protein, 995 aa, unidentified
  REGION 1..995: note = Description of Unknown: Cas Enzyme sequence
MKKPWKVLGLDVGITSIGWAFIEEDSAKSRIIRTGVRIMPVVNEEDDFKAGRSVAINTERTRFRGMRRNNQRWKLRRDNILNLLKTNNMLDKDLTTLSRNALYALRARAVEEKVSLTELGRIILHMTQKRGYKSNRKTEASPDETTEYLDKIAGNSAKLREREQTIGQYFHEEFQKNTHTRVRNEIFYRNDYIDEFEQIWQQQQAQYPDILTNELKKKIGAETLFYQRPLKSQKGRVSKCQFEGFYPVAPKSSPFFQVFRIWQNINNLVISDDQERKFELTLAEKQKLFKFLDEKDTPKKSSVLTALGYSSKKYDLNFDEVQGNRTKRRLLKIFEDNNITNTDILHFDPFIETEDIKRPQDQPYYQLWHLLYSIEDPEHLYKALIEKFDFTREQAIAVGKVKLEKQYGSLSVKAIKKVLPHLMNGGIYSDACERVGYNHSGAITKEENETRDLNEYIKVIKKGSLRNPLVEKNLNQLVNLVNEIIDSDELGRPDEIRVELARELKMNAKKRKKVNDSYGKRKKENDRIRKILQAEPFNFKNVSRNALDRYKLWEETKGISVYTGETIQITDVFKTNLYEIEHIIPKARFFDDSFLNKTLCETKDNKQKSAKTAHDYMLEKSEKEYQAYVQRVKQIKSKPKRERLMMAEKDIPDDFINRQLKDSQFIARKAISLLQEVCRYVHTTTGSVTDVLRNQWGLTDMMKKLNFDKYDEQARVVWYEHPSGKRYFRIEDWSKRDDHRHHAMDAIVVACTKQGYIQQLNNLNKTFVTEKTQAALRMSARKFAVPWASFRQDARKALSETMISFKSKQRVATKNKNKIKHRDKNRKPQELLTPRGFLHKETVYGKMKRYAEERVPLNGRFKLETLDIIAHPIEKQAVIQRLAKYDNDPKKAFKKLEDNPIIVEGKRKPLAEVVVWETIYTIKKPLTALNKKQIEKDILDVRISRLVNERLDEHDGNLKKMIASLDESPIWVNEAQGICVKSVKLKTDLKDLKPL

SEQ ID NO: 7882 - protein, 1444 aa, unidentified
  REGION 1..1444: note = Description of Unknown: Cas Enzyme sequence
LIAEPVTIMNKSITTKKSKLVFGFDVGTNSVGWAAIKSNFENHQGEILGLGSRIIPMDQKEIGDFNKGILESAAAQRTKHRGVRRLRERQLKRKDRLVRVLKELGMIPHEWKANPRFSFAFERFEERTRFKFQDAYNEMRKEFSKVHPNLTSVTHDWVIYFLRKKALTCQISLEELAWVILQFNVKRGYYQLRGDADLDVSDGKYFVSDRVESVVDGEDGVRLIIQLGSGLVGEYRSKEVPDWIGKEVEFIVTEKMVKNELKVTLTKPDAEDWTLRKKKTETSITNSNLTVGAYIYSKLLADPQSKIRGKEVDTIDRRLYKEELLAILEHQATYHKELTDGKLLENAAKSLYKRNHAHRKNLVSRGTVHMIVEDIMYYQRPLKTKKHLIANCKYETYSYRDDNNEVRSKPVKGIAKSHPMYQEFRIWGQIHNIKVAAKSVVDDQGIIRPDQDVTVEVLDHKAKSALFAAFDRSKELTHSQILKTIGLNSKEYSINYEEGTKLKGNEFKAAIIKSAKAVAKTEVEKLLHNHEVLERIWHVIYSLGDNEDTLKAGLSNDQLDLSSEMRDALMGMPSFAKEYGAFSKKALSKLLPLMRVGEYWNQDDIHSKVLGRVEKIITGEVDESIGDAVREKLLGYRDVSDFAGCNLTVASYVAYDRHSEVLDTTRFESPDDIDLNINKMLPNHGLRNPTVEKIVRETILVARDMWKKFGRPDEIHVEMARELKLGGKKRGKYTYERNQNYLRNQRAKAMLLELSRDDSNVNPFSVGHLETFKIYEEGAVQNEKLLDKDIIAIRKKGDPTRSELTRYKLWLEQKYMSPYTGKVIPLSKLFTNQYEIEHIIPKALYYDDSFNNKIICERAANQFKGNRTAYEMICTSGGQALGGGVSLLTKDAYEGHIKTMFASINYKKYKKLLQYDPPKGFSSNQLNNTRYINRKLLEVLSPIVRQEGELGATSKNVLSMQGGVTSQLKNDWGLHDVWKRILAPRFQRMNELTDSNDYYNKVGNRIDLAGYENEIKRLDHRHHALDALVIACTTRNHVTYKNSLRGEEKRYDLRSKLMKNNDVNGRRHYVLPWKSIAQDAYDALSNTIVSFKNNVRVINKTINYYQKYIEQPDGSWKKGYVKQKTNHDHWAVRKPLHQEIIYGRGAKVEYKSVSIGAALNNVDLIANREIKKKLRKLLEVYKGNTTKVKKYLKEHPIELDGQEVTKIALRIINDKIATSQLRLDSKLEAKKLNKVVDVNLRQKLKDHLAEHNGKSDEAFSEVGLARFNKHRHNAVKSVKLMQDLGIAFPLGDGRDTKHKYGKGAKGTILYFVIYKNIETGEHIITKDSTMSFNDLLDIEKAGEEYAEQRENFLYFTLSPGDLVYVPEGTNLPLPQELDPSRIYKCVSFSDSACYFVPYYFAASIVEGKELDKGKNKTQKTFDGVMIKSRCVKLKIDRLGTVVQG

SEQ ID NO: 7883 - protein, 1180 aa, unidentified
  REGION 1..1180: note = Description of Unknown: Cas Enzyme sequence
DKIWHLQKKFYPEYLTENHKDELAGKNKTVTGQYFEKTMEIPRAENKGKEKKLQELEWRSKAVDEQLLLPEVAYILTEINNQINQSSGYLGAISDRSKKLYFNNLTVGQYQYELLENDPHASLQNQVFYRQDYMDEFDTIWKEQSKHYPELTEEVRKTLRDITIFYQRRLKSQKGLINICEYEGIERMIEIEGSKKKKIVGPRVAPKSSPVFQQAKVWQNINAIRIFQEGGRQEEYYLDEETKQLLFEELNIVESWKALDFLKWLFKDSNKNHRDWKVNFEKLEGNRTWATLFEKFFKIAEMEGYPEITKGKSALGILDALKICFHEIGIDTEILRMEMDLNGNDFSKQSAYQLWHLLYSYEDDSSYTGMDSLVQKLQEHYGFQKEHAQLLASVTFQQDYGSLSVRALRKIYPFLEEGKTYDKACQLAGYNHSNSITKAENDGRELLGSLIILKKNSLRNPVVEKILNQMINVVNAILEHPEMGRPDEIRVELARELKKTAKQRKEMTQAIGKATSDHIAYREKIKTEFGLPYVSRKDLIKYKLYLELKSTGFKTLYSGTYIKPEELFTNKFDVEHIIPQSVLFDDSFSNKTLESRGINLEKGNETAYDYCERKGFLKDFEARVQEVFSKKDIKYGKRKKLLMTKADIPEDFLNRDLGNSAYIAKKASEILRQVTRIVSATSGSITDKLRSDWELINVLQELTWPKYEALGLTYYDYNKKGKALPRIKDWTKRNDHRHHAMDAITVAFTKPAFVQYLNNMNAGSVKDYVIYGIKEKYTYREGEGGRKFKKPFSTIREEAKKHIDTILVSHKAKNKVVTLNKNKIKIKGKGKFKTKIELTPRGQLHKETIYGRSFDYKVKEEKINASFTKEKIVTVTKPSFREALLKRLQEFDNDPKKAFSGKNALTKKPIFIGDTGENVPEKVKTKIEVSQFTIRKEVTPDLRVDKVIDEGVKQILQNRLKEFGNKPKAAFSNLDENPIWLNKVKGIQIKRVTITGVSNAEPLHHAKDCNGHNILDKSGNEVPVDYVSTGNNHHVAIYRDGSGNFKEEVVSFYEVVIRKNQGLPIIKKQHEKGWEFLFSMKQNEMFLFPNQDFDPNGIDLFDAQNKQIIGKNLFRVQKISTKNYVFTHHLETQAVGTDTFKNKKELSEIVYRFYQSEKYLEGIVKVRLNHLGDIVQVGEY

SEQ ID NO: 7884 - protein, 981 aa, unidentified
  REGION 1..981: note = Description of Unknown: Cas Enzyme sequence
RKDIGENGILKYFVTKGVIQKTDMPNYRWNYVADKKYPANTTRTEFLSRLKKVNGVSPESFLTKEIEEHLWHLVYSIKDKEQFEKSLHTFALRYDLNPSTFVTSFVKIPPYPNDYGTLSTKALKKYLPLLRIGKYWNEGNIDPNTSSRISKITSGEYDESIKNRVREKAFALNTISDFQGLPQWLASYVIYDRHSEVGEVERWTKPDDINSFLSKFKQHSLRNPIVEQLVTETLRTVRDLWLNFGNGSPDYFDRIHIELGREMKNSAEKRKNMSSKMSENQRTNERIYQLLKELQKDTKIEGVVKSYSPSHQEILKLYEEGLYQNPNVDFTIVTEDEISKIRRNNKPSNTDINRYKLWLEQGYISPYTGQIISLSRLFTTDYEIEHIIPQSRYFDNSLSNKIICESDVNRDKGNMTALEYLTRKGGETVEGHTLLSLDEYEAHVSRYFKRNRTKLKNLLSFDIPEGFINRQLNDSRYISKYINGLLSNIVREENELETRAKRLQPFSGAITAKLRQDWGLNDKWNEIMVPRFKRLNQLTKSNDYGYWDKSINAYRIQVPDEIRKGFSKKRIDHRHHALDAIVIACTTSNHINYLTSLETNRENRSLRKKLLIINNQNHFTKHFKLPWNGFPLEVKKQLESIVVSFKQNNRVINKTNNRTWQWVETEKGIRQKKLVRQSKGKNWAIRKPLHKETVAGLVTHIETGKGKVATSNRVPLSEIKNQKHLNKITDGNIKKILGRHLANFVSKDGKPDFENAFSESGIDQLNQSIQYLNKGKPHMPIKKVRQYEIGKKFNVGFTGNNSSKYVEAAKGTNLFFAVYWDEKKNKRTFETVPLNEVIEYQKQVAHQSKKDRLPILPNPEKGQFLFTLSPNDLVFIPNDEELENPKLVNFNALDNDQISRIYKMVSCTGGECHFVPNRNSREILKNENGTNSKSERIQNGLLQNVLLDEKGKEAMIKNRCWKLKIDRLGVITQVKKGIDNT

SEQ ID NO: 7885 - protein, 1408 aa, unidentified
  REGION 1..1408: note = Description of Unknown: Cas Enzyme sequence
VLGLDLGTNSIGWALVNEAENKNEKSDIVKLGVRIIQYDNFSKIDKSGKVSESKSPIDDFASGSSLSPNASRTQKRGTRRNLQRFKLRRKTLRETLISNNIITTKTILAEAGKGTTYKTLEKRAKAAKGKIELEEFAKVLFAINKKRGYKSNRKASNDGEGAIIDGMSIAKELYDNNLTPGELIYNRLIEGKKYIPDFYPSDLRAEFDSIWKVQKQFYPEALTDELYKMLKNKNKTQTWAICKDPFSLVGIKQIGKADEKKLERYGWRVKGLEKQLELEHLAIVLQEINNNIKGTSGYLGEISDRSKELYFKKETVGENLYKQIQANRHTSLKRQVFYRQDYMDEFETIWNVQAKYYPILTINLKEEIRDIIIFYQRKLKSQKGLLSFCQFESWDETYYDNKKGKNKKRRVGQKVIPKSSPLFQEFKIWQNINNIEIIPKKDEFINSSNQVPINKYKLEDEDRKILFEELNLRGNLKMSEVFKLLKINASKWKANFNEIEGNRTNQVLFNVYYAILENEGYGFDWSSKRAMDILNEVKSIFSLMGIDDKILEFNSKLSGDEADVLPSYQFWHLLYSATEDEKMTSEEDQMLYGNSNVSLKKVLNKKYGFKAEYAKLVAGISFTNDHGSLSARAIRKILPFLVEGHEYSEACCLAGYNHSNFMKKEENERRKLLSKLILVEKNSLRNPVVEKILNQMVNTVNQLIDEYGKPDEVRIELARELKKSAKEREEMTKYIVSATKANEDIRKIITKEHGIPNPTKNDVIRYKLYLELKANGFRSIFTNQYIPKEKIFSKEIDIEHIIPKALLFDDSFSNKTLAFRDVNQKKDKKTGFDFIEKEYNSDLSEYKARVEMLYDKGKGNISKGKYHKLLMSEANLPEGFILRSLRNSQYIAKKAKSMLEDVFKTVIPTSGRITDKLRSDWDLINVMKELNMPKYEAAGMTEFEERRNNKKHKVIKNWSKRNDHRHHAMDALTVSFTSHNHIHYLNNLNTITHLKGEQHDLEKSKLSALKLSITKVYNIGSSSQKRKFIPPMPNFRTKAKKQLENILISFKARNKVVTRNINKIKTKSSIIEKVQLTPRGQLHKETIYGRIKEPKKTPVKLNRNFDLAKARLIIDKHLRILIVDRLKEYDNSPENAFNSKALKASPLIYKNQEITHVRIFKNTYTIRKEINPDNFKNKESLEKIIDHQIRAILIKRLDTFGGKAKEAFSDLAKNPIWLNKNQSISIKRVKISGMTNVEALHSKKDFLGNDILDVDGEKIPNDFVSPGNNHHVAIYIDGLGKLQEKVVSYYEAVARINSDLLAVDKEFNIDKEWRFLFTIKKNEMFVFPNKETGFDPSEIDLLDDDNNKIISPNLFRVQAISTKDYKFRHHLESTVVGKIEDVLFKRIRSPKGLIEVKKVRINHIGKIV

SEQ ID NO: 7886 - protein, 978 aa, unidentified
  REGION 1..978: note = Description of Unknown: Cas Enzyme sequence
MPKSFNGYSLLDIWHNITEFDDENLSEFGAKKLNLAPIERKIKGKVQNTSPLIILKATLSKGYGSLSQSVLRKIVPLLKQGYLYNEAVLLANLKEALGTSYEKQEKEVRSVLSTASEIYRKNKTITAIVNQLIENYKGEVEANRNGEENSLFAHKDFNYRIEKSDKEAIVAACQKHFGQNKWLKKKGKEDLVNSVEEAYQEKAMSILRKLINQLIIEGLVDKETEIIIEVARELNDNNKRIAIERFQKQREAKRNKIRAFLEEYRSQEKSLLNVEENIRKFELWDEQVFEETEDEKGTKIKNLDRKEILKENKAIKRYELWMEQKGQCMYTGKMISISQLFSSSTNIEHTIARELLPDNTMANKTIAFRDYNTNIKHTELPVYLPNFNRNIPQIGTAIAPRLHQWEKIRDGYKVAFETRQKPKGAEDEKTKNKRIQDKHFYKMHYDYWNDKLQRFTATDVTDRWARRQLTDTQNISKYAREFLKTLFHEVAVQKGSTTAEFRKMLGLEDGENPKDRALHTHHTVDAAVLTYIPVNASRRDKILKKSYALKRKANKQLRYTPHPNFDAQRIKRAIENNTLIYNHTKDNVTSQTFKKVRKAGKIVYKKDKNGTNILSMPIISQGDTIRRSLFKDSFLGKIRDVERFEDGAPKRNADNSDWEYKKGEKEFLYVKKEPISKITKDAIKNIIDPELAKLIKAQLGNDEILDWQGNRIRHVRVKKNTGKAVKARVDYKSNKDYKNFYYAESGNIPYGIMVFDLENNQRILLQVHAYQVAKLFREKRQFNAELFVKTFHPEYSNFKCILLRKGQRLIVLNSDDEYDNRLDSSFQKNRLYKIDRFGEGFLRLEYHLNAIADQDLDALVKQKKDEVLWEFEKELGLEKVVANESIKDTKERNEDYENRKYKFTTWKDYRINRLVDNFGKDKAAEIKKELSKFKKISSSIEIEGETPLLKLNTSESWNFLYEGLDFNVSILGELTFKK

SEQ ID NO: 7887 - protein, 1263 aa, unidentified
  REGION 1..1263: note = Description of Unknown: Cas Enzyme sequence
MKTEKNYIFALDLGVNSIGWAVVNRINGANANDAVQYELCGLNSRIFQEMVDAKTRTPKNQKRRQQRGMRRNLAQRKRRRAELIRCLQDNDLLPPTFDGKRANEIDRRFAERVLNKEWDGQWREKEKFHASPFAMRALGLERDLERHEFGRALLHLQKRRGYFSNRGAKYVELFEHLKVLDTEEKEELKKEKGADKETGIVLGGIRQLFAVMEKQGTRTVGEYVWRKSMDTGQSPQRITRHYIEEAKRRGDQIKDEKINFYATRKMTKDEFDFLWKKQAPPLSLNEVLRENIECLLFYQTPLEKAFQAKTGKVANYLGLKTYVKRWNKPTRGVCSFQIDKPRMAKAALPFQEARTWQVINNLLVRGKLLNAEQRQKLYEALKEGNNLNKDGRMSWSNVAKVFACTPREINYSRVGDGEEDGKSGLIGNRTANNIAGCAGAEFWQMLSEQQQEQLVTDLLTITDKKALYLRLVKQWGQEGGFGNAAFNLATEELESGYSKHCRRVWSALLLHLRGGCNYYEACQKAGYLQDKKTHYKREKIYIRDIPNIANPIVQKALYESRKVVNALVQQYGRPVEIRVEMAREMAQSKKHRKEIEDQQTENRKRNAEADDKLREYIRSGNVMGLEYMQMGGGKKRILPADRKKYIMWHHEQEYKCPYCGTRIGCADLFNGGAEIEHILPQIAFKQNYMNTVLTCRDCNQEKKGRSPYEAWRGTDKWDSVCRRISNKEKSRDDFPNMPFAKKRRIRDEKFLAAKEHSEENESEFVQRQLKDTQYIAVAVKNMLEKIGIPVRVSKGGATAELRRLWGLNNILPRHPDSGGLREDKDDNAVLQYDKDAAKESKNRMDHRHHAIDALVIAMTDTAALQEMTRRWKHFMEFGEFGDTPFPLPMRQYADSANALCAFLRGRLSRTVVSHMTKRKVYGALHEETAYGEGCYEKDVSLPTRANSRKKFIGELLAITINNKKQAIGGDGTVVQGGAQWLADDDMRDILTRYINDGNHKGYPVHPQTREFIKSVRVFCRCYVHRISVQDALEYAKKDWIPGHKTWIVDKVVHAVLQSYLNGQTPKEMAKHLVLQPPRMPLKDGKEGKGPEIKTVRVAQHKGEASVRKLQQFKIYQTGSNHHAEIFCNADGSQTQGRIISMFEAAQRRARGEAVIDKNPDEAWKGEWQFKMYLCINDMVVFDAVEEDKKLPHANPKNSGCPEERLIYRVQKMSGGSIIFRHHTLATSSNEDHYGKIQRSISQLKGCKKIEISVLGSYSNIPND

SEQ ID NO: 7888 - protein, 1068 aa, unidentified
  REGION 1..1068: note = Description of Unknown: Cas Enzyme sequence
MKLPWQECHSMPKSFNGYSLLDIWHNITEFDDENLSEFGAKKLNLAPIERKIKGKVQNTSPLIILKATLSKGYGSLSQSVLRKIVPLLKQGYLYNEAVLLANLKEALGTSYEKQEKEVRSVLSTASEIYRKNKTITAIVNQLIENYKGEVEANRNGEENSLFAHKDFNYRIEKSDKEAIVAACQKHFGQNKWLKKKGKEDLVNSVEEAYQEFFFDSKRAFRQLESLQETFENLLKEKGIVLQKPLYHHSNRANIYEKPIKYRNTAIDILPLAKTNAIRNPMFNKAMSILRKLINQLIIEGLVDKETEIIIEVARELNDNNKRIAIERFQKQREAKRNKIRAFLEEYRSQEKSLLNVEENIRKFELWDEQVFEETEDEKGTKIKNLDRKEILKENKAIKRYELWMEQKGQCMYTGKMISISQLFSSSTNIEHTIARELLPDNTMANKTIAFRDYNTNIKHTELPVYLPNFNRNIPQIGTAIAPRLHQWEKIRDGYKVAFETRQKPKGAEDEKTKNKRIQDKHFYKMHYDYWNDKLQRFTATDVTDRWARRQLTDTQNISKYAREFLKTLFHEVAVQKGSTTAEFRKMLGLEDGENPKDRALHTHHTVDAAVLTYIPVNASRRDKILKKSYALKRKANKQLRYTPHPNFDAQRIKRAIENNTLIYNHTKDNVTSQTFKKVRKAGKIVYKKDKNGTNILSMPIISQGDTIRRSLFKDSFLGKIRDVERFEDGAPKRNADNSDWEYKKGEKEFLYVKKEPISKITKDAIKNIIDPELAKLIKAQLGNDEILDWQGNRIRHVRVKKNTGKAVKARVDYKSNKDYKNFYYAESGNIPYGIMVFDLENNQRILLQVHAYQVAKLFREKRQFNAELFVKTFHPEYSNFKCILLRKGQRLIVLNSDDEYDNRLDSSFQKNRLYKIDRFGEGFLRLEYHLNAIADQDLDALVKQKKDEVLWEFEKELGLEKVVANESIKDTKERNEDYENRKYKFTTWKDYRINRLVDNFGKDKAAEIKKELSKFKKISSSIEIEGETPLLKLNTSESWNFLYEGLDFNVSILGELTFKNRSRSPMGC

SEQ ID NO: 7889 - protein, 1032 aa, unidentified
  REGION 1..1032: note = Description of Unknown: Cas Enzyme sequence
MHKKILGLDLGSNSLGWALLEETDNQVSRIVGIGSRIFTKAVEEKVPTPKNVKRRDMRLGRRVLQRRARRKQRMLNYLVLLNLLPKALQSHAQPEILLNEIGDPYALRAKGLDQQLTPYEFGRVLLHFVARRGFLSSKKQVAGDLVDDPDTVAYLNELDDKSTSDKEEGAFKADISEVRKSIDEANVRTLGEYLHKLAIGECKRNRSHEGGHLRTDRKMYQDELALIWERQAQYFPTLPEDFMEKDKGVHRIIFYQRPLKLKKDRVGQCSLEPKHRRAAMARLEVQRFRYYQDINNLQYFERHTDQWLGLSAEDKTKLAEHFEQHPKITTTALKKLLGLDKQTKLNLETKNLKGNITACEIRDVLGEQWDNYTQTQQAALVEDLLSIKKKSALKRRLMNHWQLDATRAVSLCLLEFEPGHSNLSLKAINKILPYLEQGLIYSKKDYETGELGALQAAGYMDGLAEAIQPTDKLGAPVETSNPIVNRGLHELKRVINAIIKQYGQPDIIRIEMARDLEMSTKRYKENEAQQAKNRKENEKAVDAYRGLNLGQYPSYDDKIKYRLWQEQDHFCAYSNKTIPLNLVFTSEVEIDHILPYKKSLDDSYMNKVLCYAAENRNKRDRTPKDAWGGNADKWNQITQTISRWKGLDAKVKRFYQTESDLQQRDFIASQLNDTRYIAKLSLDYVKELGCDDVSVTKGHVVSKIRHQWGLNDLIGETDKKERTDHRHHAIDAVVIAATSRSLYSKAVAQIERDKLVIAPPYPALRDELDSHLQNMVVSHASQRKLAGGLHEETGAGYIAKHGGLVYRKSLSPDFTVKNANSIVDDHVREVVLNHLAAYDNDSKKAFAEGVRVYHKDGKTPIKRVRVLQSKTAEKKLEQTKFGVKDKTGKVFKYMSYGNMHHVEILQHKITGKYKGEFVTMMQASHRAKGIQSKLNPEGGKQAIIQTEHGDEWQFLMALHINDLVSVKLDNNRREFYRVQKFMKEQGYLVLRLNTASTLGDKKEEIQLSVHKLLSDMHLKLHKINVIGIITND

SEQ ID NO: 7890 - protein, 1472 aa, unidentified
  REGION 1..1472: note = Description of Unknown: Cas Enzyme sequence
MKKTLGLDLGTNSIGWSLIESDFAKKQGKIIGAGVRIIPMGQDVLGKFDAGQSISQTADRTAYRSTRKLYHRNQLRRERLHRVLNIMGFLPKHYANSIDFKKRLGQFYPGQEVKLNYRANEKGFEFLFEDSYLEMKLDFKSKNFDGPMPFDWTIYYLRQKALSKKISKEELAWIILNFNQKRGYYQLRGEEVDDSKNKQFVQLKVKDVIDSGEKVKGNPLYKITFANGWEYDKLITKTEDWIDRKKEFIVTISELKNGDKKYTYKAVNSEEDWAAIKAKTEQEIDNSKLSIGQYIYQNLLIKPNQKIRGKLVKTIERKYYKDELIHILEEQAKHHPELRDNEIHNKCISHLYSKNEAHRNNIKDKGFVHLIVEDIIFYQRPLKSKKSTIGRCQYEFRTYSKKNEDGSSKRIKEYIQAIPKSHPLFQEFRLLQFCNNIRIYNTDLLQSAKKKEGADVTKEFITNENDFTALFEYLNEKSEVDQKNVLEYFLRLKLDQKKIPKEILSQFSWNYDAEKKYPCNETKSLISNKLKKVTGDIASDFLDKNLTALWHIIYSVKDKKEYNQALSNFAKKKGIDINSFVESFKKMPPFANDYGSYSFKALNKLLPIMRTGKYWDIDKIENTVKERIAKIITGEYDEKIQDRVREKTIDLNEINDFKRLPLWLSAYIVYDRHSEGSNIAQWSSPQDLDKWLIEFRQHSLRNPIVEKVVTETIRVVRDIWDYYGKGENNFFDNIHLELGREMKNPAKKREAISKKITENQNTNQRIRELLVELMNDPETEGNVRPYSPSQQEILKIYEEGVYANPSKSFLNVSEDEIDKIRKKNSPSQNDIQKYKLWLKQGYCSPYTGKIIPLSKLFTTEYEIEHIIPQSRYFDNSMNNKVICESDVNSDKGNKTAYEYLEAKGGSNIDGHELFDLTKYIQHCKQYFGRNNTKLNNLLSEDIPEGFINRQMNDSRHISKFVKGILSNIVRENNEKEATSKNLISMPGAITSRLKHDWGLNDKWNEIIAPRFKRLNQITNTENFGHWDKNINAFRTEVPDDIIKGFNKKRIDHRHHALDAIVVACCTKDHINYINSLNSERKNYSLVSKLRKVESISVKNESTGRHESKKVAKEYLHPWKNFTLEAKSAIENIVVSFKKNTRIINKANNKTWQWVEKDGVLIKTKIKQTKGDNWSIRKPLHKETVSGIVHLQKVKVPKGKIITASRVALSEIKNKKHIEKITDISIKKILYAHLENYKDENGKHIYSDAFSESGIEDLNKNIKMLNGGKDHMPINKVRQYEIGSKFEVGSSGNNSTKYVETAKGTNLFFAIYWNEDKGKRIFETVPLNEVIEHQKQVAHLPKIERLDIQPKPEMGNFLFSLSPNDLVYIPNENEINNPKLVNFSNLEKSQLLRIYKMVSCTGSECHFIPLSNATEIIKNENGTNSKSERIQLFENETDIIDEKGKGVMIKNVCWKLNVDKIGNILGRTENIET

SEQ ID NO: 7891 - protein, 934 aa, unidentified
  REGION 1..934: note = Description of Unknown: Cas Enzyme sequence
KYLDCSKQTAQKFSKIKLKQDYGSLSLKAIRNILPYLEKGLLYSHAVFLANMKSILPIDIWSNENNRTTIQEEIFSIIDNYGDYKNKIEIVNGFIKNSKNNEESWNAENKYVVEVYKKDLLKSIQDYYGTKRWNALSEVDKEKIENDIFQLFSSQMKLNLNKGEFIKKETLDERVKSFLKDNFNIDEEKLKKLYHPSAIEVYKNAKRSKIDGKLYLGSPLISSIKNPMAMRALHQLRKVINQLIKDDAIDENTIVRIEMARELKSANERVAIRQWQNDLQNRRNEYKKEITAIFNGEIKIDDCNDLQKPNYEPTETDILKYQLWKEQNHICLYTGKTICISDFIGSNPKFDIEHTIPRSKSLDNSQINKTLCSSVYNRDIKKDKIPTELNIHNEILPRIKHWYAKYKDLEDQIRAISKKVRVASTKENRDTYIQQRTKLKFECNYYKSKYKTFTIEEIPKEFKNSQSVNIGIISKYGNLFLKSLFTKVYPVKGKTTSNLRDIWGLDKKERINHAHHAKDAVVVACCSKDINDALAAYYHKYEEYEFYGKQKPSFKNRIPWKGFHEDVNNFDKTTLISHHAPNVLPIQSKKAIRKRGIIQRNAKGEIKYKQGDTVRGALHKESFYGAIKREETNKKGETEEVIKYVLRKPLSSFSDTDLKHIVDDKIREIVTNGRIQEKQIKKEIETLKKQINKVDELEEQSIKLQIEILVGKIENELYILPNKNGKPIPIKKIRYFATDVKVPLEIKKHRDVSRQEHKQYYFAKNDSNYCMAIYEGIDKKGKLKRSNLLINNLDAGRFYKKSNANNKMYPIAPEKDELGKPLKYILNKGKMVLIYDKKSDELLEMDNLQLLENLFQITQIDVEKSAEIKLLHHSEAREKKVLTSYMGLKSGMKGGKNIGDYQKFPWIKIGVNNFDCLVEGYDFKISASGKIDFL

SEQ ID NO: 7892 - protein, 1370 aa, unidentified
  REGION 1..1370: note = Description of Unknown: Cas Enzyme sequence
MKKILGLDLGTTSIGWAYIKENGKKSEIVRLGVRVNPLTTDETKNFGEGKSITTTAARTEKRQARRNRNRYKQRRKKLIDLLLKHKWISKETLLAETGKNRLHDTYRLRSEAVTQKIPLDALARVLLMINKTRGYKSSRKAVNQEEGGRLIDEMDIAMQLQNDNITPGQYVLQLLEKGHKKLPSFYKSDLEKEFDQIWELHAQEYPDILTPPFRKQIKGKARNTTVRTFYAKYGIDTIQNTSKNKKIQAYKWRAEAATSISSMDIVSFALAEVNDLISKSSDYLGAISDRSKVLLMEKLTVGQYQYQQLLKNKHHTLKNQIFYRKDYQDEFDKIWAYQSKHYKLSDTLKKEIKDHIIFYQRPLKSQKGLISFCEFEQNKKEVIYNGKKTSKTIGSKVAPRSSPLFQEFKIWQTLQNLKFKNTKGEVFTLGMDDKQLLFNTLNYHESISDTKVLKLIWGKNSSDYEMNFEKIDGNKTNAALFSAYGKMVELADYNNKYKNATPKKKKEILRSFFDVHKIDKRILDFDPLMQKHALVRQKSYQLWHLLYSYEGDSTRSGIESLYKSLKENFGFDRHFATFLINIPLLADYGRLSSKAIRKIYPYITEHKYAEACRLAGYNHSSFLTKEENSSRKLKKKLEILPKNALRNPVVEKILNQMIHVVNAILEHPDMGPPDEIRIELARELKNNAKERARINKAIADTTRLHEKYRNEIREKFGVKNPTRNDIIKYKLYKELEHNGHRTLYTNTYIKPSMLYSANKEVDIEHIIPKALSFDDSYSNKTLSTRSFNESKNKETAIDYITNNYSEEEVEAYKVRVRTAYKDGHISKSKYDKLLRPQSELKDGFIARDIRETQYISREASKILKAICRNVSATSGKITARLREDWNLTNVLKELTLPKYEALGLTYQEERKHGVKITKLKDWTKRNDHRHHAMDALAVAFTSPEHIQYLNNLHAKSHKGNPIVGIEKKLTYIDGKHKRRFIPPINNFREEAKKHLASILVSRKAKNKVATSNINKVKSKKGIQKQKTLTPRGQLHEETIYGLAHQWTQKNEKVNASFNETKINTVANQAIKQALLSRLHEHDNNPKKAFTGKNSLEKTPLVIGTKTWSDKVKTSTLEKVYTIKKDVTPDLKIGKVVDKGIQKILKKRLELYDGNPKEAFSNLEENPIWLNEAQGIAIKKVTITGIANAEVIHEKKDHLGNYILDKNGNRIKSSYIRTGNNHHVAVYKDAKGKLQEKVVAFFEAMARVLSDLPIIDKEYKTEEGWTYLFNLKQNEYFIFPTADFSPSKEELLDEKMRHLISPHLYRVQKISTKNYLFTHHLETKAIGGEDLKNRKVLANNLFYSIRSSENLRGIIKVRLDHIGNIIHVGDY

SEQ ID NO: 7893 - protein, 1205 aa, unidentified
  REGION 1..1205: note = Description of Unknown: Cas Enzyme sequence
MEKILGIDTGTNSLGWAIIEKNDNGETKLLHKGTNIFTEGVKIEKGIESSKAAERTEHRALRKHYWRRKVRKIRLLTVLEQNRLCPPVDTEQLRDWRLKGIYPHDDKFLAWQRTEDKNNVNPYQFRHICLTQQLDLSNLTQRYILGRALYHLNQRRGFLSNRKETTKASDGAVSEGISSLTAEMQDAGCEYLGEYFYRLYQSGEKIRSRYTARNEHYLKEFNAICEKQQLSEDLVDNLRRAIFFQRPLKSQKGTVGTCAFEKGKARCPASHPLFEEFRLYSFLNNIKIKTPTDADLRYLSGDEKAIILPLFKKYRKSKHSFNFEDIAKKLAGKGKYMYFRDKDDKPYQFNYQMDTPVPISTVTAQLEEIFGENWLEGACELYTLADGKTPLQIMNDVWHALFFFDDEGKLKLFAKDRLQLSDEDAEKFAHISMPNDYASLSLKAIRKILPYLKDYGLIYSQAVFLANLDEVLPSYFMRHDDEHEKAINAAVEALLEYGARNDERPLEVYFKDYLKSEYSGYDFDEKSLQKLYHPSMMEQYPRVAPGDNGIYQLGSPRISSVKNPMAMRSMFRLRKVVNLLLAEGYIDKDTKVHIEFSRDLNDANRRWAIQQWQRQQEKNREDIRKRIQEDAHIENPTDTDILKYQLWEEQNHICIYTGNQIGISDFLCSNPKYDIEHTVPQSAGGDSTKMNLTLCECAYNRKTKKTKLPTALPDHEAMLQRIEHWNERAEELSKRIRKLKGSRATTKEEKDNIIRRRHLLSLERDYWRGKYRRFTMTEVPEGFSRRQGTDISVISRYARMYLKSVFDKVYIVKGIATSDFRKMWGIQEEYTAKERVNHVHHCIDAITIACIDKVQYDKLARFYHDEDNYHLGKGKKPQFEKPWPTFVADIKHIQDELLVAHYAKDNMPKHTKKKGGDNYIQGDTARGSLHNDTYYGAIERDGDIRYVVRKSLDMLEAKDVDKIVDDEVKQKVKDAIATHGSLKAAVEATIWMNEQKQIPIKKVRIFANSVTRPINIRQHRDKSRHEHKRQFHVQNDRNYMMAIYVGNDERGREKRAFELISNIKAANFYRKSGQNAEEKRQLVPNSKNGWPLKYELKIGTMVLLYENNPDEIWNSNPQELQKRLYIVSGLSYSPNKNGNDYGTITLIHHQDARLKSDIKPSKGAFRANDLFRSGIILYHTQFKALIDGVDFELNDLGEIRRIKND

SEQ ID NO: 7894 - protein, 1571 aa, unidentified
  REGION 1..1571: note = Description of Unknown: Cas Enzyme sequence
MKKILGLDLGTNSIGWAVVNADEVTRNDGTSFLKPTSINAAGSRIIPMDEGVLGDFDKGNTKSQTKDRTEKRGTRRLLERNLLRRERLLRILKLMDFLPEHYASHINEYGKFTDDSEPKLAWIKSIDGKYEFIFKDSFNEMLTDFAKNQPQLVADGKKVPYDWTIYYLRKKALSQRLTKEELSWILLQFNQKRGYYQLRGEEDEDSNPDKLVEFLAQKVVRVEATNEKKGDDVWYNVHLENGMVYRRSSRIPLDWEGKVKEFIVTTDLEKDGTPKKDKDGNIKRSFRAPKEDDWTLLKKKTEFDIDNSHKTIGYYIYDSLLQNPNQKIIGKLVRTVERKYYKDELRQILEMQKALIPELQDDNLYKACIDELYPNNEAHRNNISKPDFVNLFINDILFYQRPLKSKKSLISDCPYEERFYLDKKTGETKKSSIKCVAKSNPLFQELRLWQFVQNLKIYQRERIVNDGQMDLFGNVSSGKLQTDVDVTAEFLKSEDDYVNLFDWLSDRSSIKQDTLLNLYFKIRKEKGKDQYPYRWNYVEDKEYPSNETRAEILKGLEKCDVSAAFLSKEQEMSLWHILYSVEDKTEIRKALGKYAKNNDLPEAFAEVFSKIKPFKKDYGSYSEKAIKKLLPLMRMGKYWSADAFETKTRERIEKIITGEFDENIKNRVREKAINLTQLEHFKGLPLWLACYIVYDRHSEAKEINKWEKPEDIDEYLKSFKQHSLRNPIVEQVVTETLRTVRDIWKQEGQIDEIHIELGREMKNPADKRKKMTERIQENESTNLRIKAMLMEFMNPEMGIENVRPYSPSQQDILRIYEENALDNLTKNDKEFEFVSKISKTAQPSKSDIVRYKCWLEQKYRSPYTGEMIPLAKLFTSAYEIEHVIPQSRYFDDSFSNKVICEAEVNKLKDRQLGFEFIKSHKGEKVQLSQGKTVEILSVEAYEKFVKEHYSSNRTKMKKLLMDDIPDGFIERQLNDSRYISKLVKGLLSNIVREKLPNGDYEQEAVSKNLISCNGTITDRLKKDWGMNDVWNSIVLPRFQRLNRITGKDCFTTFTPEGHEIPAMPLELQKGFNKKRIDHRHHAMDAIVIACTTRDHVNLLNNEAAHSKHNANRYQLQRKLRRFEKTIIDGKEKDVAKEFLMPWQSFTTDAKQTLGNIIVSFKQNLRVINKTTNHYQHYNADGKKEFVKQVKGDSWAIRKSMHKDTGWGEVNLRKTKEVSLNEALKNPKTIVNKDFKQKVLELLEAGQDTKFIKKYVEDNKDVWSDIDLKRIEVYYFTKETNVRYFATRFLSDLVGYMSGIKEYDKAIDKIEGITDTGIQKILKAHLQAKDNNPELAFSADGIDEMNRNIVELNGGKPHKPIYKVRRYESGNKYSIGQKGCKAKKFVEADKGTNLFFAIFSSEILNKETGETNKVRSYLTIPLNLMIDCQKKFGKDWRNNIETYLKENKLVPYDVQLLFILSPNDLVYLPTKKELKEGIILEDIKRIYKLVDVSGVTANFVSETIAQTIFSMTKDDQNKLYKEYRYNIQNEIGIGSRPSKSPNAITGEMIKETCVPLKVDRLGNMIELNGQKL
